United States Patent Application Publication US 2011/0014706 A2 - sequence listing, part 16

SEQ ID NO: 30979 - DNA, 5179 bp, Arabidopsis thaliana landsberg
acaaaagaggatcaacgggatacacattgactagtaaatatttccaagcctaagttaatacgactcagtgcacagtttctttctaagcttcttgttggattgcacgtctgagccttaagtccattatcaacatctccctaaagtcctatcgagataccatctcccgcatcctcactactttggttttgccaaagcagcttccccaaagttatggagtctccgaccaatgagataacggtcatcacggatagagttgtgaaggtttctaaaccagaagcagaagaggctcactgagagacaacctatccatgcgaatctgtagaccgctgagttcactactagcggatatccgagcattgggaacactcctctcgccaacacataaggcacacataaagccgttaggagtttcatcacaatcgggaacacaatctctctaagtacccataacccttgaagcatatgggtctgagatgaacctgatatggacatctatctaatggggttataacattcctcttatttttattctgttggaaaataaaaaaccaaaaacagtatcaacgagtatgtctaaaatcacacatcggccaaatagatcttcaacgccaattccttaaggcttacatgcactaacataagagacaaaagacaagaatttgcagtaagcgaaggtattctagaagcattatcatagaaacacacaaggcatatggacaaacgaagcattattctaaagatcttttagtttcgtacacaaaaacaaaaaaaagagaatcatcaacggatataataatttacacatcgactaataataaatctttcaaagccatctcttaacggcttaagtacacaaaatgttaaacgcctcagtgcacagtttctttctaagcttcttgttggattgcacgtctgagcctaagtccattatcaacatctccctctcgtcctatcaagacaccatctcctgcatcctcactactttggttttggttttggttttgattagctaaagcagcttccccaaagttatgcagtctccgaccaatgagataacggtcatcacggatagagttgtgaaggtttctaaaccagacatggcatctttttgcacagaagcagaagatgctcaccgaaagacaacctatccatgcgaatctgtagaccgctgagttcacaacaagcggatatccgagcattgggaacactcctctcgccaacacataaggcacgcataaagccgttaggagtttcatgacgatcgggaacacaatctctctaagtacccataacccttgaagcctcgagaagccatcttctcttacccgctcaaactttgctctccagctatcatccactattggaagcatatgatccagcattacctgtccattgacgttgttttttagtgacaaaatatcttattctgcggaaataagttgctgattgttggagaaaattacttaccagtctagtccagattttcaaaaagatgagcccaagagcccagtcttgatacaggaggaacacagggctttcatcaactgggactctcattgggacaatcaccaaaagctcaaacagaagtccaattagcaccggaatgataaaaacctgttcaatcaccatttgaaaagtacagaatccacatttagtagagtttggagtttctcatatattgaaaatttaacagcacaaaacacttacccatatggctaacagcaccgagctcttgaatacaatcccacaccatttccatatttggttaagcaagactgaagtcctctttgacttgacatgctcgatagcatacctggccccagatatggtagtccaaaaggcatatgtgccaatgacgaaagcatacaaatctacatatttttagggaatactgttaataatgtgtaacccgtgccaaagaatgactcagaagatcaaaattaacaaacattaccattgcacttgatgccatgagttattggaagaatgggaatggcactgaatagagcacgtcccagcgaaactggcacaactatcaatgctgaattgaagagaagaagagtcacccatgcaacaagtagaaggagaattatccggaccacaaagttgtacctgctaaaaatatacattcatatcaggggaagccctaatgggagtcttaaagtacttagtcaactctatataccaagcgaaaagtcctgttaatttattcaagtatgccaaaattcttaatatcaaacaagctattagcttatttttaaagtaagaacttactcggaatcagattgttcgtcatcatcttcatattcctcacccgtgttgacattcccagcacggaggcgacttctgttagggtcatcagctactggaagcgcagccatggccctgtcaggtcctccgacctgcaacacttgtgctctgttctgccttcctggttcaccatttccattgtcctgaccaatgttgtcttctggtcttggcaagaggaagtctgttaaaccaagcgcccaaccaaccccagtgaaccagcagcgtagaagggacttaattgtggtccgaagtctgaaatgctcgatgataaatggaatgcatatttgaaacagaagcatgtcggcgggaatctcagtgaatgggtcggatacactgcatatatgcccaagttaggaaagacctaatcaaacacaaaatctccaaaaacaagaggttagtcaatatttcttacgatatgtcaagtggaaagattgaaggagccatccggatcgcaagtttgactggtaaaaataccagcatcacaatcaaacttccatacactgcaactgataacagtaccctccgagcatgcttgtgcactggatcatcaatcaaatctcggaatggattgtaattaggatctgctggatcacgaaggaaatacagaactccaggacgaagaacctgcaattggcacaaagtgaaaagatatatttagatagcagcagcgaaaaaaactatttctagaatgaaaatgagtagggacaacacagtacccctcgaagaaggctgacgaagatgcttatttgcaacatgtacatgattccaacaacccaatgaacaagtgagcttgccagaggagaaattgataaaaactgtaccctgtgggacattgttttaccgaacatcctaacagtgcaaacatctagccaccaaccacacatcagaggaaagaccccaagctcgatgaccaaaagaaaggcaactttgatcatggtcatcagatgcctcattgctgccaagaactgtctaaggagggatggtacagcttctactatagatgcaataccataaaatcttccaacagtcagtggctcacctttggcatatcgaatcagtgcaatgatcccaaggtaaaggaacaccagaaatacgataaacatgtacccaacagccagagttgtaatatcagaaagctttgaggccccaacagtagaacctttcaggagatcagtagcaactgatagcgtattgtttgctccattcaattcacttccgttgactttcatcatttcagtgagctgaccaagcagcccatttccttggccctcgctagtcaaattcgagacagcagtcagcgcactcttcagagtaatattttccaatgagagtccggtatctgtaagatgcaatgatgcagccacagcagggcctctagcagcagcaaaaagccatgacacgtgatacaatataatccgtcccaaggtaaagggcacgaagataacaacaccaaggaatatcatattgcttgctagaacctgcaaaattatgcacatcatgaagatttaatgagggccaatagtgaagaagaaggaacatagaatttaaaatatacattgccaaaaagtagaaacatcaacttacagtaaaggcattctcaaccaaatgaaacactggaccttgcattccaaccagctcatcaaatggaacgtcttctgcaccatcagcgtcatccaacccatcaaacatctgttcaacctgagcctcaagacgagctgcttgtatgtccaaccttgccagaacattttcaggattccttctagcaatctgaccaaccgcagcaccctgatccccagcatcttcaccattcccctctccagcaagattcctattagcctgtccagcaggtcttcttgcagcacgagcaccatttctgtccacatcatcatctctctcttcttgtcccccaagctctcgtaaatgcctaaagtagtcccttaatgaagtagctccaaggaagatgaagacaatacttgcagatagtaagaacccatgcaagcaatcagtgagaattactgtggtggagatgtggcttaagaacaacctttgagcttcaccaaaagttcgcacgaaagccaaacgccatatccaaaatgtaatgaaaggtatagtgagaagccagacagaaagcacaaaactcaaccgcagaaagaactgtaaaacatggcaagctttcatagcaatgccaactacaaactcctggaaagggagccttgacggagcattgtcagcatatactggggagaatgaaaaaggatgcttgcaaacctgcagagatgaaattaacaataagcacgtgttctcttctatgtggaactcctacttaagaaacacattaaaagagaagactttaaactgtcaacgttgaatatgagcacacagaaatatgcaattgcccattcatttacccatatcaaaattcctaaaaggcattcaaatcaacacgaatccagatcttaattagaatacgaatcttcaaaatctcaacaatcaaataataaagaggaaaagaaacaaaacctcgcattgacgagcgttgctgtgattaagccactgaaggagacaatcctggtgaacaaatttgatacttccgctacaggcacacggataccgaaccggactgtctgcatcgccaggatttctgcagatcctgcaaacgtcctcttcatcttcgtcatcatcaacgtacctcgatcctgtcgccgtcgaaactgcaggatccatgtttgacaaaggagtgggtgatgcctgattcggggaggaagaggaagaagaataagatacggaaggctcggaaaaaacatcagaagcagccgtgccagacatgggcaaagtaacggccggggaaatctccatagaaaaatccggg

SEQ ID NO: 30980 - DNA, 2364 bp, Arabidopsis thaliana landsberg
  unsure (1)..(2364): unsure at all n locations
tttgtagtttccgcaacaattccttcctttgcagcttttctcaacattgctaagtacctgtgtagaccaggagcaaattggaggatgtaaaggattttcctacgaaaactgtatgaagaaaatcaccaaagacaattagactgaccattcccgtagtttatcagactttggtgttttctgaatttctggatggcaatataggatataatcctcacccttcagtggtggacaagcccatatgtagcagctcgtgaaaccacgcaatttgcagtattccagataaccaatctgaaaaagcatcagggtataatacccttgaatcatccatgtaatgtagaagaccacataaacctaggttgaaaaaccagaacttacaagaatttcgtggtaaacgaaagtgcgcagagcctccccattagcagacttgatatcaggtctaaagtacttcacagaatccaaatacgagagataaacacggcgttgattgggatttgaacattcggatccaaattcttggacatacatcccaaacaagcatacttctacaccttctatcttctggaacagcagaaccacctgataaataaaatgtggagcacgaacgatattactacaagagaggaatcctgaaaatattaaatgtggacatgaagcaaatacaatgatggtgtgcgtcgatcattcttaccttggacttgtatggaaattctgtcggaaaattatcctcccgaaaaatttcaagaaatcgagatttaacttctagcttcttgtcaacagatgaaacaactctaaccacaagggattcaacagttggaatctgttagtgccagtaaaagaaaaattaaacaatcagtgaccaaccagtaagcttcaatctattgtttccagtgaagtagcacttcaacaaacaatagaagataggactcaatgcaaaatcacatgagactttaaaaccctgtattccaccgccagattacctcatcataacttgttccttgaaccctggctctctcagtcctttcctgcttcagccttttaaacaaccgctgctctatatggtcactgagaattgttcttggcagatctttcgctccaagaacagcactctgaagtaaaggctttctctcattttgctccacatcaattacatagcaatatgggcaggtatactcagcttgccccccatcattcctccgcccattaaatagagcacatatttgatgctgccaggcctgacatttatcacattggacccactacaaaaaacatcaaacgaaatagacaaactcagaaaaaccaacaaaacgagatgcaaatgacaatacaactctactgataggatagtcttaccgattcttcaatctcttcatcgtttttctttttctcgagttttgcctttggcatggaagtcccttcagcgagaatagtgtctcctcgggattcattataacagggaatacaaaagtaatgacgagtttcaccacctccaacagtatagtacatcgcattccttttgatacgagcaccacagggagtacaataaataggtggtggctcaaatgtaagcttctccaccgcacataactggcaggaattctcactcattgaattctccattgcctgattcttttctgctttggctttactctgcacacacattaaaatttaaatgacaaggtattcatcaatgatcacatagctagagattcatcttagatatatgaatagacttgcttctctgtaaactttttgtaaataaaatagcaaacctggccaacccactgacgaagaccacggatatgttctctcacttgttccggagtaaacaattcagttaaagaaacaccctttatctttggttttctagattttgaggtaagttcaggagactccaccagttcttctttctttggacatccaggctctttcttcggccatccaggctctttcttcattttgatgttttcttgctttggcgagtcaccagataaaccatgtttacctggttcactgacaggcttaggcttgggaacattttcaaaaggttcacttttcgtttctttgatgccgaatcctgcttgaacagaattatcaggaatttccactttcacttccatggtctctgacttcaatggcctatgatcctttctttcagcatcctgagataagtctgcctctgttgtagaaacaatggnnnnnnnnnnnnnnnnnnnnnnnnnnnnnnctggttgaaaagattgctccaccttcaaccgctttaatgaaggttgcaaattatctaaagtatcagcacaacgaggggtaccagaaaccgctccagcattagcgcttagtgaatcatttgatactacagatctattcact

SEQ ID NO: 30981 - DNA, 1772 bp, Arabidopsis thaliana landsberg
actctgtctggtccttctgtatcgtctggtttcaacaacccggcctgcaaatattaccaatattacaactttacagtacagtactttctaaaactctaaccacaagagaacatatcatggaagaagagaataccagcatccgaataaatgttgtcttccctgtaccattctccccaagcattacaataatctgagagtcagtgaattcaccttccgacactctcaacctgaagtttccttgagttttggtcatcgtggggtatttgtacctagcgtacgactgtatctcttcagcactttcttgtggagtctcagcaaccttcaaacaaaagaaaaacattgaggaaaacaatttattgccttggcgacaaaactttgcctttcatcatacaaaatatctataccttgaaggtcaaagattcatctctaaaacgtaaattttctgtaggaacaaatccagccaagaaaatgttgattccttctctgacagagaaggggagagtcaccacaccataggctcctggtttcccatacagacagcaaatgaaatccgacaagtaatcaagaacactgagatcatgctccacaacaatgacgtagctgggaaacaaaaaaaaacaaaaaaaaaacaatgtaagtaccttattttttatcccttttgaaaaaaaaaacttcagaagctgggaaattcaaacctattaggcctcaggagagaacgaacaacttgagcagctttgagtctttgcttaacatcgaggtaactagatggttcattaaacatgtaaatctttgcattttgtatggcaacaacagcgattgcaaacctttgtagcttaccaccagataaattcttaacatcacggtcaatgacctggttcagctccagatcagcacagagctctggctttttatttttcttatccttatggtcaaggacctctccaacattgcctttaactgctcttgggatgtggtcgttatattgaggctttataatggcctgccatgcacagggtatcagaacttgctcaattgagctgcttaaacatcaaataatacctagctacctcatggagaaaaatattaatatcagtttcaactgtaccttaagattatcttctagaatacgtgtgaagtagttttgaagttctgaaccacggaagtgagtcaagatttcttgccagtctggaggactctgttcaacaaggaatatatgaacacatcaactatgaaagagaccaaatttcgaagataaaagtttagaaactcaagagaggctattacagtgaaacggcccaaatttggtttgagctttccagccaaaattttcagagcagttgattttccaataccattggttccaaccaaccctagcacctgccctggtcttggaactgggagcctggaagtaaagacaaagatttcattgtctgaaaactacaagagcggtcaatttgtttcaggaaaaaatagtagataaacgaacctgtgtaacttaaaagtgtttgccccataacgatgggtcgtatctttctccaagtctcttggaagattgataatctgaatagcttcaaacgggcatttctgcaattgtgtaacaacagagtcatttagcatcccagtttaggtaccatttctagaggcatcttggatatcggaaagagcctatgcatacataccttcacacaaataccgcaaccgatacacaactcctctgagataaaagcaagcttggaaccaacagtcacctcaatacaagttttcctaagata

SEQ ID NO: 30982 - DNA, 4376 bp, Arabidopsis thaliana landsberg
  unsure (1)..(4376): unsure at all n locations
acaaacatggggcatcagactcacttcatgagctgcttccttagaataaatatcaagaatagtttggaccctaacctttagattttcctctactactcggatgaaatagctttgaagttctgacccgcggaagtgagtcaaaatttcttcccagtcaggaggagtctgcgcaagaggtagtagaataatcaatcatacataaactacagaatagacacattaaacgtaaaaggtagagaaaattcagagagtctatagttacattaaatctgccaagatttggtttgagttttccagccaagattttgagagcagtagattttccaataccatttgttccaaccaacccaaggacttgccccggccgtggaattggaagcctgcaagccgagaaacatatcagagccctaaagaaagattatcaatcagattccacaaggcaaaaacttttgattagctaacctgtgcaacttaaaaccattagccccatatcgatgggttgtatctttggctaagtccttagaaagattgataatctgaatagcttcaaacgggcatttctgcaaaattgtacaccaaaaatcattctcactcaatgtccaccaacaagagtaagacaaattcattcaatgtaaaaagatataagtaccttaacacatataccacatccgatacacagctcctctgatatgaaagcactcttggaagtagaaccaacctcgatacaaagtttccctagagaaacaaaacaaggcataaaaaaacgttctttatgaacaaaatttcaaaaactcagaaaaagtaccagtcttgacaacaggacaactcttcttgcactcctggcgacatttcttaggcttgcaccggtcttcactcacgatagcaatccgcgtcaatcgatctgacatctctcaacagacctacaaaatacatgaaatctatagtttaacagcctgaagaaactaaatcacacagattcaaatataccaaataaagatgtcacgctaaggcaaaggaacgaaataacatcatagggaataactatagagtagcacaaacaatatttaaaataataacttgaacaccacaagatgctatcaatgatgaaataatagttgacatgcaaaatcttaagagccaagaaataatattcactcaagcttgaaaaacgcaaattcagtgcttcagataaaaatggtgaaccgaatttgtaaattccaaattcttccacatatctataaagagaaaggtcactaatctgttacaaaagttgacacttgcccagaaatcaaaacaatcgagagaaagaaaaaaaaaacattaaattcaaacactttcaatacaattataagaattttgaaggtatgtcgatggctcaatacaatccaagctgcgaatcaatcgattacaaaaattataaatctgtaacaaatcgaaaagcatctgacttgaaatctaaatctccatggacgagaaatagagaaatcgagattagtacctgagatacttaagagattcgtagaagaagaagattgaaatgaaaaagcgtgtgccgattgttctaaggaaccagcggagagcacacgcacctgagagttactgctttgctcagaatgaagaaaaaaaaagagaaacgaatttagggttttctgaattatctgttttcgtttgacccgattcgcttttttattgggcttgggtcggttacagtttggtctgagcaaagcaatttgtcggaaagcccttcacttccgtaataaaatcaaatttgttttctcattttctgactttcctagttttagagaaaactaggaaaaaattgtcttccaaaatttagtttctttactctcaaggaattttttttttttatctattcatttggattaacaaatattattgcatgtcaactattcaataatcaaaattaattcagtttgttctctgtaaaagtgaatcagtgaaaaacagacactattcttgcacgaccttaagtgtttgtctcgttattgcataagatattgttgaagtactttggaatttggatcgggagcgaaacgaaaataatggccaaaaaacgaagaataacaagatagaaaggttaggatctacaatagcataaatattttggagaactccaccaacatcaaatgatcaaacaaagaagatactgaagaaaaaaccaaacacaaactgtcattacaataccaaattatttagatanaggtttcaaagcatctactattgagagattaaagaaacctctgctgcagataccataaggtttatactagcactctccaattatttcctcaaccagtaatctctaaaccgacatagttaaaatgaaatatgtttgaagggggattattagaaacatcggtcaggtaatgagactatactggaggagaggatcaaaggtggggtttttgagattacttccacttcttgaatttgcctcctcctccaaacatgccatgtttcccgtgctttccatgctttccgtgcttgaatttgcctccatgctttccgtgcttgaatttaccatgaccaccatggccaaagccatgagcaggggcatggccataccctccatgtcctacagcatgcccgtaagggttgtgagaggcgtgaccaacatggtgagctccataagctgctgcggctgcaccagctgcacctgctatcatgcctccgagtccaccaccagaatgtcctgatggaaaaaagaaaatagtattacatggagaaccccaaagtagcagaatgcatataagagaccacaaagttgcatattgataagcacacacgattaaacatgtactcctagtagatttaaaattaaaacatcaatgtatacaccaaaacagaagacagtaagtttatatgtcctcatctttttatcacagaaaaaaaacaacatttcagaaacaattgtcatactatcattcaaacttgacaatacttagcaggctgataatccagcaaacaacaaggccagttctaagctttatttacaaagaaaacagtaagatttacaaactattgttctattatcattcaaagttcgaaggttaatgatccagcaaacttcacgcacaatctttagcttttttcatagaaaaccgaaacatttataaagtcttttcctattaacattcaatgattaacaatatttagcaggttgataatccaagcaagctacaaggacactccatagcttttgcatagaaaacatcaacatttaccaaaactacaaagaagagctctttaacgagacaatgcatacctgaatggtgagctccaggtgcaggatagccagcaggagggtaacctccaggtgcaggaggataaccaccgggcgcagcagggtaagcaccaggaggatatccggcaggtgggtagcctccagctggaggatacccttgttgtggtgggtaaccttgtggagggtaacctccttgagcaggtgggtaatgtccacctcctggaaaaccatgaaatcctttctcttgctcatcatgatgcttgtctttaccacctcccattgcttttttactttaaacctacaatattttgtcaaagatcaaacaaacttaacatttggcaaatctaagacataatctcatagatcaagaattcacaacaatcaacaccagattacatcagtaaaatcacaggaattaccattaagctatatcagaaaaaaatcgaagaataattcaccaaggaatagatgatttacatttcaacttccaaattacatgatcatacacatataagatcattgagtatatagatcgagcacgtttaatacggaagatcaaagataaaaaaaaaatgcgatcaaaaggaaaaattaccgatacgaattgcgatgaatatttcagaaggaattggaattggaacagaagaacaaaagctaatggagaaggatatatatggatggatgtatccaaaaatattaattacttaacgcgttacatttttgaataagcatatcttatctattttatattttaattgttttctagtcctcgtattttaagacaatcataaataaagcattgtagtctttgtaattttaatcgtatctatactccaaatacaaaaaaacgtaaaacaaaacagttacaaattaatcatgaatacaatcactttattttttatgagtgttttgcacttatgatgcatgaaaaaatagtttttgttggatacatgtggctctgtgggtgtttaagaaagtactggggtttaaacgagaatacgaaaatcaaaaagggtaaagtataataaagaaaatatctacgtcgtgggaacgcgcaatgaacacggagttctaagaacatggttaaggaaaaatatattttgttaatgtt

SEQ ID NO: 30983 - DNA, 5679 bp, Arabidopsis thaliana landsberg
agcgtatttcaaagaattaagagattagcttaaaattactatcatttaaaatgatgtagaagcatatacagagggttgggtcaatccttttaacgttttttctgtccgtagagttaagaaatttgacgagattcaacataaataaatgtattattgattttattttatttttaataaagtttcgtggatattgaaaactataagaccgaccaatctaaattttattagttttgatttccaggcaattaatccgaaccgaagtggcatacgcatattcaaaagtcaagatctcctgcctaccaaatagtggatatatacaaaaattacagacacatattagcttattaatgtatatatgttgatagaatgcatgcaagtcgtgtgaatagccaaaatatgaatatatagcatttccaagtagagaaaatgaaatccaaatcatttgaatatgtgaggtttcgaaatctactaaatacgtaaacgaaataactcgctttaccaccaataaaaacaaaatcaaaagggcaatacaacacattatgatgcaacttgatcacttgtgtactctataagttacatttcgcagaaaaaaagattgagaaacctttttaatttgtgttacgtaaattaccgagaagaagcacataagcaaaaaccatatcttgaaagaaagattttggttctttcttgggttggtgacttaaaataacacagagattaatgattaggaacgtcaaggatgactaaaccggtccggtccggctctaacttaattcatccttgatttgatgattaatgatttatttaaacgtttatgtccggttaaggcccggtccaggaataagatcaaatggggataaaatagtcttttactactcacccaacctgccggaatattgagacacatcatcgttcaaaatcaaaacccctaaactcaaattctctctccgtttttccggtgaaaatcagtcgccgttctccggccacagtctacactaaccgtgtcatttcgagtctcatcaaacctttgagcagataagtaactgctacgaatttgcacaccgaagtcactgtttcaatctgaattgcatctttaaaaaagggacaatggcatcttttcctcatcccggttccgtcaccgtctgcgagatcaacagagacttgagtatgttaaagcttttcccttccattgaaaaatgtagggatttcgaaacttctgagctaatggttagattttcgtagcgcagttacggctcagaacttatctgatgagcgagctcaggagacttatggaaaagttcttgtacgtgggcgtttctctttcgtttctgatttcttataagcttaaaaaccatatttgtaagtagcaaatgttttctttttgacaaatttccatcggatttgggggttttgcgtttgatcacagggaatggtgtttagccctgtttcgttcgactctactcctagctctcttcaggaaaatgaaggacaagagaatggagataaggcaagtggtgagagtaaaggactggttgcaacactgcagatgaaggttgcagactctcttaaacagattttacaacccaccgatgtaagagtttcaactatcagtctgtttctttgtttggttgactaaagaaagcttagcattttgtgattgatggttacaatacttatctttatgtatctaggggaattgataggagggatgttctttgcaatttcaaaatggcattatcatagctgttattaataaagccacagccttgctcaccttttcttttctaggtaactctactctcagagattgatcttcaaggagtgagttggcatcaagggaagcatattattgcctttatatccggtgcaaatcaagttacaattcgtgattatgaggacaaaggtttgttttatttattcaattcaggattcctagttcacacttgccggtgtgtgcatacagtttcatattcttcttttgaacagatgagaaagaaccttgcattttgacaagtgattcacaaagaaatgttaaagcccttgagtggagaccaaatggtggaaaatccctatccattgcctgtcggtgtgtattattggtcttctgatcctgtctactttctagagtagccagtttcatagataactaagtttgattctactgtaataactgttccattgaaacaggggaggaatatgcatatgggctgcttcatatccgggtaacatggcattggttagatctggtggttccgcattgaggggaagtctctctcgaggatctggaactcgttggattttggtggactttcttcggtgtcaaaatgatgagcaaattagtgctctctcatggagcccctgtggaagatatcctaaacaaaatttctgctataactgttttgcttaacttcattttggagttgttacttaactacatacgtttccatgatcatttcaattaccatagttgtttatcaagccgcatcgcatgataggcatttgttgggaaagtatttggatttgttcgatcttttctgtctttgcatcacatggatccctaactttgtccatcctgttactccttgacctattttcacgtatttagcatcagcctcatatgacagttcatctttcaccatatgggatgtttctcaaggtaactagaacgacaattaagaacactttcttaatgcacaacatcatgcaaatgtttgaacattaatccagcttcctcttatttaacatcctatctgttgcgttgagatgcgaaaatgcatcttgcaattccttgtttctgaaagtgatatgtatacatcttccaggggcagggacacctattagacggggactaggtggaatatcaatgcttaaatggtcacctacaggagactacttctttgcagcaagattgtaggacatcaactctctttcttttttacagatgtggaaagtagcttcctgtttgatatgattgctaataaaatgtttttctgtcacagtgatgggactttttgtctttgggaaacaaacacatggacatctgaaccctggtctttgtctagtggatctggatctgtcacggtaagatcgtgagcctataatagtgagatatgcaatagagtattgttaaaagcgttttgttggagaggttaacgtcactagtgtggtatgcatagcttatgtacatgactccattgtactaaagcattcatttccttcttttatgtatgaaattgcaactgtgttccatcttcgtaaatggaccaagcaataatactatactcccttctatgatagggagcgatatgggatcccgaaggacggtttatcttgatttcgttttcgaaatcttcaacactgggctctgttcatttctcatccaagccaccatccttgggtatgcagaaactttgaagtcgttttgcctatactactagaaatacttaccagttagcacactaaatctctgttttggtttactttcagatgcccatctattaccagttgaattgccagagattgcttctctaactggcaggtaaattatttgattgttttgttcaataaacccttgcaaaggccttccgttaatcacttcttgatattgtctttcataactgaaataaccagtgagggcatcgagaagatagcatgggatgcatctggagaacgattggctgtgtcgtacaaaggaggcgatgaaaattacaaaggattgattgccatctacgacacacgaaggacacctattgtatcagcatcactagtgtaagtaactcttactgttatccattccatcggtcttgacctccttttgtatatctttgcattgtctaaatggatagacaaaatctgatgcttttatgattacagcggtttcatcagaggacctggagaaaacccgaaagctctctccttttcattccatgacaagttcaagcaaggtccactcctttctgtggtaaggcatatgcttgattaagtctcttttcatgccaaagtattcatacaggtagaatcggttagttaattaatcttccaaataaaccttgttgcagtgttggagcaccggattctgttgcacctatcctctcatcttccgctcacatgttcttccttaatagccaaatggttcaaatttaatgcaagtttcaaactttttggttctattttgtagactgctcactctttgtatacaaatggtttctttaaagaactcagctttgaagttaaatccaaaaacaatggttgcatttgaagtacattaatggtctttgaacaccaaaaagaacattacaaaaaacgaatacgaaaagcagcaaacagttgagtcacttagacattcttgtttttcttcatcttggaaggtggccatcgacccttcttcctcatcttacgcttacgaaccagacgtttcctgcgtagcctaatctttttggccagcttcatcttcagcctcaattccaagagcagtttctctttagcttctttcgattccaacggtagtttatccactggaacagcagcaacaacagtctttggttcctcattgctctcaggctcagccccgtccacgccagaagcagccgccttcaccacaattcttccatggctagagttcaagctgtaagcactgagagagactctgttcttggactcgacagcgttgggtttaaggctcaaaactgaaacacaaaagattagagcattacaagtaaaccaagtgttcgattaaatgcttcgatctttaagcttaaaacctgactgccctaaaacaaaacttcacttttttgggacaatcaagaaattgaactagcccaggagcttcaatttggttccatgagtctctattggagttttttttttcccgatacaattccacgacaaaacgaagcaaaagcgaaatgtcaagactagaaacgagtgacaagacattacctggagaagcgaaagacggagattgaagaaggcgcgaggaagaagaagaagaaagagaagagagagaagggagagaattgaagcagagaagagccatcttcttcttctaatggaagaatttgtcttcagactttcatttgatagtggataagctttttctccttctctctgtctgtgtcttcttaacgaacggattggattgatccggctcaatccggtttaattaaatacagaaattatcaaacgaaccggcttctttttcctgattcgggttgaatagataaaccggagtgggtactttttatagaactgtgagttgacacgtggctgtcccagtgtgtgattggcgggagaaaggctaagttaaggttgttccagagaatgatgttggttggtgttttgagcaacttccaatggcggaggacaaatctatggagaaagggagagagagagaaagaaacaaatctatcaaacagaaaccataatcagaagacgaaagaaggagaacaaaatccgcacaatcggcggcacgatttggatatcgccggtttcattcgcttggctgtgaattgaggaaacttggatatggagctgtaggacgtgtctagccgcggattctgagactggaaataaagcgaataacatttctgagtttcattccccgaagaaaaacgttatgtcttctcagaatcttgaacgaaaaaggatctatcaagtttggcccgccaacaatggaagtcg

SEQ ID NO: 30984 - DNA, 903 bp, Arabidopsis thaliana landsberg
  unsure (1)..(903): unsure at all n locations
gttttcttccaatctttcaggaaaggtgaggagcactcattctttgtaaaccttgttttttctgttgggagtaatttaaagccctccgccccaagaaataaactcaaatcatcgagtttgtctcttccccctgtaaattttgaaagaaaagggaccggtttaagtggtgatcagtatgcggttatggtgtcatgtcggtgcaactacacaggtagatccacattaccgtggtttgtagccatcttttcctcttttgtccattcatatctatagctgtttcatcaatgctgttttgtgttggacttagaatttagactgtttttcaaacaacgggcggaatggggaccacgagtttcgagagacctgatgatctctgttgcgtctgaaatgtcaggagagccttgtggtccccatgggagagcctctcaactacccgttcaggtcattctctctctttatctctctctgacattccctagataataaatgggacaatgcatgaactaatggaaggagtnnnnnnnnnnnnnnnnnnnnnnnngctagtgtttacccaaatgactgaaggtttaattagatgttgatgctaaattgtggttgcaaaagttgctaaaaaccatgcaactctggcttcgtatatatgaataagaaaccatgcaacagttacaaagccacctatttgcaatgtggtcatattcttcaaaattagccaatttctaaatctgcaaataccaatcccaatggcatcttttattctacctcatacttattctcaactggtttcagatatcaactcttcaggcatcgaatatgacttcagaagatctatccttgaccgatctggctcttgcatccttcacatcacctccaactgtagtgtccctacactctacgcctacgacc

SEQ ID NO: 30985 - DNA, 2221 bp, Arabidopsis thaliana landsberg
  unsure (1)..(2221): unsure at all n locations
gtttgtttcttcctttcgttttgcctgaaaataaataaaatttgaaatcgtaaaattattataaatagtaaaaaactaaaaataacacatgaaatttttcttaccgcataatatttatttatttatgatttaattcagcaaaaaatcattcaaatttattcatatgtcgactaattcgtctgataatttatttgttgcaatgctggtttcgtaattttgcaaaaatttaacgtcaaaatattatattactacaaagagttatctaattgagcaacgcattgatgtcatttttttaaaaaaaattggtccctaacaaaaaaaactttattacatacactctacaactgttaccaaatgaaatttacacaacatttcttgaatctagctagaagatccattaccattagtacttttgtccatttattatgagaaaacaactatacgttctatgttctcttccatattagtttcctcgagtcgtttcctctttctcggccttaatccatgcagcctgcaaatgaaagaacacaaaatatcaaaaccagctcaaacgattggtgtgttaatggaaaaaaaacacagaacgaacctaaccttttctctttcgagttttgacagactcggtcgaatcgagttgccgaggtctaaaccaccccaagcttcttgcatttctctatcccttgcttgtcttcttgttagcaatggtgttgctgtctccatcttctcgctttcaggtttccttttattcttattaactggttggtacgaggttgagtccccaagtcctaaaccaccccaagcttctagcatttctctgtccctctcttgtcgtctagttaggaccggtcttgtctcttctcccaaattctcagtagcttctgttttcttgctttcaggtttcttctggttattgctctttgactccccaagtcctaaaccaccccaagnttcttgcatttctttatccctcatttggcgcctgctgagaatcgngtttgccaccttcatgctttcatgtccctggttcaagctcccttcattatgtctctttgagttctccgtctcttctacaccagctttgaacatctgcttctccttctctagctttggaacatgtttcaccagaattttgtccaaactctcataatttgactctgtttttgctccttgttttctcttctgaatcctccggtttccataaactgcttccgatgcaattttttctgtttctaatctgtgaaccggctttaccaagatcatgtctaggctttcttcttgaccctcagctttattattgttagagtctacgttttctttgcccagttcttctgttaacaacacacttgaaactgtttctaaattccttgcttcaagatcttctttgctcctcttttttgcttcttggacttctttctctagcttggagaaatgttttaccagacaactatccaggcttggaacttcagacaaaccatcttttcttcccggtttcttcacgttttcatacatttttccgcagttctttatagtttcttgaacttccttctccaatcccgaaacatgctttttcactagcaaactttccaagtccgggataagatccaatggtgttttgtttctgcttgaagtcttttggtactttccaaaactcactcctgcgttctttttggcttcttcaatctctttctcaagccttgaagagtgtttcacaaggatgcttcccaaatctggaacaggatcacttgcaacaccttgaggaacctttttgtttttctcagatacttcctttgaaacccttttggcttcatggacttctctttctaatttggtcatgtgcttaactagatacttgtccaaactcggaatttctgtctctgttccatcccttgttgtttttccttccattaaggacccgaatttagaatctcttcttgatcttgtatctgaaacaattggttcgaagcttgtggtctgtcccctctggctactaacttcagccaaggcctcatttaaaccacaagtagcaactacagaggcaagacttgaaagttgatcttcatgtaagccctgaagcctctccagcatcaattccactagtttctccctgctaaacttcccaaatgattgccgcctcttgacttttagctgtctcattttgaaatacgaagtctcctcacattcagccacttcttcatcgaccttgtggagaatgccgagttca

SEQ ID NO: 30986 - DNA, 3197 bp, Arabidopsis thaliana landsberg
tttacacccaaaaaaaaaactcttagaaggccgaaaggttattgattattacatatactttttcacaactataaatacggagatcacaataggactcatcacccaataatataactaatctagtaaatagacaaagaaaacaacatggctgattctaagatgaagctccactgtggctttatctggggtaattcggcagctctcttttgtatcaatgagaaaggtcttgactttgagcttgtcttcgtagattggcttgctggtgaagccaaaaccaaaacttttctctctactctcaacgtataatctctcacacttaactcttaactgtttgcatctaccaaatttatttaacttcatatgtgtttgaatgaacaatcattctcttcttttcttgcagccatttggtgaagtcccggttcttgaagatggagatctcaaacttttcggtactataatcttgtttcttattctggaattttatttgaagtcttggatttgaatgtggaggttttgcaaaaggttacataattattaccttttcataagtttctttgttaccatatttttgcgaaatttttatagtgttttgattatgcatatagaaccaaaggcgatcacgcgatacctagccgagcaatacaaagacgttggaacaaatctattaccagatgatcccaaaaagagagcaatcatgtcgatgtggatggaagtagatagcaatcaatttcttcctatagcatcaacactcatcaaagaactcatcatcaatccatatcaaggtttagccacagacgatacagcagttcaagagaacaaagaaaagttatcagaggttctgaacatctacgagactcgtttaggcgagtctccttacttggctggtgaaagcttcagtttagcggatctgcatcatcttgcgccgattgattacttgttgaacacggacgaagaagagttgaaaaacttgatctattcacgtcccaatgtagccgcatgggtcgagaaaatgaaaatgaggccagcttggctgaaaacagtagtcatgaaaaatcacatcgttgacttgatgaagcaacgtcgtttgcctataaggttagattcatcgtgtcatgagtcaaccgttgtggctcaaaaaaatgcgatcgccattgagaacaagtaagcaagcacggccgagtcattatgcacggtctattgtatgggtcgtccatttgtaacagtaattggttgaagtcatttgtgtttttattttgttgttatccaaaaaggtcatttcgttatgtgcttgtatcaaaataatgcaacattatgtgatttaattaagtttttattcatgtatcatttgggaaatacatatatgtaccttttgtcaaataaatttactaagggtatgaatttatatatatcagtatcagtgtatcaccattccagagaggagaggatatttttttaggccacgtgtcaattcacaagcgtttagactattgcaattaatatgtagtcgcacacaggagatgattccatcgaatggcccaaaacgacccgttgagagaaaaagtgagtgggtttacgacttaagaaaaaaaagccataaatcccgttgtaacggctacttccccatttgtatatttcccccaaaactcaaaaaagagaagagaagagtcaccaatcaaatctttcttctcctatctctctcgtcttctcgactctccaatcgaattctctccaaagatttctgcttatctgataatcttcttcgcttaatctgatacagcaaatttgaggatatgatcaaagccgccatggatctcggttgtttggatttgggatgtctttctgacaagaaaagcggcgtcggtgtttccgatcatcttgagtgttcgtcttcaccttcgaaacttggcaaggtaatttctctttcgtttctcgagatctaatttcattccgtttaatggattttgttctcccgtacgtgtgatgtttccagtgacattggttgagtttcttcatgtttaatacaaaaatagggtttggtaatataggccacgggatttaggtttcttgttgttgttctccttcgattaaatcagtcaattttatactaagatgttagggttttgcttcactgtctctttaagtcttgtttggtttagggatttcaatctatattgatcgggtttggttttgagaaatttagtttcttagagacttaaagaagatgaatttaatttcttagggacttaaattcaatttcttagggatttgcttagaggagttttgcacttgattgtaagtgttaactctctaattaagctggttttttgcttctgttctttaatggccgtttcaataaatgcagaataaatcaccaagagagacatcagctcttagaaaatcacaatcaaagaggtcttctcaacgtaaaacctcacctcttggttggttcccgcgaagaaaaggtgattcctacttgaataggaagatcaagaagctacaggtgaagtttcgttcttgttatatactcacatttattgattgagtgataacaacactatgtccagttctggaatattgaagctgtttgtacggtgttttgtaggaggttggtggaatgaatcagactcttgatgagactcttggcgattcaaatccacactactgcaaaattgtaagagaacaaatggctgtcagagaggctgcgggtaaggccatggagcttcgcaaggctgctctggttgaagcatcttggtgtagaatacttcgtgctgctaggtaaattaaaggttttagtatccagaaagtttttattgtgatacctctttaagctttttttaactataggaatcttcctgttgatagaattccaagtttagaagcagaaactctgatggagaatggagaaaaggctgcagtggaagcttttgaagccgcatctgcgttgggagtgataatgcatgataaaccaaatagctcgaggaaacaatatcgaattgaaacatcaggtacacatggaaggggatctcctactcataccgttacagcatcttttgaaactgcgtttgatgttgataaagaagtagcagctgcggttaaaactgcatttgctaggcttgcaaattgcccctcttttagcaaagctgagattaaagaccttctgaagaaaatcagcgagaatcctgatgtgcgtgataatc

SEQ ID NO: 30987 - DNA, 2131 bp, Arabidopsis thaliana landsberg
caaaaatcaacatcaatttatatatgttattttgcctttcttgatttgcaaataaccttgtagagctcaggtggcttatgatctgatatctctatatatataaccggtcgactatatcaacaaagatgttatttgatgaagaagtcactagcgtggggttattttcaactacctcctccattaaggaatggttcgacttatatttatacatttacatgataccgacttattaacatccaaactgtatatcatcccacctattttatttcagacttttttatataaaggatcataatcataagccttgtttcgtcacgtcattcatcatccattccacccatctttctaaaacaccaaaaagtatattttcttgtaggaatgtaagactagtcgttcatacgatgtcgactgtccacatttatgtaaccccatcgatggagacaaatcaaattactagtttcaaagtcatattgaatattaatatgaagttaaaaaacatgtttgtagccttatgtaaattatatcctttttttgtttagttacgtaacacaattgcataacaacaaccacaaacaaaaggttatagcttttttaatgcaaaccaatcaaaaatctttgcaattttctaatgctaaaagtatgaaaaatcgcagttgatattaaaaacaatttaggggatttctcaacaatttacaagttaaatttgttaataataaaacgacttgactttaccatatatctttttcttttttaaattagaaacttttaagaagaagaatacaaaatcagtagtggcactttatgacattttccacaaaggttaaaaaaatcacattcctttataaacaacgatccattagtgtcggaaaacgaaagagaaagaagaagaaagaaacaatggagtctcccaaatctaacgtcgacgatggctaccaaaacatcttcgtcatgcgtcacggtgatcgaatcgacaatttcgagccactctgggtttcaaccgccgagagaccttgggatccacctttggttcaagacggtatgattcgagcgtttcgaaccggtcaaaggatccgatctcagatcgggttcccgattcaccgtgtcttcgtctcccctttcctccgatgtcttcagacagcttccgaagtcgtcgcagctctatcagccgtcaatgtcgatcctaacgccatgtcttccaaaaacggcccttccattgataaatctaagctcaaggtctggtcatatctataatcttaaactcagatttaggaagaaatgtgtgtatgatgaaatcagctgagatgttcggctactttctcaggtttctattgaattaggtttgtgtgagatgttgaactcagtggctataaggcgtgagcttgctcctaaagatgggaaatttgacttcactgtttcagatattgaaactatgtttcctgagggaatggttgatcataatgtggatatggtttataaagaggtatgctttacactctacaggaccttttaaagtgttgatcgttttccttactttggtagacaacttgatccttttgttccttctgttcagttgcctaaatgggaagagtctgtggaaggttgcagagatcgatatgttaaagttgtaaaggctcttgctgataagtatcctgaagagaacttgctcttagtaacccacggtatgcaagtttctgactcttggtttcctattttgacttatgtgtatctgtaaaatgccctcctatcctttgtcatcttgatcaatctcaatcagatgtaaaccatgtcccttctctacattgaactatcctatccgtctctgatgacctttgtgcactttggatgttgttaccttctaaacctctttgatgaattttttcaggggaaggagttggaactacattttcgacattctataaagatacaacagtgtacgaagtagactactgtgcttatgttgaaatgagaagacaagtctcaagtgaagatgggtctgttaaagctggggactatgaggtggttttgagtcatggtcaagctgggatcaggtttagtcatgatcctgtcagttatgaacctgtcataagccattcacctgtttagtcaaattgtcttcagtgtcctctgtgtc

SEQ ID NO: 30988 - DNA, 3615 bp, Arabidopsis thaliana landsberg
  unsure (1)..(3615): unsure at all n locations
atgtacttaaggtaatattagcactaacctatgaaatttttgctaaatgtgcttttagaggaatgtggttttcaatatttgactgtttataccatgcacagggagaatgggtttcatctggaaagcaagtttgtgagagctcaaagctattccatttatacatgtataatgtcagatgtgtagattttggctcttcaaaagatccattcctaagcgaagtttcagagttcgcgattctttttggcaatgagctggatgcagaggttgttgtttctctctccatggatttgagtattagaatttgaagatgtaaccatggtaaactaagatttgttttactgtatcaggtattatcgatgtctatggatctttatgttgctcgggccatgatcactaaagcatctctcgctttcaagggatcacttgatattacagaaaaccaggttagactgaacaacaacctctatttttcctaacatttatgtttgcttgagaaactttttatcttatattggtggcatttcttgtgcagctatcatctctaaaaaagtttcatgtgaggttaatgagtatcgtgttggatgttgatgttgaaccctccacgacaccatgggatcctgcaaaggcctacctgtttgtccctgttactgacaatacgtctatggaacccataaaagggatcaactgggaattggttgaaaagattacgaaaaccacagcgtgggacaaccctcttcagagagctcgtcccgatgtatatctcgggactaatgagagaactcttggtggggacagaagggaatatgggtttggtaaacttcgtcacaacattgtatttgggcagaaatctcacccaacttatggtattagaggagctgttgcatccttcgatgttgtgagagcttctggattgttacctgtgagagatgcttttgagaaggaagtagaagaggatttatcaaaaggaaaattgatgatggctgatgggtgcatggttgcagaagatcttattgggaaaatagtgacagccgcacattccgggaagcggttttacgtagattcaatttgttatgacatgagtgcagaaacatctttccctaggaaagagggatatcttggtcccctagagtacaacacgtacgctgactattacaagcaaaagtaagaaaacatcttcaaataattttttgatttcttcaatcctttttctaagtttcattagatactaatacttttctaatatcacgaggacttacatggcctcaagtcacctgtggtgttgtgcaagaaggagaagcaaagtctgtctatgtattatgagatagctacttctatggctaggatatatgttgtacaagaccggcttttcttctacttcttgcacaacctgaggttattgaggctatacaagtcttcttctataatgttatttattaggtatggagttgatttgaactgtaagcaacaacctttgattaaaggacgtggtgtttcgtattgcaagaaccttctttctcctcggtttgaacagtcaggttataagaaattcttttcactttaacaatttaatgatataaccgataaattaacgcttctttgttttttcttgcaattcaaaggtgaatctgagacagtccttgataagacatattacgtgtttcttccacctgaactatgcgttgtgcatccgctttcgggttcacttatccgaggtgctcagaggttaccctctataatgagaagagttgagagcatgttactcgctgttcaactcaaaaatttgattagttatcctattcccacatcaaaggtatatatatatatattatgcttagtgtcttttttttttttgttgaaactatctaatcatatttggtatatatatgtagattcttgaagccttgactgccgcctcgtgccaggaaacgttctgctacgagagagctgagcttttaggagatgcgtatctaaaatgggttgttagtcgttttctgtttctcaagtatcctcaaaagcacgagggtcagcttacaaggatgaggcaacaaatggttagtaatatggttctttatcagtttgctctggttaaagggcttcagtcatatatccaggcggatcgattcgccccgtctaggtggtctgctcctggtgtgcctccggttttcgacgaggacacaaaagatggaggatcttcgtttttcgatgaagagcaaaaacctgtttccgaggaaaacagcgatgtgtttgaagatggggagatggaggatggtgaactagagggtgatttgagttcgtaccgagttttatctagcaaaacgttagctgatgttgttgaggctttgattggtgtttattacgtcgaagggggtaagattgcagctaatcatttgatgaaatggattgggattcacgtggaggatgatcctgatgaagtcgatggaacattgaaaaatgttaatgttccagagagtgtgctcaagagcatcgactttgttggtcttgagagagctcttaaatatgagtttaaagagaaaggtcttcttgttgaagctataacacatgcttcaagaccatcttcaggtgtttcgtgttaccagagattggaatttgttggtgacgcggtcttggatcatctcatcacaagacatctatttttcacatacacaagccttcctcctggtcggttaacagatcttcgagctgcagcggttaacaacgagaattttnnnnnnnnnnnnnnnnnnnnnaaactccacttgtaccttcgtcacggttcaagcgccctcgaaaaacaggtaaacaagattaagaaacaaagtatattgttctcaaagagtttcaaatgtttgactgtttggttactttttgtttttcagattcgggaatttgtgaaggaggttcaaaccgagtcatcgaaaccggggtttaactcttttggtttgggagactgcaaagcaccaaaagttcttggagacattgttgaatctattgcaggtgctatttttcttgatagtggaaaagatacaactgctgcttggaaggttagttagttagttatttcggttgaaaatctctaactaactcgtttttttttggaattgtaattcttagcttactaaatcgtatgattcttttccaggtttttcaacctttgcttcagcccatggtgacaccagagacacttccaatgcatccggtgcgagagctacaagagcggtgccagcaacaagcagaagggttagaatacaaagcgagtaggagtggtaacacagcgactgtggaagttttcatcgacggtgttcaagttggagtagcgcaaaacccgcagaagaaaatggctcaaaagctagctgcgaggaacgcacttgcagctttgaaagagaaagaaatagcagaatcaaaggagaagcatatcaacaacggtaatgcgggagaggatcaaggcgagaatgagaatgggaacaagaagaatgggcatcagccgtttacgagacaaacgttgaatgatatttgtttgaggaagaattggccaatgccttcttacaggtaacaacaattttaatagaaagtgggtaaacaaatcaattttgggctttattgagcttattttctggt

SEQ ID NO: 30989 - DNA, 2002 bp, Arabidopsis thaliana landsberg
  unsure (1)..(2002): unsure at all n locations
agtgcattatttcgcgtcctcctcagcttcatcctgtcaactcgtccagcggcgatcagaaaagctgcttgatagcttttaggatattctaaaccgttataaggttctaggttgagcttccgagaatctcttattctcaaacttgcgatttgtgggatgaagggtgttcgcctagcttcttcaatgacccgactgatatatggctccgaactggtggcctgatggaactttgatctcatttcttccagttcccggctaaccttcctcatggtctcgaactggtcgagggctttcttgctcgcgctgatctgcgaattgatcttcatccccgagttgtgtttccccatcctccggatgaactatagtgttagcggcatcaggagttttttgtctgctggttccatttcgcgcaagggagcttggcgaattgaacatagtccgtcggactccaacaaggtttcctgtattcatagaacaaacaggagattgtatagtgctaacattttgactaagagatacatgggttgtttgtagcgtttcaacagccttttccacatccgagaacttcggtgacatttctgacatggtttactgcatggttttgagagttttggctaatgatgcactgatggcgtcttctccggccattgttgcttatctcgaaaatgtggtatagacaatctgacgactcaagaatcctcagtctccacagacggcgccaaaatgtggatgtcggattcacacacttaagtatttatttatttagtgagaaggattattcttgaggacaaatatactagaaaatagatagatgattatagagaaaactatgagttttgtagagaaaatgtgtatagctaatttgcacaaaaatgtgtgtgtctttacatggtctttgacccataatttatacccaaagaatacatttaatcctcatttacacacaattattctaccttaaatgtatccgtttctagtctttgaattaattattcaacgttcgaatttgaaaccactccgggcctcctggacttcacccttcggcccatttgtcttcttcaattcgagtagtcctaactttgatgttgcaccacttcgccaatcaacatctcgcccatactcttacttcgaagaatcttacgggcctttcatcttatgggcccccttacttgtgtagcaatctttggccggatccgagcccgtggtgcgggatccgacaccaacaattagccccccaagtctttcgaagtgttactccagttcggaaggctttaatgctataagggcaaagattgcgccaaatgattcttttgatttcccgcccaaattacgcgattgcattgatctcggaattttccataattacnnnnnnnnnnnnnnnnnnnnnnnngaccgtatattgtttatttactattaacgcggggaaactcttccacttcccccacgacggttccgttatcatcactggctcgcgtgtaggtaaatttactttactctttccttgtcattttattttttacgcttctctctcaaagcaaagttctcttctttccctgaaccttcaatctttctactctctacacaatgaattccgaaattttaagacctgaatccccctctttcgacgacgccggctctagtaacgacctctacacccggccaaatgacatcgccgaccccactatcaatccacatgcactctccaatctcttaatcgattgggagagctttgtcggattccggccgaagtaatgaaggattttcagatgccggagcctaccgaatcgccggaagaacaccgacccgggttcttctgcgtgtacaaaatttacttcaaagggtgttgcttgactttccctctccctgaagccctcgtgcgttacttatcggccctataaatcgccttaccccagcagacttccaacctcctccggactattctgggaattattactattgcggctgaagctggatagccatcgngttcccaaactgacgaact

SEQ ID NO: 30990 - DNA, 1336 bp, Arabidopsis thaliana landsberg
aagccatatagatgagcggtctaaatatatccttggtctcggttcctgagacgcagaaggcagtccctccatctccagaattccaatgaatttcttgagcaatggctggaggcgctctaactgggttgctgacctgccatgatagcagataatatcatacatggtttcatacgcactacagatagtcttgataacagagttagctattaatttacttagttgctgtatgaaaaaggaaaatacctcaactttcccatggcccttgccaagcgataaccaattacacgcacccttctattgagaaaaaggagtgcatacacaccctaaacagaatgaaatatgagaaaacaccaagtcagatagattcagtttagtaggaaacacaagaagctctcctctggtattaacataccggaaattcttgattctcagcaaacgcaagctcgtgtatgttgtcgattgactcaataaatttctcaaactcagtgcataaggacatatcatcaaagaagaatggaaacatcaaaacctgacaccaaaataaaggctcataagttactatttactagatgccaatcccatgatgcaaagaaatgacatgacatgaggattcaaaatgaatagaaaaatacagatcatcagagtcagtcggtaacgcaaatgattcatcagtgaaaagaacaatccagtaattattttaagtgaaatgaaaaagcacatatactacaatacctcgtacataacactaacaacttcagcatgatgatgatctggatcatatgttcctttttctattttcaaattgatctcttgcaagtgcctcgtcaccctttcctcatcaagtttccgcaacacaacaagtaatggaccaacagaagagcactcatactctttttcatacatctcttgagtctgatggtgctgacaaatgcattgcgcacaaagccgcatctcttcagagattctcttccacaagaccttgagaggtgaatcaactctatcatctttgaagtaattgtagaaagtctctataagaggtcccattatatccccgtgcccacaccaaatatgagtatctttcggcaacgatatcaataaagtgaatgcatccgtaaacctaaaagaagatgtaaaacaaaaacagtcagctagagctgaaatccgagcaatgtaataactaaattttgtctgatgattttctgatttcaatcgatttaacagtgaactattcagagcaaagagagatatagaaggaaccactgttcttcgcgctgatgaatgcttcgtcatgctcacgcgttttagaacaacaatcaagcgtaagtgaagcctattt

SEQ ID NO: 30991 - DNA, 5865 bp, Arabidopsis thaliana landsberg
acgtaataaagacaataatattcttaacacagatagaaaaggagcggagaggaatccagagaaaaatcaaatttggttttcagagataagacactacataatacacatatgattgcagaattttatttaaaggctttttatcttttaagaggaaaaacaataatggtaataagatattcaacaataatggccccttcatcatatagtatcgtatcacctgcagatattactatataggctccaaatttaatcaatggggtatgtctctctaaatggtaaagataaaggattctactaagcaatgagaaacatataattataattaaacgaggaagacagagagacgcacccttcgttgtcctgactccgtgagcggacattgtcgcgattagtggtttgtgggctgcctctcggtctcagcgctctcttcctctgctgaaccccataattgaaggcatccttttccctctcggtagctccttcaccctctaaacacccatcttcagattctttttcactgattctgctgcgcttttcagctctttctgcctctgaatcaccatccctctctctccttttttcctttgtttctctttcgtctttttcacaattatccggttcgttctgcttcttctgctctggtgccacatattcctgctctgagggtttggcagatgcttctcccagctctttctcgttctgcgagatctctttctcagcaccagtccttggctctcttttgatatgatctttatctttctctttatttctttctcgatctttctgctccatcctctcccgttcccacctatcggattccctttcttctcttccaatctctttgggttcactcatgacactaccaacaagcacagatactcgacggtcatttctatccttgtctcggtccccccattctcgatgctttaactcttttcttttcttatctttttccttaaatctatcttcgtttttggcatcaaccttgttttctccgacggtttcacgtccttccaaatgagacccctccacaggcgcagagagatctttaggcccaacctcagttgggccttgcggattaccgcgggatacaacccacgggtccacatttgcagtcgaactttcagcaactctcttccctctatggtaatccttctgctctttccaagccaagtgagcatgcccttccttttccatcttaatctcccccttttgttcattataattttgattctccctatcaaattttgtatccctagtatagctaccggcattacttttcccgctaaaatcatcccctggacgctcaaacttggcatccctgtcactcttaggaccctgaatctccctcttagtctcaccatacatctctctcccatcattcctagtatagcttccggtattaccttttccgctaaagtcatctactgatctctcaaatttcacatctctgtctcccttaggaccctgaatctccctctttgtctcaccatatatctctctcccatcactcctattttctctactctcaaccctaatttccctgccatccttagcaccatctctcggctccatcggcacaggggcgtgagtcaaatgaggatcactagaagaaacagttgtgggcagcgacggagaccgatagacaagaggcagaggagagcgtctctctccatctctaggctcgcttctcgcaaccttaaccaccgttctagattcaacctcataaggagcagaagcagaagcagcagcagcaagtggtgaatgggagtgagaatgagaatgagggtgaggaagcgcctggaggtgaggttgaggctgagattgagattgagattggggatgctgatggggctgttgatggttatgatgaacctgagccggtggtggcgtcacaggctgatgcggcgatttagggtaagatccagaatcctcgtgagggtattttgctactgatgaagaagaagatggatgagtaacaccctcttcgtgagatctctttggaacaccactcatcactcccaaattcaataacccagaaattcactgctgcaacagatagaattgcacttaattcatacacaacctagagcaaaacacagaatttgaatcaccagactaaacattgaatccctaaaatgaacacagagccgaagatttttttaaaaaggatatttcttttaccaattgaaactgaagcagagcacgaagaagcaaacccttttggattttgccgccgggaagtaataaatggcaaactggattcggacttttgcctctctctgagtttctctgatgagtctaatttattttccgttctccttggtttgctactttattttggacaaatgtttatttttcgcgttaatatttgcttcttgtcacagaccgtcgtgctcttacaagtctccacaatttaggttttatttattgccgttatgccctcatacttattcaatctctcactttttccataaaactttctattaattgaattgttcataggatatagattttgtcgtttttaatttttttatacagtacaataaaaagtcaacggaaaacagagctcattaaattcactgagacgaaataaaataataaataaataaatcgaaggaaggagtcatatcaccttggtatttatatatctcaagcgaccatgcatgatagtgaaatattcaagtttaaagacatgatgatgatgtcttgcacagttcaaacattagtacttgttccatggtttctagtagtatttgtactcgccggtggagaagactcatccgagacgacggcaatgtttccggcgatgtttgtgttcggagactctttggtggataacggaaacaataaccactggaactcactggctaggtccaactatctcccttacgggcatcgatttcgctggaaatcaaccaaccggtcgcttctctaacggcaaaactatcgtcgatttcattggtacatattttacatatcggtctctacatgcatttggttttgaaatcagtgcatgcataaatttaatttgcacaagagattcacccttttactttttttttgttttgttaattttttagtttgttttgggttagcaattaattaattaacatgatcatggggatggatgtggatggttgcaggagagttgctagggctgccggagataccggcgtttatggacacggttgacggaggagtggatattctccagggtgtgaactatgcctcagctgccggaggaatcttagaggaaaccggtcgccatctggtacttcttcttttttttctttctaaatgtctatttttattgttcaaaacattttttggttatataggatatgtttctttttttttaccatgttagttcatatcaaaaactttgtttaacgaaattggtctaatcgattgcttatgttcatataaagaatccaagttcgaaatatccaaaactgaaaccgaaaattgaattgtactatgcttttttgttaataagcatacggttttcgatattgaaaattgaaagttatctttcgctaagtaaaaaaaaaaaaaaaaaaaaaagtgaatttggggtgcataaagtccgccggaacagtcgtcctttaaccaatagaagtagccacatttgaatcacgggaggttatttaatgtcgagtgactttgatagggtgcatgaaaaacttttgcctacgagacatgagtatttaataaccccaaaaaaaagactataataaatggggttgcattcttgcatgcatgcattgatgaagggagagagatttagcatgggaagacaagtggagaacttcgagaagacattaatggagataagtaggagcatgaggaaagagtcagtgaaggaatatatggcaaagtcattggtggtggtgtcattgggtaacaatgactacattaacaattatctgaaaccaaggctattcctctcaagctctatttacgaccctacttctttcgccgacctccttctctccaacttcaccactcatctccttgtaagtcttatttacgaatcactatcagtaatatcataaaccatatatgtgtgtgtttgtgaagtcatcgagtgcctaaaatccgtatagataattacaaatttttattttataacaataatactcatgtcaaactaaaattcgagtgttgtacaaaattttgttaggaattgtatggaaaggggtttaggaaatttgtaatagccggtgtgggtccattgggttgcataccggaccaactagccgcccgagcggctctgccaggtgaatgtgtggagacggttaacgagatggctgaaattttcaacaaccgccttgtatcgctggtggaccgtctaaattctgataacaaaaccgctagtgaagccatctttgtttacggtaatacctatggagccgccgtggatattctcaccaatccatttaattacggttaagtatctaacttatcccttgttttacattttttttttatcaaatgtttcgttttagcttagttgagagcatttttatgaaaatctaattaaacttgaaatggtttgattttgttttgttttattgtttttaggattcgaagtgacggatagaggatgctgtggagtagggagaaatagaggagaaataacgtgtctgccattagcggtaccatgcgctttcagagaccgacatgtgttctgggatgcatttcatccaacacaagcttttaatctcataattgctctcagagcctttaatggttccaaatccgattgttaccccattaacctttctcaactttctcgtctctaaacactcaacatatccttcttttctttgtttatgtatttttgttactttaattttgtagacttgtagtagtactattgcatatttcttcacattatctttttggttgtgatttggttccaatttgaatgtggacctctaatgattacatcatcgttaagttttaacttttaactgcaaacatatacgtagaaaatgagtcaatcgagaaattgtagaatctttttctattattcttggtttcacaaattaatggtagagactttcatgcatagtgatgacataagatgttgcatattgatatggcggattgttcatagtttttttttgtttttttttatgacataaaatgttgcatgttggcatgttgcggactaattcatagattattattagtccatagatgtattatgtactgtatatacatcatttctctttttgttacatgtttgaacttaaacaaaaataagtaactaactataggtttaaaaggcccaattaggaaattagacaggcccaaatataattattgaagcccaaaatgaggctagcaattcgaacaaaaaagataagcttaggaaattgtaccagtgtctcgcaatcggcaaatcatcatccccgacgacgtgatggaaacagaagcggtggttaataccgtcgccggcgtcgactgtttcgtctcactccctcgtcaattactacacgcgcttcaatccaccagctcctctcctctccctccgcttctccctgtcgagctacgctccggtgaccgccgttggtcagttgcttggtccggctctagctcctcctcttctgcgatcgaggtttctatccctctctatatttgatccagtttattcaaatccagtaatcgactactttggttttggaattctgattactctcacattcccctgtttttgattttgattcttctaataaggtcgctcgagtgtttgcggaaagcatttcgttgccggatggtacagttgttaaagttcgtgttcttcctaatgtgcccaaggctactttagtaacagtcgaaccagagactgaagat

SEQ ID NO: 30992 - DNA, 1180 bp, Arabidopsis thaliana landsberg
  unsure (1)..(1180): unsure at all n locations
ttctgtagtcacatgatgaactgtcagaaaaccttttttcacttgatcccttgtattgtggcaatctatttccacatgttttgtcctctcgtgaaagacaggattattcgcaatgtgcatggcaaatttgttatccgcaaatagcttggccttgaagtcaactttaatgtgcaactcttgaagcatttgactcagccatagtagctcctttgtagcagcagccatactcctatatgccgcctttgtgctattgctgctagctacatcctgctttctagacttccaagttataagagaagaacctataaattatgccaccgccacttgctgaccttttactatccttgcaagtaccctagtctgcatcagcaaaaccatttaaacacaattctgtgtttgccgaataaaatagaccttgccctgggttattcttgagatacttcactatatgatgagcagcattgagatggacatctgttgggcaggacaaaaactggctcaaacaatgaaccgcataggtgatatccggcctagttacacacaagtaaagaagcctgccaattagttctctatatggtgttccatcagtcagaagagtacctatttctttgttcatcggcacctttggatccataggcactgactttggtttgcagcctaataaacccgtctttgtcagcaagtcaagacaatacttcctctgacatattgaaatcccatcagagttccgagcaatctccaagcccagaaaaaactttgcaggacccatatgttttagcttgaagcttgcagcaagaacactcttaatagactaaactgcctcatcatcattacccaccatcaagatatcatctacatagactaataaagctatgaaagacgtacccgtgagtctcacaaacattgtattgtctgaacaagtttgnnnnnnnnnnnnnnnnnnnaaaacctgtgataaacacttgtaccactgccgtgaagcctgcttcaaaccatagatggacttgtgaagtttacaaactggattaggtgggaagactccagatgatgatgtataaccttctggaagactcatgtatatttcttcttctaaatcactatgcaaaaaagcattagtaacatccatttgtggtgtactccagcccttcttagctaccaatcctagaatcagtttcacact

SEQ ID NO: 30993 - DNA, 2761 bp, Arabidopsis thaliana landsberg
taggagaagagatggttctgattcaccaatcgatgttagaaggaaagcttcaatgcttaggaaattgtatgaagataagcttagagatgctcttgaagaagcttctgagaatgggtcactctttaaatctcaagacgttgagaatgagaatcaagatgagagcttaggtcgttctagatctttggctaggttacacgctcaacgtgagttcttacgtgctactgctttagctgcagaacgtgcttttgaatctgaagatgatatacctgagcttcttgaagcttttaataagcttcttacaatgtatccaaagtttgagacttctgagaaagttgatcaattgagatctgatgagtatggtcacttgttggattcaaaggtatgtcttgattactgcggatttgggttgttttcttatgttcagactttgcattattgggattcttgtacgtttagtttatctgagattactgctaatttgagtaaccatgcgctttatggtggagctgagattggaactgtggaacatgatctcaagactaggataatggattatctgaatatacctgagagtgagtatggtcttgtttttactggaagtagaggctctgcgtttaggttgcttgcggaatcttatccttttcatacgaataagcggcttttgacaatgtttgatcatgagagtcagtctgtgaattggatggctcagactgccagagagaaaggtgctaaagcttataacgcttggtttaaatggccaactttgaagctgtgttcgacggatttgaagaagcgtttgtctcataagaagaggaagaagaaggattctgcggttgggttgtttgtgtttcctgctcagtctagagttacaggttctaagtactcttaccagtggatggctcttgctcagcagaacaactggcatgtgttgcttgatgctggttctttaggtcccaaagatatggattcgctcgggttatcattgtttcgaccagagtttatcatcacctcgttctacaaggtctttgggcatgatcctacaggttttggttgcctgttgattaaaaaatcagttatgggaagccttcagagtcaatcagggaaaactggatcaggtatagtgaagatcacgcctgaatatccgttatatctcagtgattcagtagatggtcttgacggattggttggttttgaagatcacaatgacgataaaaccaaagaagctcatcgtccaggaactcagatgccagctttctcaggtgcatacacttcagcacaagtgagggatgtgtttgaaacagagctcctagaagataacatatcttctgatagagatggaactactagcaccacaatttttgaagaaacagaaagtgtttcggttggagaactcatgaaaagtccggtttttagtgaagatgagtcatccgacaattcgttttggattgatttgggtcaaagtcctcttggttctgatcagcataataagattgcatctccactgccaccaatttggttaaccaacaagagaaaacagaaacaacgacagtcgcctaaaccaataccgaagagttacagcagtccattgtatgatggtaacgacgtcctctcgtttgatgctgccgttatgtcagttacagagcacgggacaaactcgactccatcgcggaataggaggagctctagtaaccatctccatgttcaagagatacaggaagaaaactgtggtcatagctttgcaaatggcttgaaatcttccaacatttcatcagaaatcaaagagagtgctattagacgagaaacagaaggagaattcaggttattgggaggaagagatggtggtagaagcaggttgttgggtgtagaggatgaacatccgagcaaaggaagacgggtttcatttaacatggaacgtgttagtcatagcatagtagagcctggtgaagcttctctagctagcgtttatgatgaagattacattaacacgagtgatgttgaaaatggagatgatgagggtgcggatgatgaatgggataggagagacaccgaaaccgagattgtttgcagacatattgatcatgtgaatatgttaggtcttaataaaaccacaacaagactcaggtttctgattaactggcttgtgatatcgttactgcaactacaagtgcctgaatcaggaggcagacacatgaaccttgtgcagatttatgggccgaagatcaaatacgaaagaggtgccgcggttgcattcaatgtgagagataaaagcaaaggctttgttagtccagaaattgttcagagactcggtgatagagaaggtgtatctctcggcattggtatattgagtcacatacgtatagtggatgaaaaaccaagaaaccatagagctcggactaaagaagatagtgctttgcacttgcagaatgaagccgggaaaaatgggtttataagatttgaggttgttactgcttctcttagcttcttgacaaactttgaagatgtttacaagctttgggtattcgtcgccaagttcctaaaccctggtttcagcagagaaggttcgcttcctactgttgaagaagaagaagaagaagcagagaattcagagacgtgagttggtagtaaaaaagcacaaagctgtaatttttagagggtgacttggagaggctgacataacccatggcccatgatgcatcatcaagaatcaatgtggttcacacgcctgaacctttatacagtttggatcgctccccggagagga

SEQ ID NO: 30994 - DNA, 1358 bp, Arabidopsis thaliana landsberg
atataaacccattaatagcaagagagaaatactactagctcttttcaatataacatgcaatagaaagttctaggataaggctatgttcagagattatgcaaacagaagaaagttagtagtaacagcgatacaaatcaactgtgaaaatctcacctgaacaagtggcctaggatatggtctcccacttccatcatattgccggctaatatgagccttcccctctttccaggctgctattgtgtgcgtctcaagctcttcctctgtcaagtttgatccatgagttccaagctgcaattttacaaatttgctattatactcaagagtgaaatttcatactgagaagctagtaaaacatttaaaactatgtgatttatgagatatccagacttccgtcttggaaattctaagaatatacaatagtaactcgatggaatgctctagcaaagaacagttttaatagaagccaacctctctcagtattagaatgaagtctagtggaccaagaactccaacaaattggccttttccaaagtcccaaagaggagccaaagggattccctgaaagcatctggaattagcaaaaaccagaaagccaaacaatctcgacgtataattagacgaatgttgttcacttaagtttcacttccttccctttccgggtctggatgcaacaatattagaatgtttatatgacggtgagagacagagagatgaacatcctaacaagaacagaagctgacacaagggtaattggcaaataaagtaaacctgctcatagagtatatggaatgcttgcttcactggcaaattaacatccaatgcaataacctgtaaaatttccaatcaccttagacaatttccgagtaagaagccaaaggttattcttaactgataatctataggacatgaagacagaaattatcaatgatcaagcaaaaagaaaaagaaaccaaaccttgcccgattctgggagcagctcatatgcagtgcgggttgacaataaaaccgatatgcggtgacgagaaagctccaaatcaacccccgacatcctaggaacagcttcctgggacgggtcagcctacaatataatcaccatgtgaaagcagtcagaaactcaatttgaatgtagtctcagagacaatttaatggaacttaaggaatcctgctttatacattaagataaaatggtctaaaatcaattatacttgaactaatgacaaacagttaaaaataatctgaaggataccaaccacggatcaaaattaaagaaaccaaactggaagcaactcgggaaacctgaaccatcaagcagcgagaataaacactgcattttggaaaaggaaaggtcagattcctta

SEQ ID NO: 30995 - DNA, 3089 bp, Arabidopsis thaliana landsberg
cgtgatcggtgcaattcggtccatgcactaccgttcacaagagttttgttttttgttttttgtttttccgttaaaagtcttttgaagactttcacgagagttcctcaccgaccgttcttttcttccttgtttagtttcttgctgtttttttcgggtgttatcagtttttaaaaaattattaaaatcaaatgcacaaaaaaaaaacatgtttcatgtattcagttttaacattgtcacggaacatgagcagtcgatcaaacttaaattagcgacgaccaacgatcaaacttgaacgtttgatttctaaaaatcgttttgtttgatcgtttatattattaatattagatcaaacgaaaggatttttggaaataaaaagtaatcttaggtatttgatggtgctacggatttgggcacctaaaggaaaaggttaatttgataaaagatatgttttattttattatgaaaagtccaacttgtcttctaataatattagatgtgacacaattatatactaacgatttatgaaaatagaaaaatttaaatataaatatacataataatttaaatatacaatatacaacacatacatatatacctgtaattccaaaattttctaattctttaataattaataatctgaacaacaacaaacattttgaataatttttattcatatgcatataagatggataaaatgttccaccatcagtctatcacatagtaaacatatattatccaaatgttttgaatgaacatatacatattaaaaaaaatataaactatactaattttatacaattaaaatttattttagcgcacaattagcacattaaaaaacaatatacaagaacgtggaccttgtgcaaccacatcgtcattttgttttcgtgcaccacgaaattaacgttgttagaatactgacaattagtcagtgtgtacggaccattttgaactttgctcaactcaaccatatatgtatctgttcacgtggtccatatttttccattcggaaactcaattcagttccgtccacgtaacatattccatagtaaaaatgtgtttacattgctaattaaagatcggaatcattgaaaattttctaagatacatgcactttgtctcaaaagaagtagtttttgatttgattagtcctacgaaatctgaccaataaatatcttggtagtttctagtcatcaatttaaatcagtgtgttctcattactttctcgtgtcggtcaaacaaaactgtttctatcattcgaacccatcacatttcaaccttaatatgtttgtaatcttacaatatcgccaactaaaatcttcaatcggaataaattttaatcaaacttccccaaaatctaatgtagatagcttattaaatacaatattcaagtttattcaactgataaagtacatgcagtgtggtaatactacacacaaagtcgccagcaaacaacatcaaacaaacaagcaaaaacatgaaaaaagctttggggatattcaattcttaagctttctagttaaggagttggcttcatcgtgttggcaacatcaatcacaaatcggtacttaacgtcagcctttgcaagccgttccatggcggtgttgacataatccgcagagataagctcaatatccgcggtgatgttgtgtttcccggccatatctatcatttcctgggtctcttttatccctcctatcatacttcccattaccatcttcctctctatatagacacaataacacaatcacacacaatttcaatgttattttcacacgttattgactaaacattgcaaatttagcacaagtcatatatatacggatttgttactacaaatatagcttaccaaagatgagaggcatgacaggtagctcgagtggcttctcgggtgcaccaaccataacaagttttcccttatgcttcagcaaaccgagcaacggaagaagtgaatgagtcgcagagacggtatcaattataccatccatagtacccattgcatccttaatctgttttgggtcacggctcaccaagaaggcatccgcaccaagccgagtaacggtctcgtatctcttacgctccgaagtactaataaccgtaaccttagtacccatagccttggcaaatttcactcctacatgacctaaaccgcctaatcctaccacaccgatgtgcataccgggtttgtcgagcccgtgatacttcataggggaatagaccgtgataccggcacagaggagcggtgcggcggcgtccaaggggagattgtctggaatacggatgacgaaaccttcctcgcaaaccatgtggtcggagtaaccaccgtatgttatggtgttgtcgtagtacgggaatccgtacgtttggattgattttggacaatagttttccataccttcggtgcagctgtcacatgacccgcacgagctgaccaaacacccaactccgactttttctccggttttgaatttagtcactttggctccgacttcagtcaccacgcccacgatctcatgcctgaataaacattcggatttaatatcagcattagaggagaaaaatcattcccttgggattaatcaaacgaaacttatcgtagaacttttttttttggggtagaaatttataaaaaagacagtaggacacatgcatgtcttaccctgggacaagaggataagtagacattccccactcgttcttgaccatatgcaaatcagagtgacaaattccacaaaataacactttgaacctcacatccttttctcctgtttccatacacattaatcccaccaaaacttaggttcaattcattcaaacgagatcgatagagattataaaaacatattgtgaaaccttctagtgaaactgaaaggcgagagaactccggaattgtctttcgcggctaatccgaacgcctctttctgaagaacctttcccataatcgatcaaacaatgaaaaaaacggattcaaaagtaagtatttgattttattcgtttgaatgacacttattaataaatgagaagtttgagatgataaggagcagtgaagccttaatataggagaggattgtggaaccgacgtgatcggg

SEQ ID NO: 30996 - DNA, 2896 bp, Arabidopsis thaliana landsberg
  unsure (1)..(2896): unsure at all n locations
tgtcccactttaaatcttcgtaattattgtaacaataaccaatcgatcgcacttaaaacgtacctttaatcgtgatttgtttaaagaaaagaaagcatgtgaatatgtgattgtctgccacataatgtattgtgcataacaataccatattttcgaaaaaggggctatataaaagtattgttatacaaagaaaagtaaagaaataagctaaactcaaatttaaaaaaaatcaatttataaacttaatgtttatttagtatatacccttttctcatatgtaattaaataaaaccctataaatacaaagtaagttggaaaaaaagagaaatcatgcaaaagaatgtgcagttgtgaaaaggctggtggagatccctcgttcacatcaatggggcatcttttgacgacaggaatcagtttagattaagaaagaatcattctccactacaaagaagtacacgaatgctcttttacgatgttattatattatttgttagttgttatcgtatactaatatactgtgtaacatatagagtccattccacgcacggcttattgcttttgtttgtttgtctttgtcatcggttagacagatcatgtttgatatgttcagataaaaaaagttctcaaagtttccaataatttgtcagaatctcgccaaatccaattatggccacgagtctcacgacacaattttcattttccttttttcgataatgccgtatttgaaaaaacccataccgacccacaactacattcaaatactcaacttcaaacaaaattttgtagaatccaagtttacatcatatataattcactcacgcaacaaacaagaagatacaaaaacaagatgcattcccgctaataaacaaattacacaactaagtgataatttatttcattttggcgtttggtcttttggctaactcatatggaatcataaaccgatgtatcaagaacccaaacggccggccaatacacagatccgatccataactttccatcttttgtctcataagcctcactaacatatttcaccgtcttcccttcactgtcctcaagtatctcaagaatctctcctgtctctccagagagtttcacgacaattccatgaggttttcctccgttcatgaaatgaattacagtctccatcttcatcgtgttcatgaaaaaccttccgacccaagtgtgaatcaaaactgcacgtgtgaacaaattctttttgcaatgtaatgcgacccagaaatcgcctgttggcgtacgccggatattgtccggggaaccagggagcgttgcgaaaacctcgttggttccggatttgggacctttgacccatattctatggcaaatgttcgtactactctcgcatgtgactacaaacgaaccgtttttgcttagagctagaccatttggtaaacgaagtttgtccataataactttggcctctttcttcttcatatcgtatctaattactcttccaacctttgtcccggacaaagacacgtaaaatacgtccctatccaacaaaaataacataacacgtttatatgcgtatacatatatatagaatctcatctgtaatctgttaaacataaattaaagtctcaaactatttgtatgtgctatgaaatttttttctatttttttttttattgcaaccaaaaaggattttattggatgtgttaaagtaaagcaagtgtaataaagttacctgaaatggtatgtatcgctgctatcattgaagtagaaaatatcttcctcttcgtctatatccccttggttggcaaacataactttacgaccttcggcttcatcaacaactaactcggccaggcctccctctggtccgaccttcatgaccccaaagtaaccatcacatatgtacaaatctcctgttttcctctcgaagctaagtcccaatggtctcccacaacttggtactacctcatgactcgaacagttatctctttattcaccaaaaaacaaaaatactccaattaattgggaacattaagtaaaatcatataatgaattcaattcattcaccaaaaaagtaataaaacagagtaagggcaatttagtagttttgctttatgaatgaacctgtgaggagaagtgtaggcgaaatcgacccagccgagttcttcaccgcgccatttgnnnnnnnnnnnnnnnnnnnnnnnnnnnnnnnnnnnnnnnnnnnnnnnnnngaactctaggctctctggtccatcgacgggaagaggaatggtcttagcatcttgaaggacgtgtttcgtgccctttaaattgtccggcccgatgattgatgaccaaaagaagaagcaaaggacggctaagataaccggagcggcggtgatcggcgtcagaactctccggctaatcggcatctttctttctttggaagaaaaagtgtgtgtgaatatttaacaacaaaaaaggaaaatgtgtgtgaatcaatgatcttttctttgtgagtgaatcaatgatactgaaatgggttaaagactataaatagatgaaagttgtgagtgaatcaatgatcttttctttgtagtgtacaaagagatgtgaggcttttttaattgatttaggacacaagaaacgttacacacgtcgatatctatgtcaccacctagttttatgtgccacgtatctgtcaaaaagattttaaaagcttggaaaaatattctaagatcaaatatttgggaagcagttgtttttctaaaaatggaaaataattgagtacaaaattgttaggaatgaatttttaatgctatccttttttcgttatatcattgtttgtaatctatttttatttatatctttttaaaaaatattaataattattatatttctatttgaaaatattttaaattaacataatgaattgtatttg

SEQ ID NO: 30997 - DNA, 1564 bp, Arabidopsis thaliana landsberg
aaagccaagtggggatttcccatgagctttcttgtctttggtcctttgacgccgacccctccttttgaatttaaatctggcttctctctctcttttttatttttttggtcggttacaaaatatcaacgtaacttgtttaaaacaatggaaagttaataaaaacagtgtgatattttattttattgtaaaaaccttagtttgctcaatgaattttgaaaagaagatcaagaataaccatttctagtcaagaacgataaatatttctgttatcgaaaataagaaatttaaaacactcctatacaattctctaacattacagaaaaaaaaaacagagaataggagctctctgtttgaccggacgcaaatccaaaccgggtaaaatcaagaagaagaccacgttgagactgagtttgatctcgacagaggaaaagaagagttcaagaactcaatgcaatcttcaatagcttctgctcgatgagactctgtctcgtttacagactttgacctcttcatataaatagctgacgaagaagaagacgacgacgacgaaggcaacaaaaacgatgacgtttttcttctatcagtagtatttcttctgaaggaaataaaacgcagcgttttggcgaatcttgctccaatacgttggatcaatttcctcgcggccggcgagctccttagaccaaaactgagaattccgacgagaaccacccttctccggctgtgatgtgacgagcttaaaccgtcgtgttttgggaatatgggttcgtctgtggcttctgggttcgggttaaagcttactcttttgcatgctcttcgtgacatattttttgttgtctgaaattgcggtgaagagagagagagagacagggcgaggagaaacagagagagagagaggggttgagagaagaccaaatagcaaatactaaagagaagcaaatgggatattctgaagactatttatggggtgttgtctaatgacataaaagacattggggtgaaattgtaaagatataaatatggtggggtcagtttaacaaccttactaaaaattgaaacttgtaactcacaattttctactttctaattgtataatgtggatttagtgtgagagtggttatatggaaatatttatcttatcttttctacagtttttccttatctataagagctacctactactacatgtgtgtattaatgaaaaaataagagcaacttaaacaaaatctcgtacagagcaacttaaacaaatgctgatcatgatcatggggatgagtactggctcgtcaagggtattgttcgctcgtggaatgagtcataagtttttgctcatcttcttaatgaaaaaatagaataaacacacattttgttatactactaggcttttcctaaacccatttcaaactctttaaggtaagtttattaaccaaattatgatccgtcactctaacattaaatggaagtttgttaaccaaaaaaaaaaaatagttagtttacattagtactatttatagatttgaacaatcgatctgtccttagatatgtaaataatttatactaattctag

SEQ ID NO: 30998 - DNA, 1526 bp, Arabidopsis thaliana landsberg
ctctaaacatgctggggacaccaacacccaaatttaggtctgacagctctgaatgtcgggagataatgcatgggacctttgacttttagtgtctagccctatgaaactccagtgtctgatgaccatactggtgaggaatgctgatcaaatagcatccaacatctgtgcatcctaaacatcgggttgagtgtatatgctgaaacaatgcttacggctcagagttaaggcgcttatcttctttgaggttgcatggggtatgcttctacttctctaggagatgcgttttatggaaatatcaaagaagataagcgccttagttctgaagataagcgccttattcacaaaatgcataaggttgtattctttgttaggtttatccagctctaaacaaagctcaaagctcagaaccatacttaacacctgttcaatattgtagggagttccttatccagctctaccaaagcgtgataagccaaggcgtgttgagctttatttctcaagttgggttatcagagcgggtaagccttttgatatacaagtctttttttctttaagacgggcatagattttgattttaaagcaaattcaaaacaaatgcagttgaatcccgaaaaggagatggacagcaaacggcttgtgaagtttcccttgtccactacgaagacatgggcatcccaaaagacgtagcaaagttaggtgtccgtcatggcatgtggggagctgtcaagaagctaaactctggtttacgagcgtaccaatccgccagaaaatcagactcatctctatctcggatcgcccaaatggcaagaatcactacaaaactgaacatggattctgcagaatcatcttcaagagatgaagacagaagcagagcaatggaatatgcgagacaacgggaccatttgagaatggactggaaatgggttgttgtcggaggtgtcgcattggcttgtggccttcactctgggatcattggcaaggctttactggctggagctggccagagactggctcgtaggtgagaaaccttgtcgtattcttattatatcttcccttgacagaaaagagaaacatatgcatataactaagggaaatgtattatttttgcaactcctctgagaagggcatgtggttttggtggtgaaccatgtagagtagtagctttaaactatggagtcataagttatttgagttctatcttgtaccacaggatagtgagatatgtattttataaactatatgaatctacatagcttctaaaagcttaaattctttgcatgtgatgcacttcgtatctctcattgattgctcaaccaagaacaagatgtcaaaacttatctactgcatcaattcactgcagtgtgcacacaagccgttctttattaccacttatggttgtacatcaagttcctcattctgcagttctacaaaggttgtttctggtgttgtagaggatgcagaattatcgccaaactctgtgtctgattcatctgaagcccagagttcatcatctgaaccaaattcaa

SEQ ID NO: 30999 - DNA, 1574 bp, Arabidopsis thaliana landsberg
atactatgcagtacattcgttctcctattagcacaatttgtttgggtcaggctgcatcaatggcttctcttctgttggcagcgggtgccaaggggcaaaggcggtcacttccaaatgcaactgttatgattcatcagccttcaggaggatatagtggacaggctaaagatataacgattcatacaaaacagattgttcgtgtgtgggatgcgttaaatgaattgtatgtcaaacacacgggtcaacctcttgacgtggttgcgaataacatggatagggatcatttcatgactcctgaagaggctaaggcgtttggaataatcgatgaagtgattgatgaaagaccgttggagttggtgaaagatgcagttggaaatgaaagcaaagataagagttcaagttaggaagtaactggtaatcaaagtaataaattttcttcttttcctcttaccagttttgctttgatcctgttagattacttttttctatggatgaagttatgctctgagggcatgatctctcaaactgtttttattcattcataaatcaatcatgactatatttctgaaatcttttcctcgcatgtttagtgtttacagtctcatatctgattcagtaaaatgaatattggattaacgcttggctttgggtcttaattttatgtgcagtttgatgcattgcaaatctttgatttatgcatcattttatactaactagaaagtctaaaatgatgagattattgtctagtttcagaaaccccagttctagttggttagtttatgttagaagatggggtttgctgtttccttatgctcttgatcgatgttcttcggtttcatgtttttgcttacctcatcaagtcaaagccacatctattctgatttgcctctttttatatagaagaagttagaacacatcatattcttgtgttaacactggtctttgattatgctctttgaattagggacagaatcttaagatctttatgaaaattcttgtacggtgttgtcttgtcgtgttgagctgagccttcaattgctagtgtttgcttctgttactctgaattatatttggacaatctcactctaataaaagttttttaaatactagcagaattgttaatttatcctatggtttacatgtttatatgattttgctggttctataatgggtaaaaatggaaaacatgattcttttttcctttttttttaaagtataaatggaaacgtgtaggaaagtgtaaacaagaaaagaggacataaatgacccaatgacttaataatatatttggttgagacttaggagtagtgagattaaactacaaaataaggtagattggagaataaggatagacctttgtcgatttcgatctatcctaggtgaaaaaggaaattgaaaggggaaaaaacgccgacaacagtaaaccaaacttctcacaaaaactccttggaaagttttcaccttctttcagccctaaccccatcgtctctctctcgcgaccgcctcatctctctctgtctggatcaatctcgctctctctttctctcggctacgtcgctgtttctcgtttcgtg

SEQ ID NO: 31000 - DNA, 1828 bp, Arabidopsis thaliana landsberg
ttttagaatgttgatatggaataatattattggttatttaaaatcacatttaaacagcttgatagacaaataactccaacttttagggggtgtattcaaattagaatttaaagtgattcgaatttcatgagactttttagaattcatgtttgaataacatagaatttataaattctacacaaatctcttaaaattccactttcaatacacccccttagatagataaaactctattgttcatatgttatcaatcagagtttaatttcaattgaaaataactatcaagttatccatatatatatcttttgtggaagccaattaacccagtggataggggtttaaaggatttacaccaaatgtttagaattagataaccaaaaagtgcatcttcttgcagattatcggaggttctagaggaaaatttatcggaggttctagaggaatgcatgtagagccgtatgttgtagtcttgtgtgttgcatgaacattaggtctcttgatacgttgtttttttggtattttaggtcctttgtctaacctttgttttgagtcatctatcatgtcgtagtccatgtattacgtctttttttgttgcgtcttgagtctttaacaggtcttaggtactagtgaaaagattggatagttttgacctcgtttggcttgaaaaaggatgagaaaagctgatccgaggagaaagaaggagtcaaggagacggttagactgatcggtccgtgcattgacgaggtgggcagagacggttagaccgatcggtccaccgccggaccgattggtcagtgcttcattgattcggcagagattgttggaccgatcggtccaccacctgaccgattggtccaccagaagaccgatcggttcggcttcacgatgaacggttccggtattccttaactggatttatcttctattttctgtaatgaggtataaaaacccaaaacctaattttatttttacgcttctttttctgcaacatttggagagtatttttgtaagctactacctttgggattagagattcatccttcttgataatttggaaaagatttctaacccttatttcttatttattcaatttgaattatgttttctttcatatctctttacttcatttctattgctatgtgtgagtaattctccaattgaattttagggttctaagtagaaagtcaatgaattagtaactaaattgttataccgagttctcaatctttgggttattcattttctgtgtctttaatgctagaataggattgatcacttctttttagaaattaggtttttgtatgcattaaaagtgtttgacagagacctgaatgaatataaattgatcattgtatttctaaccatcgaaagttgacgttagaacacattgcgaactaaataaaccaattcattaatgcgaatttgattaggaaactgcaaacgaaagtttagtagtcgagtagtcgaatttagtggctagtatctcgggagaaagttagtctcgaattatgtttatgtttgagaacggttcttcataattgaatttcctgttttgtttattctgctagtttttgtcttttgaaataccctaacacccaatatctccaatccataagtttaattgttttatttattttcattttcatttataattcagaaaaccaaacaaacaacctctttagttttagctcataacgagtttcaaaaaattttagagtatcttttgtccttataaatcgatctcaaatatacagtctagcgattaagtgtattgagttaattattcgagcaatcatctatcacttgatgtcatacatgcatgaccatt

SEQ ID NO: 31001 - DNA, 1617 bp, Arabidopsis thaliana landsberg
ttccccattcgtttgtaactagaactacaagttgcagagaatgcaaattatggatttgtttagttactgatttttatgcgcttttagatacgcagacaattccagatcgacataatctacggacttaaatttctagatattttgatttgtcattttttttcagaatagttggcagtaaagatgggccggcacatcttggcccagtgtatttctagtccagatttcatttcctgagatagattgtcagatgacacgagttatctttgggctagattgtccatacgccgaattacttgattcacataaatcctcaattctagttgctactaaacagacatgtcaattctgaccaaatcttggaagtccggttcagctgtatcctgcaaaaagttagagttaagggtctatatatttaagtccaaaaaccaatcatatcctctggactaagcccatttaggttagggtgtttttgaagtttaggtggcttggctttgggttcgtcataagttgcttgcgaaacccaaatttgaggacggtagtaacatactaacaacaaattttgaccacttgtattatatgggtttaaaactaaaccttgataggtcacgcagcgataaacattaatattaacgatttgtgtgtattgatgatgaagataagtcataagtgtttcagaaataaatctctcttttgttgttttgtgttcggatggtgactacaaaacaaatgctaggctacaaacgtagtcaatcagaaaaataattttgatccaaaggaacataaaataaaataattaaatgaattttatgagaaaatacaataaataaataaatttaatggaaattgtggattcgaactcgggacgactcaggtggaacgaatcatcccacctttcacggccatctcctgcgtatcccccaccgtgtactcgaattactaacccgaacccgattgaatcagccgattattcaaaactctgcaattacgagtaaatttgtaccgaatcaaaccgggtcggaattaaatgacgattgtctctccggtcaccagatgatagccttctcggagacgccgtgaagcaacggccgagattccatcaatagatccagcttgctcctaataccaccgtggcgattcttctttaaatcatcggtacaagtaaaccgacttgaccgagttataaaccgaatcgattcctcgaaaaccgattcttcacacgggataaccaacggtccctggttagcaaaaccgaactcctcttcagccttaaccaagagattcataagaatggggtggttcagatacgtcgcaagcaccacgaatctcctgcaacttctcccaacgtaaaccgccacgtgtcctgacggtacatctgacggcacagatcgtctgacagacgacattcgcgccttgttacgccattgccgaagcatttgccttagcttcacaatgtgtcggatcttgctacattttccgatacctccagccattttctccgattacagaagctttaacgtgttggtatttcgttagacgagaaagtgtgagaaacagagaaaatgtgaggtagagagtttttgggaggggggaggtatatatagtaaagagagtaacata

SEQ ID NO: 31002 - DNA, 5721 bp, Arabidopsis thaliana landsberg
tgttggttatcaacttatagctctttagtacaaacaagttctcgaataatacctgttgcctatctgttagagacccttgttttgctaacacattgattggattccttggctcctgaaacaaaatagcaagggatgagaaactgtagagtactatttcttaattgggctaacaagatatcgtacctttgttgcctgaatctcttttgtttgatgttcattttcaagattctgcacagttatattacattattgcaaattgttatatacataattcttgacttagaaaactttatgttgacggaagttttgcaccttttcagacgcaaaaactcttgcaggaggcattgtcttttctgcagactctgtctgtcttcgaagagtttcattttctgactctagaattgcaaccttatccttcaggctgataagaggtttattttctttcagatatacagtgatatcagatacaatttcatatttttatttcatcttttataatttaggtcgactaaaaattttaaaatccatgcagctatgcctgatagaagaaaaagaatctactaggctgagaaaactgctcagctcacaggaccgtacctgtttaactctccaatctcttcaacgcttgttgaagcggccaaagcctgctgacgcaaaacctgattttcggattcaaggtttgacaggttcgtatgtaatctggaatttacaatcaatactcatgaactctgactgtagaacagaaatatgattacaaatgccttaagcaattagtaaatgtatacctttcgatgatttcttgaaattcgacggcctttgattttgcatcttctgcttcagttacacttgccctgctatcattctcaagtgcaaaacatttcacttcaaactccttaatttttccttttaatttagctacctcaacctacattttgaagatattgtatcaggaaaagtatctgctagttagtggaacttgtagctcaaacttacctccagttcattgttttgactgttcagtaactccagttgagtgttatctacaactggaacctctttgatgattggtggagcttgttcaatggctaattttgctgcttctttgtctcgtatgattgcagcgtaggcttcatctagcttctcttgcaattcagttaaattattttgtagttttgcgatttcttgtgctttggcgtcttcgagatcagcctaatgacacaattaagcatgggcttcatttggaacttttccaaggaccagtttctaatgttgttgacaataccttttgatgcttctctaattcgagacgccaggttagctcttccacacgtttctctaacttgtccttggcttcctttagtgccccagtttctctggcagcctttgttggaaagattaattgttacttgttagtaacttagactgaagcagttttctaattttgcattccattgcctgcctcgtggacagattagattgattcttatgagattaatcactcaaagtgccctcttatcaatgaaacttaccattctgagattttttagctcttttcgagctactttagctctccatagacattgtaatgctaatgttgcttttttgtgcttcttataagcttcatgaacttggtgtcttctccattccctctgttagaagatatgtcattaagatttgtcataaaatttatcaaaatcatcatcaccgtactatctaatcctcagaaaagtaggaataaccatattgtttgacgtctgattaatcaagcaaaagttattaaaatcttgatcccttatgcgtgaagagtaatccaaattttgaaataagaatggttactgcttttgaatataactagtttcagattatagaagacaagtccggagacatatgatattttggtagagaaataagaagtgtgattaaatagtcaaaatctagtacctgaattataattgctgcctttgttcttcttctgtgtctatgcttgtttcgagcagacattgtccgtaaaccagtctgaataactgttgctgatgcctggagcttagtatagtttttccttgctctgtgagcacgaatgttcttttggatacaaattgaagcagcttctcttctcatgttttgatacaacttgcgagcaagttttgctacataagcaatgcacatgacacagttaatttaaagattactgttacctggctgaaatttgaatcattctgtgacattatatcagattaggctgctctattgatttaaagtattaattcatagctgtgtgttgggtagggtgttactattgagacattggtagaagaataaaacctctccaaagtttttgcatataaattgtagcccttttctgcccaaggaactcttttcttatcagataagttctgatctgcctctgaatgagtttagtggcaccagccaagacctcggttcttcttgcatctagttcagccatctgtccggccctaagaaatatctttgttttccctatctgaatatgaataatcataatgcaatcgtagattacactgttaggattgagtttctttattctttcatatctgacattcttgtattctgattttgacatacctggtagccttttagacccatcttgtcgcagatcgaagcacatgcggatttttcgtcggatctgtcaatagataatgtaattttctcaatgttgattggatcaggataatagcatacaactaataacctgtgttctagatttttatttattgagtatttttacccctctggaacgtctgttgctagcatcacaaaacgatctaggaattcatcgaaagctcgtttcgttggataaccagcacaactgattcttatagcttccagtacaccctgttcacttatccagatacggtattagtaaatatccctgtgggaaaacatgaacttgtttaactaggaaacctgaggctttaggcttactccgcatcttagttggtttaggacgttgtcgttctcaaaaattccgggcttcagaactgcatttggtttcacacatctaatataatggggctctgttgtgttcagcgtctccattagagcttggagttgttgctgggggtaggttaggtcaggaatcaagatcttgagcaatgtgcaaatgatatacttactagtggcttaccttgaaacgggtccctatggatgaaaatttggactgctttgatgcgtcttctggaagtggtggaaacaaattggcgacaaaagagcacttagatgcatctagcaaagcttgatgttctgccacaacataatccttgtttttgtcaagaaattgctctgctgagtacgtaacctggagacagaaaaatgtgcttagtaactagctactgtatttacttcagtttagcgtctaaaattgtgtttgtctcacatctcctgcatagtggttgacagtgaaggctgtttgggcaagcttaggtttgctgaaacgcttgtgtcccttatatgtttgatacatcttctgtgcaaacgtctcatgagtcgacttgggaaacatgctgcaaaggtgaaccttatgattatgcctagaggagccagttttacttcttactatggattagtattgtgaaactgtccttcccctaaaagtaggattacacttaccatgcttcatcaagtagggcaattatgcctcctggtttctgaaaagaagaagatgtcattgataattttttgtgcttgtacatgttgtggagccaatgtcatccatataaatgatgttagttgcatagtttataccttctcaataagatctaagacatcctggttatcaacaaattcaacatagctccagtttatttcctccctcgtgtattcctcttgctccatcttgaatacatgctgcagagaaaacattgtttcatgtgaaagttgcttgcaatgtgaacaggttacagtgattttactttctacctgattgaaatgctgttgtaacttctcatttgtgagattgatgcatagctgctcaaaactttgaaacgaatagtgatattagatcgtaagttttatgtgtactcatcattcaggtttatactttctgtcaggtctacctgttgatcttgaagctttcaaaaccataaatgtcgaggactccgatcaagcttttagcatccgggtcttgacctattgaactgttgatcttatctacaatcctgtcattattgattagtgcacatgtcacggtgggagattgctcaaactgagaactatttatttagagtcctgaaggaaaaccatgttaaaggtgtgttcggtctctcctataatgtgtatgcagtttgttcggtctctcctataatgtgtatgcagtttctattttacctctgcgccattataattcttgtggaaggcagagcagcttttgcctaatgattgttagaatattcatttttgtttcaggggttggatttacataccagtcaaacagcctggagtacactgtcttggctaaagcatcacggtttgaggctgccgattctggatcaagcggctttgtaatgttaccatccggagtgacaataacacgcttgcagagtgaatcttccatcatcttctcattgcacctacgtcaagtgaaagattgaaaattagtcagcatttccattggaaaatgcagaatttcgaggtctagtggtaagatacatgagtaattccgctgctgtttgaagatgatatcttgacttatcatccctgagttttgaagaatctgcttcttctcctttgataaaattgacatttccaaggtggaggatcgcagctacgactcggaatatggcatcctaaagttgacgtttctggttagtatttgaaatttctacaaccatatctttagaatgagagtcatgagacaaacctgtgcctcttgtccgattcccacaatgtccatggcatttctagtctctaaatactctcttgcatcatctacattggaaacctcgtagcagttcgtctggtttagatagtggaacgtccttggatcccctaccttgaatttcttagcttcctgaaaatcaaacatactgtaacaattgtcttaccaataattggttcagctcttttgctttcagcattgttactgaagacttacctcaggcggtgctgcacagagcatgtagaagcagtgatagttcctctcagggtctgaaacttggcaaacacgagaccgttcaagaagataagtgcggatggcagctccagatattttcccacgcttgtcaaattggatctcaacaaattttccaaaccgactgtcggaaacacacaatattacaaacgagtcaaaacaaaagatgccaacagaaaaaggaaaaatatgtccacagtaagtgtttcacagacaccaccttgaattgttgtttttcacagttttggcgtttccaaaagcttcgagcactggattagactaaacatagaaaaaaataaaatggtggaagcttgttcgacacagataaaaactcagagcaagtatctcacctctaaaacttgttgttcaacgcttctcccttcggtatctgatctgcctcccatgaatgcaagatatctcatgagcattttggttgtctctgtttttccagctccgctctctccactaaccaaaatggcctgccttcttgcctcattaatcatcgccctagtaaaataaaagcttttggtaagctaacttctttacagtaactgctt

SEQ ID NO: 31003 - DNA, 1218 bp, Arabidopsis thaliana landsberg
atggctattcttcatgagaccaaagcaagaaagcttaggaatccctgtctatcattcaacaacttgaagattaataaagatttgctaaaaattaagagaaacacacaaatcaaaacagagtttagctttcattaccttatcaaacataatcctgtaaggattaagatcatggtataaatcaattcctttatcattacaatactccaaagctcttgcagtatgcagagcaactttcaacctcatttcccatttcatgggtcttttctcccctgaaacacacattaaactcttaatcatcaaaccaaaacatatcatcaatcatcaataagagaaaaaaggacaaagagatattttacagtgaaaaagatgttttgctaatgttccattaggcatatactcagcaacaagtaatctctcgttgtcatcacaacaacaaccgatcaaattcgccatatgttcactcctcaatctcccaacagcttgtgcttcattctgaaaaaaagtccaccattgatagatatcaaaaacttgttagcaaaaccaaaaacattataaagatcaaaaaagactaacgatgaattcgaaaggatcaggccaagaaagtctttgaaaccgtttgacggcgatgcgacgaccatcgccgagttttcctttgtagacgatgtttggtaccgaatcgttgtgctccgatacgatgtttccggcggagaaaccgtcggtggcgattctcagctgttctaaactgaactcacggaaaatcaacggataatgtcctccgtcgtcgtcggcatcgtactctctgacgttttcgagatcatctatgaccgttgacgtaatcgacggtgaagaagatgatcggcgccaagacttgaagcaaatgcatcccattatcgccggcgatataatgctcagtcccccgcgccttcaaaatttcctttttttttttttatgaaacaaaattcaaattatcaaatatttattagcatcttttataatggtatgtaaatttaataaaataatttaatgctatactatattttaacaatggcaaaagatgtcaaaccggagaaattttagttacttgtgtcgtttggtcatgaatcatgctttcgtaaaagctttaaccaaatgctatagtttctactttctagtattataattgaaatagtgtggttaattagttaatgggacgctcgtttcgggaatagatatgttttt

SEQ ID NO: 31004 - DNA, 4969 bp, Arabidopsis thaliana landsberg
  unsure (1)..(4969): unsure at all n locations
tcagttacttgatggtgggttactcttctttatgaatactagatggtcagtattgttgaagtaaactaattcttcaaacttattgtgatcctgcgtccatcagaatttttcaaactcatgaatgaggtagagaatgaggaccttgtttttactttggagaccatcgtagataagtttggcgaagagatggctccttttgcttttggattatgtcaaaatctggtaagaaaaattggttctctgagttgatatttcttgaatactcaaacttggtaataaatatgtatttctgcctttgcttttgttcaggcggctgcgttttggagatgtctaaacacgtcagaagccaatgacgactctgatgacatgggagctttagctgccgttggttgtttgcgtgccataagtacaatccttgaatctgttagcagtctcccgcagctgtttgttgagatagaaccaactatacttccaataatgcagaaaatgttgaccactgatggccaaggtatactcatatagttttgggatatagtttgtagactccgagtataattaagttatagttgtgtccagaggatgtacatttggactgatttggtagccaactagccatttgggtccattacattagtatggttttttttttcagaattgtataatccatttttttgttctgtcagccttgtgttgtgttgtagcatcacgatcttaagtttattaatttccttttctagctatttctatttaataattgacactgaagcatctatattctcatcctatttgctattggcagaggtatttgaagaagttttggagattgcatcatacatgaccttttattcacctagcatttccttggatatatggagtctctggcctttaatggtggaagcattggttgattggggaatcgatttctttccaagtatggtttctctcacatacctctaaatttttctagactttggattttatagttgactccatcacggtagcacttccacgtcattcatttttttgcatacgttcactcacgttactctttgaaattttagatattttggttccaatggacaactttatatcaaggggaacggctcattttctcacttgcaaagagcccgactatcagcaaagtctatataacgttctttcaactgtgagtatatcttctgatagtgctagtgagttagatgtctgtgcttgttgattgttgtaaggaactgtcaggttataaaattcttgcaaatatcatgtagcatagaatcttcctttattgtttaacaaaattttcgagttcattttacatgcctattgtggtaaaaagttgttggcatcttgtttattgtgaaaacactaggaatactatatgttacattcagtactacatgccatttttttgctaatatatatataagcatctcttatgtttttccgcacaaggatagcttatatatgtctcacgtttccacttctacagcttatgaccgacagaaacatagaagacagtgaaattgagtctgctccaaagcttattgaagttgttttccagaattgcaaagggcaggtggatcagtgggttgaaccatatctgcgtctcactgttgaccggttacaacgggctgagacttcgtatgttaaatctcttcttatacaagtggtaagaactatgtggaggatttgttgacctgctactggttgatttctacttaccggtttatgctcttacattagaggagatatgtatgtcaatgtcactgtatgaatcaagtgggtcctattgaactgattctgttgtgtgatgaccacaatgatgggttgaaatttccaagtttttttaatagcaacagcaccagcgttatataccatgaagttctcaacataatatcttgatttctgttcgcaggtggcaaatatgctttactacaatccaggtttgacgcttggtgtattgcataacacaggacttgcttncaaagtctttgacctttggttccagatgttgcagcaaaagagaaaaagtggcctgccagcaaacttcaaaaggtactgttgatgatttttgttatgtcacatcttgttcatgttaacttataagcgtaatggttggaaattctattgttcgctttgatagctgataaaggggttgttactctcttggtaccagggaacatgataaaaaggtttgctgcttgggtttgacttcattacttgctctccctgggggtcaattccccgatgaagcgctgcagcgtgttttcagggcaacacttgatcttctagttgcatataagaatcagctagctggtatgtcctgctcatgagtcatgatccattttctcttcacttggcatggtaatctttacatttattccctttccaatcttcctcgcagaagcagctaaggagacagaagtagattatgaagaagaaatgaatggactccagagtgatgatgatgattatgatgatgatgggtctgatggggagatggatgatacagaggaaggagatgaagcacaaagtgttaaactgcagaagttagctgcacaggtttgtgaagtgtttgtatcgacttgcttctgcgaagcatggtttttttttgctggctttgactgttttccaattcgtttatccttttcataggcaaaggccttccactatgatgatgatgatgacgacgattctgatgatgactttagtgatgaggacgagtttcagtcacccatcgatgaggtggatgcctttgtattctttgtcgatgcaatcagaggtaccattaaataaaaatcctatggttaccagttttgaccacataaaatgctatatggagcttcatgttctctggcgtatcttgcttagtaatcacgtccttgtttattatacagttatgcaggcatcagatgcgcagaggtttcagaacctgagccagtcactggacttcacttaccaggcgattgcaaacggaatagcacagcatgcagagctgagaagagtggagatcgagaaggagaagcaaaagaagttagcagctgcttctactcctgttactgctctatgatttttaagctttggatcaaagtcagagtctgatacacagatggtgtcatttttgtgagagattctcgttcaataaatatttggcatagtcgcttgcttaaaggttattcaaatgaagaagcagattttgtgaattttagcagaagagatcatccctagaaccttgtgaaaccgtgtggttacggttgatgaagatggagtctcttatggtatgaagaaagtgtgtactatacaatgtgttgcgtctcttcttttggattggttgtattcgtaaagaaagacagtttttggggagggtgggggattttgtgtactctttatcctatattatgtgtttggtcttttgggatgtgatagatttttttaggaaaagctatattgaattttttgtgatctcacagagagatcagcaaggtcactcatcaggttgtacgaccattctttcataaagtgataattattattatcaatctgtcactacatattactttctttctttagtttactctggtaggtcaattctagggctggacgataatatattttgtttctcaaggactaaagacagagatgatataacttgaggacgagaacattaattccagcttagaagaacaaatatcttcgttatatttataaaattttacattaatcttgccgataaacaaaaacatcattttactggtctcactcagttcctataatccatcgtacaagttattctcatccgattatgttttccctcggcaaaacctatttatacccacccatttgtgacaatcaaagccatgacaaaagtatttggtgtttctgtagaatttcttccttacccaaacataaactcattatcctattatttgtgttacagggaactatcatgtttcatagcagctaggaaatttcattccaagatggagagagtagcaggcattcaagagacaaaaccagtaagatgtgaagaacacactctaacagtcaacaacaatcaagcatgtaatcgacatttgagactaaaacgattgcatcgacatttaagacagtagagaataaaaaagaatagatcctactactacacctatatcacgaagaagccaagattccataatgtgggctttgttagcatcagtgtgcaattttaagagtagctgatgcagctacactacaataccataagtcatactgattgctcaaagtttcttagtgcttaaaaattcttattccaacagagttcctcaccgagagataagaagataatgaaacagaagcatatatcatcacactcaagtttctttattctcaaataacaaacaggtcccaaagctttcaagggattgaaattgaaactttctacagactagaagactgtgaagaagacggcacaacgaactcaacaacaatggtagaatccacataatcacgaaccttatccttttgcgaattcaccaactctttctgagcatccacagcttccatttcactcaaatccttgaaatacgcaatcgaagcaatagagaaacctttagctctagcaggagaaaagttttctccaacagtaatctgatcaatccctggaaatttctcacttagtcccttaatcactcccgtaatctccgatttcgcctcatctgctacatcctctttcaatttgagcaatgtgagtttagcaaccgaaccaggaagcggcgctacggttccggggattcgatcagcgatccaatcaacagccatgatatcatcacagatcggtaacacagattccttaacaacacgaacgtgatctggatgtgcagcgtaggaggctagatcttctttagattcgtaacggctatggagtacgtgagtgaaggcggtagcggaggagatacggtggagaggagaggtggagatgtgactgtagagcaca

SEQ ID NO: 31005 - DNA, 3335 bp, Arabidopsis thaliana landsberg
  unsure (1)..(3335): unsure at all n locations
aaaaggtttcacaaatattctcacgtagtattctttatataccaatgttttgtctataatatatttaatgtgaatttatacaggactaatgtaaattctataaaatcttatcagaaaattcattaaggagattcagaaatattttccaagagacattgttcttgtactacacatttcaaaacactaataaaagtagcttaaacattatttttacgtaaaaacaaaaaccaattcctaaaactgtattcttgtaaagacatgtaggaaagatttataaatattctctctaactcgtcaaataatatatatgagatcatttttacacatgtagcatcattttagaaaaaaaatataaattaaacagtatatctggcataataccgaaatttggtatggtccaatatgaaattcaatgtatatacatgaaattgtttagaaagatttggaattttgacaagtatatcacatgcggatatttttcttgaaattgaaacaaacataaaaagaaatttacagtgtatttagagattttaagtgggaaatgtgtatttaatttaattttacttatatagtaaaaaatctaaaatttcatttgttaaatacgtaattgctgacgtcaaaaagatgtaaattttatagaaaaatttaaaagttttggacacgtaaactatatgtagatattttctcgaaattgaaaaaaagctacatacaaatttacaaaatctttaaagattttaagtcaaaggataagcatttaattaaatcttaaatagtaaaaaatctaaattttcatttgttaaatacgtaattggtgacgtaagaaaatgctgtaaatgtcttagtgagattgaaagtttttgacacgtatatatttttcccgatattgaacaaaacctacatagaacattataaaaatctttagagatgttaagtaagaaatactcatttaattctatactacttaaatagttaaaaaatttaaatttttatttgttaaatacgcaattgcttacgtaagaaaaaatgtaatttccttacaaattagtaacggccaaaacataatgattataagttaacaaaaagaaaactaaagagcctgaaaaataaatataaaaatatatatacagtgtagaccttttatgaacaaatttgtaactctatatttgaaaaactttgcaataaattgttaaatataaattaaacctaatgcatcattcatgtaatcattggcataaaaactataatatattttctttgtgagccaccgaagtttagctttctttcacttcgaccctctctaattatacatagttttaaaaccagccctctctaaaaatacttaaaatcaaattcttccaaaatcaaaacctcttacacagattatttttctctctgagagagacagagagagcgaaacttgagagaccaaaatccaatcttttcaacattcgattctctctgagaaagccaacaataaagctagacacttttttttgtgggtttgtcttcttcttcgttcatgcaccatgttgtgttacgtgaacgaagaagctatataatcaataaatcttatcgatttgttgagtttgggaatcggagagaaagatgttaacaaaggtgcttagtaaggaggttaagccatgccttgcttgtccaatctgcactaatccgtttaaggatgccaccacaatctccgagtgtctccacacctgtaagtgtaacccttcgattgttttttcctttatctttgtgatttagattctgattttttgtttgtgactatctctctgtttattggttatattaattagtgtagactagagattatatcagattgattctgaaacttggaagttgaaaccgatgttttgtttagctttttggtgttgttgtgtgtgtttcaacatgtatctgtgtaaatattaaggtaagcagataaggactgtttttttttgtaagtggatgattcagtgtctgtttatgtctttgtgatttcaaagttgctgtttctttagcttgttatgtttctagtcctggctttaagtattggtatatcttgtgtctttatatgaattgggacttgtggaatttgtggtaacagtttgcaggagctgcattcgtaacaagttcataaatgagagagtgaacgctagtccagtctgcaacgttaaccttggtgttttgacgatacagaaacttcggtatgaacttgtttgattcttagcatttgcatctatctttatgcttttatgtgatttgaggtatctatataagtgcaggtcggattgcacttggcaagatttgaagctgaaaatctaccgagcaatgatggaaagcttaaagaaggcaggacctaaaactgttgcagcgtctgtgaaatcttcgaaaaagaagagaaaatctcgaacttcactgcgggtctcttcatctagagtatcatcctcacctgatactccattggaaccagccaatgtggttgtggaaccacctaatgtggttgtggaggagaaacatagggagaccgttctagctcttcaaagcactagaaaaccgataatcacgttccagaaacgtgggagaaaagcttcactcccgaagaagattgattcgaaaccagaacccgaactgcctcctaaggagcctaaaattaagaatctatttgacctgaacaacgaacctgaagacaatggattggtaagtatgtatatgagtctttgtataactattgttctcctttgttaactatctgtttgcaactaatgtgtttatgcatcttaggacgaagctgaaggannnnnnnnnnnnnnnnnnnnnnnnnnnnnnnnnnnnnnttgtaaacctattttctctctctctgtcactctaaacatcaacgatactcctcctgatatcgttgagcctgagataagttcggatgacgacacagaggaatctgttgaacctattcagaacaagtgtgttgtgaatagagaaacaaaggaagttcctgttcaagtgaatcaaaacagtctccttattagctctgatagggatagagaggacaactctggtcagaaactgaagaccaatggtgctgctacctccagatcaaggaagaagaaaggtaagaaaccggtggaaaagagctattctttgagaccccgaataggcaggaggacggttaatccagcagctggtactactacaccagaagctccggtttccgtggaagagcagatgaaagttgaagaaggacgtaacaacaatccagtttggttttcactaaagccttccaagactcagtaaaactttttttctatcttcttttttcatgtctttaacttataattctgttt

SEQ ID NO: 31006 - DNA, 2855 bp, Arabidopsis thaliana landsberg
  unsure (1)..(2855): unsure at all n locations
atgtttgctcatttcacttacgagacaggacgtaagaactttttttctccgtttttgacctttttatacactacccatatcctagccttctaggtacattactagattgtgacataaaaattgagtatgcgaatttaaaaaatttagagtcacaattgtttatttacgttttaatctacagtagcgtttgagtgttttaaataattactaaaatactataacatacatacgtttgaaacaatcattatctagaacgaaaaaagaatcatatttaagacgtaagagattaaattttaaaaccttggatgttatctcatttactctgtttttgtcctacaataattataaactgaacattgattttctagcatttgttcgtttgttcgtaaattaactagtgtgtttcaatatgcatctttgtacgtgtagacttctgctacatagaagagataaacggggcgtcacgtgtcatgtgcgaccagaacaacaggcaatatccatgtgcaccggccaagagctaccatggccgtggtccgctcctactatcatggaacttcaactatggagcatgcggccagagtctcggcttagacctcctacgccagcccgagctggtgagtagtaacccagtcgtggctttcaggacggctctgtggttttggatgaagagcgtgaggcctgtattgaaccagggatttggagccaccataagagccatcagcggtttcgactgtgacggtaggaacttaggtggggtgaacgcaaggattggctactatagagactattgtgggcagcttggtttggaccctggcgccaacataacttgctaaaacgctcttgggacatacatggcacgaaagtattaaaggtgaaataagaagtgttgttgtaattgtagtactttttttttttttttttttgataaaaagctagagtaatcttgtgaagtgaaatcacattattaaaagattaataaatcgacttatacaaataaaatgcttgattcttgatatttataccgcacccaaagaacaacagaacataactttgttgcataagtttttgactcctatatgtaaaacttcattcctttcttatctagtattgttggtttcttatctcaattgagcgatcggattagaattggtctgacaactagtttattatgtgaaacttttaaaatgaagagttttgttgtgaatcagagggtttgaaagaatttgatttcagtttaaaagtaaaccgaatttgttcaagtcgttgtaggcctatgttttgtctgtttctatacatgattgatcagtctcttgaaagtatgatatatagattatagagcttgttttctctatgatatacatgttcctgcaatatatcttgttagattactaactggactaagtctggcacgtaagacaacgatcttccacaagtaattctagtttacaagtcattctaataattttaattaatttcaaaatggttggaataaaattacctagttttactatttaagagaagaccaacatcaaagattattcttatctaatattcaaattatggatattaatgcattcatatacgactcgggattagtatttcttacaagacttgttcaataaaatttcttgccaacaattatgacttttcctgttgtttacaatttttcacaagtctattgtcgattttaaatttgtgttatcacacacaacatgagactagtaaaaccaattgacattgactacaggcttctaccgattaaacttatcttgtataacaaactcaaaccatattttaatttttgttttccaattggcgactactttcagtaaaagtcacttagtttcttgctttttagaaccacaaaaaccaaatatacttttttcacctatctcattttatctctgataatttttctttacactaaatgtttgcatcacaggaacaaaaaaatatttggtttaaccaatttcgtagattgaaacgaaaatgttggtgtttgtttgaaaatttcccaacgtgttacgtgtaacgtttcgaatggtctaagaactaataagcatgcgtggcattgggcgttgacgttgactcagaaaactaccagtatattttatttacaacaaaacgtatgcttcacggatccatcatcatctataaaacacgaagctaatgttcatcatctctctctgcagtctgcatcacagacacaaaaacaatggctaaacccacatcacgaaatgaccgatttgcccttttcttcataaccctaattttcctgatcctaaccgtttccaaaccggtcgcctctcaaaactgtggctgcgcctctgannnnnnnnnnnnnnnnnnnnnnnnnnnnnnnnnnnnnnnnnnnnnnnnnnnnnnnnnnnnnnnnnnnngaccttgccggagcagtggaggcggtggagatcctgctgtttcactagaaggaacggtgacacctgacttctttaactctatactaaaccaaagaggtgattgtcctggcaaaggattctacactcacgacaccttcatggccgcagctaattcttaccctagcttcggtgcttccatctccaaacgcgaaatcgcggcgtttttcgctcacgtagcccaagaaacagggtgtaagtaaattttctcatataattttgaatgaataaagatacttataacataaaatttattctagttacgactatattggttcaatttgactaaattaaatttcagcataagataataagatcagtaattgttgtatacaaattttggttaatcgtatatgtccaccactataggtttcgtttttgtgaccatatggttataccttgttgcagtcatgtgctaca

SEQ ID NO: 31007 - DNA, 1477 bp, Arabidopsis thaliana landsberg
attttgttttctcttttttttttaaagaaacaaagatattaaaataaaataaaacacgagaccgtgtcactaactaacagagacgtagctacacatatataaagagatcgagaggtcttcatttctcacaagccacaacaacaccaatcacacttctcaaaaaagatcagagatttctagatccttcttcttctcctgcaaattcatctacctgaatcttccaactttataaatcgatcatgatctccgtcgtaatcatcgctgagttactagtagagtacacgacggctctcgcgaaactaaccgccgggattcttccatcgagacggcgaggcgatagtaacgttgtacggattggtggtttctctctgccttgtccttctccgtcgagtagtagtactagtcgatcatctgcgattccagatttctcttcttatctcgttgatttctgatcttggggaagacgaaacagattttgttttcttctctctcttttttttaaatctattcgaagattggattggacggctgagatttttccatgtgtgtctcttctgtctccctctcttcctctagattttaaaatcgcttattagatctttgtaaatcggtatctcaatataataatagtggttatgaatttttgatgaactactctctcatcttctccttgcatttctcaatttctgattttacctaactgtgatgatggctcatttgacgatttttggtctcgttttggtgacgtcagaaaaatggatataagtcgcatttgactaattaagtgcactagtttatctttttttcactctgaatgttcaacatataagaattcgtttccatgttttggtccttatggacggttgaaaacagttacgagaattcgaaattaaataaaataaaaataacaatcataggtagcaaactaaatgataagaccagttaatgatgaaaattcaataattaagttaatttgttttttgattaaaagaaacaaaaagcatcgtttaagaaaataacaagaaaacaaatcatacgtgattttacaaatttatgttcttgtcccgtctcattaccaaacgggaaattaaatcttggtctagatggaaatgcgtttcataataaaacaagaatttgaaatcggtaatgaaacaagatgggacgaaaactgagataggatatggaatggaaatctggtccacacatttatcggaaggtggactttagctttcaggaattaaagaagttggatagattttccgtgagtacaccaaatttgtagtattaacagaagttgaaattacggtgtgaactctagtagctacaactcccaagtctttaactacatttgatatataatgttttggaacattcgttctccactactgatcaccacgtttacatcacttttcttaaattggaataggtaatttaatttagtactcaaaggtatatatatgttgtgctgtcttcgtct

SEQ ID NO: 31008 - DNA, 1792 bp, Arabidopsis thaliana landsberg
ttacaattatacaactgtgaagcgcgaatcgtgtacttgttttctctttaaacatgattaagccattgctattgggggtgacatggtaccattaattatttccaacgtagacaggattacagtaatctctacatttatggaaattaggtgattagtttgtatttgtagtgtctatcaaacgaaactcgataaggatggtcctacagtatttattgattaattatcacttatcaggagcaaagatagagacttgttctctctctcgtttttcaactaaagacagagacctcgcacttagatttaatggttgaaacttgtaactaaaactacttgtgagtatataaattagtatctagtttatgctttacacatctaattagacgaaaaaatatattttgtcttctgataaccgtggtaattttcatgctaattttgttttaaacgttctatctagagaaaaaaaaaaaaatcgttctatctagacggtagaattagttctcggtgatttaaaacataaactaatctttagacatgaattagtcgttttagacagactagattatcgactctgttttttaatatggagtagggtacaccacgaccacgaggcccattgtgaataaattattccatgggctttaaatatttgctacgtggacccatcttacttgaagttgattttggatctaccataccagtgtgttttctttcttgaaaacgatttaacaagtacacacagcctggacagatctataaatatatacatttatcttttgtcacaaaatcaaacaaatattattttatttcccaacaggcaacaggttatccacaataaaaaatgatcaatttacataaaccagatcacaagatataaaaccatacggtttatctcttagacaaaaaaaaaaaaagtaagagaaagaatggaacattgtaagagaacccccaaaaaagaaactaaacccaaaaacagaatagcaaataagttttgggtcagaatataagcaaagatgtgttatatatcaatcacaaagaataatttacaaatcagagaggtcaaaacaaagctgacgaagcttcacgaaactaatgatcttggaaccctcatgccaaatccatgcttcaccttgtcaaccctgattcaattttcaaccataaaatttcagaatcaactaaatgattgatgtaaaaatttgattacatggaattgtgttgtgcttacgttggagctaatctgccaagactcttaagttcttcaccagagtctccatcaagaactcttcctgctatatcaatgatgtaagaacggttcttgcctcgaggaagacctctacttgatagtaactctaggtctctctcgtgaagctctcttccgtttacaaacacactcgtgtttcctgcaccgcagttatccggcattggtcgactaaactcctctataaatggctgcatcaaccaacaattgtttcccatttcctcatcaagtaccaatcaatacaaagaattatgaaacagtgtactggaattcaaagcaatatagaagagatgtgaaagttcttactggtattataccgagacaagggtttcccatcactccccagaatccagcacggtaatcatacctggtcagaatcataacataaagatggtttcttgaatgactgatcaattcttttgacgtagatttatcaaaacgtaaccccaaacataccagtatttgccagcttgaactggcccagcttgtttctcagcgctaataaccagatcttctggtatcagatacccattcacc

SEQ ID NO: 31009 - DNA, 1822 bp, Arabidopsis thaliana landsberg
cagagtttaatgtgatgatcctcgtgatcttctgacgggaacaccggccaaccctctgattgtttttcttcttttaagggttttgaaaacggcaaaatatctttcaagggttttattggaataaccaaatttggttcttataagatatctttcatgtgattttggtctttactaattactaaatgattggaattactaatccgttacattttatgattagtaaaaattatgcagaattctaagatgattttacatttttacaaatcagacccaaaatggcagaaagagcaaaacaaactacagtgtcactcaatatggtcctgatgatattttcttggaaagcataagttgaatatttgtctatcgtctttagatttgtggcattggttaagtcaattgtttttggctagaaaacagaaagaaaaaagaaaaaactctagtaataatagtttttcggatttccattattaaacatcttgacttctctaaatttttactaatcaccaatctaactggttcacaatattttttaacatcaaatttcattagatacaatagtattgctcatctatagtttcattaaattatttcgtcagaaaaagattatgcggttttagttctccattgtaaggttcaagggctacacggatcatgttagttaattgggcactccttgtacaaatcaaaatgcagttcagcttgggcttttttatcctagtctgttggccaccatctcttagtaaaaggaaatgcatcacgaattgtgtatttcggtggaagttgatggattctattatggattggaagattgtggatgttgcctctctttgtgctgatttgtgctgaaatacataaatatttcgagtcaaaaaacttaggtgggatatcaaacaagtatcctgagatagtttttcaaacgcttttaggtgtgagaaagacattctcatagtagaaaaaaagttgctttgggactaactccgaaagtgatctatgtgtgatgagtcatgtctcttttgaaaccccaaatcttatcattggtaggcaaaccggctcgtcatcaacaactgacattggctcatatttcaattctaactttttttcttaacgtcatatctaagctttcgatcttcagggttagtgtgaaactcactaaattctctaaccatcgaagcagcacaaaggaagtctgtgagctctgcaatgtctatattttctccacatctctccacagttagagaagattcagctccgagaaactcattttcaccaaacaaatttataattatggtcggtcataacaatatttatctattatcttagatttatggtatcggtttgtcaactggttttagctagaaaacagaaaaaaagaagtaaacccgagtaaatctcttttttggcaaaaatattttatttgggggaaatgaattttttggaaaaaaaaaattgacaagaaaaagttttttcggaaatttttttggtagatcttttttttgtcggatttgttttacaagaaacttatcttcgaaatatttttgacagaaaaaattattatttcattttgttaatctaaaatatttttcaaatatgagtaaaacagtcattaaaataaaagaatgtataaaaagaatgaactgcataaacaaatagaattaaaaaggagtttctaacaatttcttataaattaataaaatgctatagcattaacaatattaagtaatagatgttttaatatagtgtttccatacatttgacttttgtaaattttactaattaccaatctaattggctcacaagacttttttcacatcaactttcattg

SEQ ID NO: 31010 - DNA, 2625 bp, Arabidopsis thaliana landsberg
aaatagtttttaccacggaacagatcaagtgcctgaaatgacagataagctaaaaatcaatgaaactgctaaagatacattatgtatatacacattttgctttgtgagaagaaagttacatggtttggtggaatatgtctgccgctcataagatccagtaacaaggttccgaagctaaatgtgacactctccggtatcacagtacctaacaataaaagtaaaagaaaaacatctttgagatttcagctgatgaagttttctctcaagaaaattaaacataaaacacatacctagacgtaaatattcaggaggagcaaatgccaagttggtactatagctctttccctctcggctacacttcatgagaccaaaacaagacagcctaggattcccaacctgttccatcacttttataaataacttatgataacatcaaaccgcgtatgaagtttcttaccttgtcaaacaatattctgtaggtgttaagatcgtgatacaaatctattccccaatcattacagtactccaaggctgttgcagtatgtaacgcaactctcaacctcatttcccacttcattggtcttttctcccctgaaaaaccattttagagtaaaaacaacttagacacaataattaaactctaaagtaaagtttaaggccaaaagagatcaagaacttgaaatgtttgagtctcacagtgaaagagatgcttagcaagtgtttcattaggcatgtactcagcaacaagcaacctctcgtgaccttctgagcaacaaccgatcaaattggccatatgctcactcctacatctccctacagcttgtgcttcctcctgaataacaaatatgccatattcaagaaattttcctctgcaacagatcaagcatagaaccgaattgaatctttactaagtcaaacagacttgaaatttgcctcctctgcaacaaatcagaatccagaacattgcaacattcaagagaagtatcacggagttagtaaccaataaagtcaaataagatgaataagcgatcactagtcaaatcttatacaaaaccaaacagagaagaatcaataagtattgatgggtaaaggacacgaacgatgaattctaaagaatcaggccatgaaagccgttgaaaccgcttgacggcgatctttcttccgtcgttgagctggcctttgtagacgatgttaggaaccctctcgttgtgctccgacacgatgttgtcggcggagaatccgtcagttgcgactctcaactgttccaagctgaactccaggaaattaggacaagtacttccttcatcttcttctttattatctgcagccaaaactattaggttagttctctcgatcatcgtcttcttcagaatctaattaacgcataggaggagtggctggcgaattcgttggattttacctagatcgtcgatgacggtgatggtggatgttatcgacggagaagacgatcgacgccaacgtttgaaacaaatgcagcccatcgccggcgacagtagtttctccggtggagaaaaacttttcaagtgcttggttaaaaactcccgcctgcagggagaaaataaattattattattttcttttttgcctagcgaatattgttggaaagttttacggagaaagtggtaaaatagacccaaaaatatcatttatttatatatcacataattaaatagttgatgaccaatatatactttttttttttttttgaaaagatcaacctttatactattataaggataaaatgtcgacatgatctatgtattaatttaaagaaactattgtttgcttgttccatttaaattactcggtattagattaattttgagcataaacattacaggtttttattttggtaaataatcattagactgttgagtttggtctttactttagcctcaattttaaagtctatattcaatggattttgcttacatacatttcattcacgtttaaaccgaaaatatctcatttaagttgtaaccaaaaaaaaaaaaaacagaaaaattctcattaaaattaatttttgctagttaccgcagcttttcgagactgggtgtgtaatatccatcacactaacttttttttttttaatccatccatacgtttaactacatttaagcaaatatcgctatcaaatcgttttggtatatttcgctcattactggcaaaattcactctacaaaaaaagtctagtttgtaatgggacgctcgtttttaggtgacttatataaaaataaataaatagattaaaaaacaaataaaatcagtataggcctaaataaaagttagcttacggaccatttatgatgaaacttgggccctaatgcaaagcccattaattttatctttggagtctgaagtctctcctctctgtgctttcacataatcacattgcatgattgatcaaatactcgattttccgtgaaatctctttgaatatttcgattccttgttaccatggcgcttcatgggtctggagttttttgtaaagtaagctataattcttctctttgagatttacttccttgattcttcagctctaatctatacttaaatgtttatcatacgtttctcgtaagtaatctcgaaatttagtcgattttc

SEQ ID NO: 31011 - DNA, 1898 bp, Arabidopsis thaliana landsberg
taggaccctcgcctcgaagctatatactctctctcctgcggacagcaacttaagagtattcatcaatatttgtgatgtactgatgtatagaaacttcaatatatgcagagatgtagagggggaaggaagattcaatgtacttggagcaaaaaccatggtagagaaggcaaaccataaaatggtactagcttggtaattaggaggtccatggaagtctgggttatccctatgttcaagagcccaaacagtaaatccaataaggaagaaaagaacaaaggaagtcaaccacagttcccatgacaagggtttcaggaaagggacactatctcttttcacttggtcttcaatggagacgactaatcctacgcctgatttaaataaatggtaatgtgaactcaacataaagggaccttttcgtaagtatggtcgtatctcccacaacggcgtcatatctctgcaacagagggaagaaaagaagagttcactaagatggttaatgtagatactatcttgagagacgatttttacccctaggtacacttggtggaccaagtcgttgtaactaccggctggttcaccattgggtttctcgaaaggaatgaactcataggagacgtcataaggcattgcttgaaccacagcctcaaaataatctatgcaaaaacctgtgactatagttgaattggtgagaggatcccttgtgaccttcacgagatcagtgaaaccaattctcttaggaactccaatgcgcaacctcttgtcatttgtaggaatcttcgatccagttggaatagaaccagcctctccaggccatataatgtatttaagatgatcattccaagtagataaattactcatgcaactcggttgctgctctagtttcttcacaagaccattttcctccgtccagaatcctactgaccttactccggtaccgatcacattaacaatctcaaacaccgatggttgcagttgcccattgacaaaacagaaatctcctgcaagtcctctgaactgaattgttgagagcgtctggagaagctttggaccaaactgagataaaccaagagcttcaagttcagatacatttttcccaggatctgcattactgaaagtcaatatatctattccagcttcttcgacggccatcactagtgatgtggttgcatcataagcccacaatccatagacactcagctctatctgcgggaaatcttcctccatcgagacctaaacttgtccagctctttggatttctgaacataagttttaacaccaagtacgccctccatagcctcaacctctgtctcattcatccaagttaagtcatcggtcacactattggtaaggatccagacatatcctggtttcattaaaccaatctccctagcgttaataaagactcttgaggcaagagaagggtacatgtggacaataaagactctagtggacatggtcatcatcttaagaagctccaaggagatttcttgatccgtagcattgagagcaataacagatctatacggtattcgaacattaatctcttgtaatgcatcggtgagacgaggcattataccttctccaaacgtgttgtctacgtaaacaggtacggcttctctccagccaaacaacttgataatagcttttatggcgtttacttgagaggagtcctcgaatgtagcacgaaagaaatatggactgcgaagagaagtaagaaacgggcttgttgcagagtaggagataatcggaacttgtgatttttggccaatctcaaccaaaaaatgagcttgcattgaagtcaatggccccaaaatcgctttcactttattgttctttatcagctcaatagcttgtgccaaaagtcaaaaccaagaaaatttggtgtcatgaaaattaaa

SEQ ID NO: 31012 - DNA, 2438 bp, Arabidopsis thaliana landsberg
cacctttcctagtgcaatgggagtgtataatctttggcgttgatatctgttttatagaagcatggcgacacctctagcatcatagcccattgtaggaaaagatagactcctctctgtcgaggattgaacttcatcatggcatgtactttgtgaacttttagtctgcacaaaaaagaaataactctgatcattaccctgtttctggacacagtttggttgaccttttctttcccaagtgaggctgacaagggccagagccatggcacaatagtgatgatatagccacctgcaaaaccaaatcaagttcagagtttaattcactcccaacagatgagataagccaaacgaaacaccactacatgaatacatatataaaagatatccactgcataataataacaatactaaacacccccaaccattgaggactccgtggaagctaaagttctctaatcctaatcatgaaatacttgacaaaaccatatatgtgtatgctaaagttctctatgtgtatacttctatgccaaaatgaaagagaccctttagagggaaaaatccaaatgtttgccaatcaccatgccacatgatgatgcatttgatattttacaacattcaatagtcatcatttgctaactgcaaagcatgtgctttgtggatatagaactcaagatccacacagtaacatgacacaacacttggaaacccaatattctctaaacttaggtacgtcctatgacttccataaaactacagatgtgcttggttgagcataggacagacgttcaacatatagcatgacgcatcactctgagatacacacatacaatgaaataacattctatggccttcactagcgacgcatgagacacaaagaacactccaaattcaaagaacttgacaacacgagcaaagaaaaacttaagagatcataacagtcataatcgaacgatgaggaaacatataagagccccatgcccgaatattgctccccttagctcttaatatgttctctagcatagctaacccagcatagagaaacgacagccaagcctagtaaaaaggataaaaaaattacattttaaagcaacccaaatcatactcaattacctcgtacagctggagaggaaatgcaggcaaacatccaccccaataataagatctaaggattaataatgtttcagggggacaaaaaaaaaaggaaaagaagagcagtcttgtcttgtcctgttccatggcaacaagaaaaacaaccacacttagataactctgaaaacatgaaattgacattaaaggacacatgcaagcaaaaaaaagtaccaactcttaagctattgtattcttctttttaactttgagctgaacatctttacgcaacgctcaaacttttctgtctgacatacaaggtatatctccattatacataaacaagctttctgtcgaaaacgagttttaagagatggaaaagaaaccatacaagtaggagagtaaaagaacaagacattcatgatctgatctttgctggacaatcagacgagtctagatggaaactagaccctatttataaatgaaaacatcttaaaactcaaatcctcaagaaaagttgagttcacatgttgttgaagctcgggaagaacgagtcaattcctttatcatctcgagttctggaaccaaacatgtataagaatcgattgttgcattccttaagcaacaagcgtttttcaagatgtaaaccgcaatatctctgtcttgtgttcttcctaagtactgcgaccaggtgaacttttgtagactcgacaacaagcattcgggaacaatactcggttgattccagggaaacatacgcatattctcataactctgagatcaagagaagaatcagatttttttttaaaaacataatgtgcaataaataagaaataatagctaatagaagaaacatacgtcatctagttcagagaagtactctagttcttgtaagttaggagagtctttgaggaactgggaaaggagattcgacgggttctcttccaatacatgtagtgtcagacgctcaaggcggttgaagatataaccgtcaccaaacatagcctgcggacgaataagaaaagtgttaacagagaatttagaaagcacagatcaaagatggattgaaactgattaccttagaggatattgaaagacgcttgacagatgtgattgatccaataagactcttgatgctatgtaattcaacatctatatctgcctctatcaggttaggcatattcttaaccaaacagtagatgactcttactgttatggtctataagtttaaaatactttaaagaaggagtttctatcacaatcccatcgatctcataagaatgaggtataaagagtgataaaatctgcaaggatgggacaacaaccgttagcttttccatgctgtctgacaaaag

SEQ ID NO: 31013 - DNA, 1875 bp, Arabidopsis thaliana landsberg
  unsure (1)..(1875): unsure at all n locations
tgtttgtagagttgcgattttggagtatttgattgtgttctggttagtgaggaagatcgacaatggtttgtggaagctatgcaagcacatacaatcgattcaatctctcgtatgaaagtaatatctcaaatcatgaagatgcctgaacaagtcttggaggctcaaggagttacacctgatgatcttgaaggttctttacttcgttccaatggcgattattcggttatgcaaaagaaccatactgatcgatttcataaacttatatctacttttgttttgacaggaatgttggctgagctgcaggaacacgtcgagtccatagatttggccaatggtttgatcttacataactagtctttgtttttcgaggttcttttttttaatatattatttggatctttaaatgttttagatcttcactccattggaggtttggttcctctccttagctatctcaagaactctaatgcgaaaattcgagcaaagtctgccgatgttttgactacggttgtccaaaacaatccaagaagccagcaacttgttatggaagcaaatgggttcgaaccattattaactaactttattgctgatcctgacattaaagtccggaccaaagcactcggggctatatcttgtaagagttactatttctagcaaagtttgctttgagaaccctaaagtttgacagtttttttcttgctttcgacattgcagctcttatccgtaacaaccaacccgggattacagcattccgtctggcaaatggttatgctggcctgcgagacgctttggtctctgataccgttagattccaaaggtaaatagggtctcaagaatatgtattaggtagatgaattgatccgggttttggttctgtttcggtnnnnnnnnnnnnnnnnnnnnnnnnnnnnnnctttctgtttcagaaaagcgttgaacttgcttcactatcttctccaagaaagcaactcagactgtaaaatcgttagagatcttggattccctcgcataatgatccacctagcatccaaccaagattttgaagttcgggaattcgctcttcgtggtctcctagagcttgcccgtgaagaatctgtgagaaaccttgatagaggggatgtgaatctaagacagcttcttgaggagagaacaagacgaataattgtgatgtcggacgaagatctttgtgcagctagagaagaaagacagctagtggatagtctttggaccgtgtgttatgatgaaccgtcccttctaagagaaagaggtctggtctacctcccttctgacgacgagctggctcctgatgtggttagggaccgctttgaacctcctctaagggcttgggctgcaagacgacatgatgaaacgagtgaatccccggttccacttcttcttggtcctgcaccgtgatctcgttcaaccaaattattagattttgcagttatcaacaaatcagctttgctttagaatttctctagctcttgtttatgtatatctgagcgacaacaagacgctattaaagagattatctgtgttctgtttctgtaatacaaatctacactcatggacttcaagttctacaacttctccgttcactttgccaatatcatagtgtaccgttattatgtttaagtcatgaacaatacttgcgagactgttcttgatactgaatccactatcgcaatcataatcttcatactctataaattcttataagatatcacaaaaaactcaattatatattccatacaaaggcaaaaatgtatgtacatgatccgtattagtaaacctttgtaaaaaaactataaacataaaacattgctagagttggaacatcaaacatcacctgccaccggagagtagagagtcagc

SEQ ID NO: 31014 - DNA, 1423 bp, Arabidopsis thaliana landsberg
gaatgtgcatgactcactaaatctgtggttcattcccaacattttcccactcccacggaagtccaacggcgataaatctggtaacgttgcatctccccttagatactgtagcacttgtctcactgttggtctaacttgtgggtcggagtgagagcataacaaacctagcttcaaaaccatttcgacttctctttggtcatagaccgatcctagattcggatccgtagcatccaagatgtttccctctatccaaaacccaaaaaccgaatccactagcaacacgctctcatcactctcgatctcaatctcgataggtcgcctaccgcaagcaacttctagtaggagcaccccaaacgcaaaaacatcagtagcagttgtggcacgtcctgttctgacatgatccggggctaggtatccccaagttccaacaacacgcgtagtctgaggatcagaaccgtggtcgcacaaccgagctaaaccaaaatccccgagtcttccattgtactccgcgtctaacaaaacgttactagctttgatgtcgcggtgaatcaccacttgttcccattcctcatggagatagaataagccagaggccacacctataattacattaaacctctgtttccaatcaagtgttacctcaggacaatcgtacaaatacttatctaagctaccattaggcatgtaatcatacaccaaaagaagctcgtctctacgacgacaataacccaagagaggaactaagttccgatgactcatcctaccaatactcacaatctcagcaacaaactctttcaacccttgtcgagattcattcgacactctcttcaccgcgatctctttcttcgttgtcggcatgacacctctataaaccctcccaaacccacccgatccaagaaggtccttatccttgaacccttttgtagcatagtacaagtccttaaaccttaaccggttcttcccaaactctgtttcccaatcttcgaactcctccgcaaactttctcctcctcctcacgataaagcgcacgaggaagatgagcgagacaacaaacaagaccggaatcaacaagagggaaaataacggcatcctgttcttataaaacctctgtaaactcgttggcccgaccctcggaaacttcggaactttcgataaagtcaacggcggagctgtcttccctttcaccatgaaactccacccaaaaacaaaatgttccgacagaacataaccagtcgcagccgagaaacctaagtacatgtcttgcaagaaaacagaagatagatctctaacaacagaaacaagcggtttcctaggtttaacctcaccaaacggagccatgttacatcgattgattagacatatcgagtcaccaactgctcgttacatataagtaatataatgtgttatcatacacgcacttaca

SEQ ID NO: 31015 - DNA, 1595 bp, Arabidopsis thaliana landsberg
gtacagtactacagtgataattggacatgtctcagagcagtcttcgaagagacagaacctggaaaggttttgtgctgtagaaaaccagagtctggtcaaaggagagagcctctgccgatctttaatgataacaggtcatccacagaacgtacgtccatttagccttcaacctaaacattataacacatgtaaaaccccagctccatatgtttatgaaacaatacaatgttacaaacagagttacccttatacttgattgatagagctccaaattacaatatctacccaagcaaaattgatagtgctgttacagacctttaatctctccctttatttcagatcctttattttctctgcatataatctattgattagtagaatccgaggatcattcattgaatcattcacaggctctaatttctcctcctagataaacaatcaaagagcagtcaagaaacgaagcagatggagaagacacatctcaatatttaatagcgcatacctcagtaaggtcatcaggcaaatgaaatatttctcgtatctcctcagggttttttccttcaatgattcttgcaagtgcgcgactagtaagatcaaccaaaggtttcagctgcaaactgtcagcggcagaggtcaactcacagagcctctttgtgtccattcggatgaatctttcatcataagtttttcgttcctacagagtggaaaatagatgtaatgaaagaggccagacggggtatggaaatgaaaatatttacttctaattcaaacaaaccttatttgaacgtcctggcagttgatgaaatctgcagtaatcaagaatcaagctgaacatagctggattaactcgttgtggaagcgatattgcatgatttttagaggatccaacacccttctgtattacctcttgacaaatcatgggacagaacattgcaacctcttgttccacttgctggattgaaccatcagcagtttgaagccagatgtaggacttcatggtctatatccatgacaccgcgagagaaatttagtctttcatataaaatcatacatcagtagaaaaattaataactagctcacgtgaattgcgaagatgagaataaagttaatcatgagtcaaacactaaattgtaaagaatcatcaatcaaaaggtgattttggataaaatgaactcattttttcaaaaactaaattcaacccttaaacgttactagttaaggcatatgaatttattggtccttttccattagaggtgaagtagctaactaagatagtctagcaaaaggacagggatgaaattttacctctggtttcatgacggccaaatcaccttctgacattgataatagatttgatgacgcagtcttctgctattatatgtattattacaccatcagctccaataagtaggacaaaccctactatacaaagtctctgttttccttaaatcctgaagcttttcaggacaaaaatggccaaccagataaaataaatacgccaagtagcaaagtactcaggactatgaattaaaaggtcagatgacgatctcaagcaatatccagcaacttcatccagcaaggtggaaaaaaaaaca

SEQ ID NO: 31016 - DNA, 3482 bp, Arabidopsis thaliana landsberg
ctaagagttgttgtccgaaacttgatgttctctcacaaaagaagtctcatgagtgagcctaagtcttgaatgatctgcaccacagaacagaagtaagtctgtaaaagaacaacacttcagttcaggggtacaaaacagaatctgatgaacaaagtaccaatagaaaactcatagtcattagataatgtctcttgctcccactttttccatccacgaatctgccaaaaatccaacaaaaaatgaagcacttattcactatatcaaacaaagttttgatcaaaactagaatttatggtaccttgagcctgctaagcatcatggtgattaaactatatacgatatgaaagatggccaagaagaacaacaagatgtgaagttggtgcaagcctttcaatgttatgagtggctcagatccttgtttgcaattaatagatgtatcaccagcagccaaaagatgcctgctaagagatgatggagcaagtttctggaaaagctctgtgtcttcagataagcaaggtaacatagagagagcagcttttcgaggaacacagatcttgagaatatacggttctccaaaagtgagtaataaagaaatgaatccaaggatcatcagctctgtcgaatcagtcgccatttcaaaaaccaaaaccaaaaagatttaagaaaaccaaggctatatgctcacttaccagctttgattttctctaaggcttcaaggagagagtttttatgcttcttccatagccactgagaagaaacaaattcatatgtttcagacaatgaatgtttgaacaagaacactcgtaagcaaaggaagaagaagaagaaagcagacgttggcgagtctttgaagacccttttcaaggagatgggaaatgaggatgagaaaggtgcagacgacggcgactgcccaagtgggcgtctgagaaagctctttcccaccagagggagctccggtggctgtagctccgccatggaacactagaaaccataacaaagatcttcgacacctgcttcttgtgatcatgagtgaatgaaaggagaggtgagaaacatagaagatactaacgtagagaatcaaacttatgttagtgcttctttaattactacgtgtataacgtaagttatagtattagataaagaattggttttcgtttgacttatgagataaaatgaaaaaccactggtgtagtactttgaatgttcacaaaatgaaaagaaaagtgtagtttagttttgtaactcatctcatttaatcaatgaaagttacattagcaaaaactaattagatattaagaacatttgacttgtacatatttgcaaaaacataaactagtaaaactgctaatcagttcatgtttttgattatttggacaatgttgaaatattgatagtggtgaagaggtaaccaatgttacataattttcttgagctctagaaactccaatccatatatgcaattttaaattgtgattacataatcaattaaaaagagaattaaagatatgaaaaagtcctctcacctaaggaacaaatcttaaaagatgaatttggtggaagctgtgacaactaaagagtttacaacttggcacaaaatccaactgcaaacaaatgcaaataacaaaattctactcagatttgtctgtatgagatcaatctgatcctttattggttttaaaaatggcaaagcaaataagggggagagagagtgatttataatggatccttctcctacagcttcttctaatcactcttaccctcctgagatccaatctcttgtaaataatgctctgcatccaatgccgccatgcatcctgcagcatccatgaagttgtttatgaaagttgaatttttgattcatgaaaccaaaaaaacagatgagaaacatttgaagtaaacaaatcacttttagagtggcgagaacaatctgatttcagctttagttataagctgagtttaacgaacacacacaccatgcaagtgtaaatcgctaaatatgtcaggctttttcatcgtagcaagagaagatttagataacagatcttataacgagacacttgatacagttccatttcccttgcaggctatcaagacatatacttggtaaatggtaatgaccactactagtcttataaagagtatacgaatgagaacgtagatcacatacagaaaaaacacatccaaccaaaagcatgcctcatatacttttgtaaaatgaatcaaatgatatacaaaacaaggcacaacacaaggccactctacagcaaacacttatctaaccaaatgcatgcctgaacaactttgtaaaatgaatcaaattgtatacaaagccagccattttgagaacatgaaagggcctcgtcataaaaagctaacaactttcgaaaactcgcctctttttgaacagatcaatcaacaactatcctaaacagacaaacaattgttcacttaacgatatgtacctaactactccttagaacattatgctatcaggccacaagcacacattagatactcaggatagattcaaatcatgatttcaaagagctaactcgttgtgcagaaatgtaaaaatacaagttagagtacaaaccagttcctgcagcagtgatggcctgtctatacttcttgtcttgaacatctccagcagcgaatacaccaaccacgctagtctttgtagtaccaggcttggtcacaacataaccatcttcatcaagctcaagctgcccatccaaaaacttcgtagctggctcatgaccaatagcaaagaacaatccagagaccttcagatctgaaacatcgccagtaacaacattcttcaccttcaatcctccaagcacacgtccattttcatctccatacgcctccaccaccgcagagttccaaatcacttcaatcttcgggttagacatagctctctgctgcataatcttagacgccctaagcgtatcccttctatggattatatataccttagatccatacttagtcagaaaattagcttcctccatagctgaatcaccaccaccaataaccacaagaggcttattcctaaaaatcggagcagctccgtcgcatacagcacaagcggagataccacgattccaaaaaccaccattaccttcaccagatccagtgaagctaagacgtttagcaacagctccagtagaaatgattacagaatcagcgagaacagttctcgaatcagtgaatagcttaaacggtttcgatgagaaatcaactttgttaacagtttccgtgaagatcgtagttccaaatctctccgattgttttctgaatttctcaacgatatcaataccgagaataccttcagggaacccagggaagttctcgacgtcggtggttgttgttaattgaccgccgggagcgatgtcgttagccatccatccttcgaagagaagaggcttaagctccgctctagatgcatagatcgccgccgtgtgtgctgctggtccacttcc

SEQ ID NO: 31017 - DNA, 2173 bp, Arabidopsis thaliana landsberg
  unsure (1)..(2173): unsure at all n locations
atagaacactgtatcagcatctctcatgtgaacatgccaacaatggttattgtttgtttaattaagcaatggttattgtttgtttaattgagagttaagactaaaaagcatgccaacaaaaaaaaaagttgagaagagatccgatcaaatgcaagtttacttcttcttttttcctcacctcaaactaaaacgacccacacgcgcccacttttaaaattttacgaaaannnnnnnnnnnnnnnnnnnnnnnnnnnnnnnnnnncggggaggtggcgtcgacgcgcttattatgcgagtgggtaaacgacttgcgttttgtaattcaacaaatcacgcacttcactattgggccgacttttatactttccaagtatccattgagattagtttccatatgactttaggcctacatatattggaaaaacccaataacaacaatgaaaaactggagcacaatgtaatgcattaatattcatttgtggtgatagcattttcgtacatgaagcttaaactgttatatttgcagagacctgtgaaataaccagcacaatctgatcatttggcactattacattattttcaatagccctaattataggtagaatcctggatagtataatgacagtcgtaaatacctaacaaggcttctctgtcacaattcacaaatattcgcactctttaaacgcttcccaggcaactctgcaatgctctttcgatgtcatctgtgcaaatgctcataccattgatccggattccataataagaacagaatgcaacacaatactgatagattttagtattatgaatctcaatgtaaatactggattaaagcctatctttcataaagttccatagattaataaagactctcaaggtttaggaattacaaggaatgaacaatcaaaacaaatgaagaacgagactagattctcggcatctcttcgaatctattctctccatacgatagtctcatagcgactaatcctccacttgattcaacatgtctttcccccaaagccacctctccttatttatacgcaacaatcccaaagcacaaccttaacccttcatacgtgtgatccatgtcacctcatcaacctccttacttgtcatatcatcacacgtgtgtgctactttgtccttctttgtcctgaaatacaccctgtgtaacttatcaatacccccgccttcgaaatgcagcttgtcctcaagcgtaaatgcagaaccttgcttctccatctgtgccatgtagaaagggatttggtctgaagggcacaccaagtaactaagttttgaagccacattatgtatctagtgaccatgtttcctccaaagaacaatatagagttgttgttggtatttgtagtcttcgtgatatacttttgaaagagactgaacatttctaggttggaggcaagagttgtcttctgcaaagggtgttgaacttctttcaagcgatgatgagcttcgtttgtttgtaatacaactctgctattcacttctgtctttgttaaacaccttcgactaggcattgttgttagtactgcctgtccttctgttgagatactgtgatccaaaaatgcagcctgacctacaataaactgatcgcccacacaagcaatctctctaactgcgtcaagttcctgagaaccatacttaagtgcaataggagatggaactggtagaaccactaacacagttgtatcatcttcgttgcatgtatctatgtctttagttcttcttttgtgccatagatggtactttaactcatgtgcacaaactcttcttgaatgtatgtctctatgttccatcctccattgatgctgtatcaattcgacctccatcaatgccggtagaacatcatcattttgtgacgaaccaaaatttctgtttgacagaaaactgagcagaacaacccaatgaagtccacacattaaatgtaagtcctcaaaattgttacttctcggacacactctttcagaccatgactctctctgcttctccactcccagcctatgtaaccaacctttatacacaattttgaaatatagagtttgaatgtgtagccgtcttatgctcactctccattgtttgtatttgaaccgccacgacttgggagatttcctctgcttcaattgttgaatcacgtggttgtccacaagaaaaaggtgtt

SEQ ID NO: 31018 - DNA, 2414 bp, Arabidopsis thaliana landsberg
  unsure (1)..(2414): unsure at all n locations
acagaatgtgaaagctaaaaaacgttaaatcttttcctaatttccttattggttcccatccaagggtcttttgtgctaagaaaccaatacaacaatggttcgttgaatatgtgagagcaatcgatttcagaagaagggaagggatcgatggttaaccaaacctccgagtaaactttccggtaaaacgaagaagacttggctaattcctcgcatctttcacggcctacacattctccagaaacattcatcatctacgcagatcatcttcaacctctgaaactttctgcatctcgagtaatccgagtgctatgttttgggccgataagcccaatatttgatgaatcttattatggcgcagttaataattaggaacaagtatttgagtgaggacttcgagtgttacgttgggcctaaaagcccaacatttaatgaatcttattgaggcccagtctatataagtattaaaataacaggtatatagttatccttgtagccaaacatggattttcaannnnnnnnnnnnnnnnnnttttctttctctgtctcctagaagccacttcactgggatcgtctccatctttgatccaggttcgtcttcttcgtgaatcttcctgcttaattttttttttcagttactacttttttttggttattgttaattttctctgatggaaattctccgaaattgaaagttgttagagccaaaatatttgggaattcaaaaacatttcgatgatctgaatgaggtcagatcgctgagaaaatatgggattataggttattttcgttttaaattttctatgttttgtatgtttgcatgatatatatatatataactaagtcgttacttgattagccatttttgacttatctactttctttttatgttgctgagtattttattgtgttgtttaatggatcattttcaggttcagagattaaacaatttgaaaaatcggagactctgggattgtatggttcgttgttactgatagattacttaagctatggtttggtttagaatcggttcttctgtggcaaagcttgccataagaaggacactgtctcagtctcgttgtggttcatatgccactagaacaagggttttgccttgtcaaaccagatgttttcactctacaatactcaaatcaaaggcggagtctgctgcacctgttccacgtcctgtcccactttctaagctaactgatagcttcttagatggaacaagcagtgtgtatctagaggagttacaaagagcttgggaggctgatcccaacagtgttgatgagtcgtgggataacttttttaggaattttgtgggtcaggcttctacatcgcctggtatctcagggcaaaccattcaagaaagcatgcgtttgttgttgcttgttagagcttatcaggttaatggccacatgaaagccaagcttgaccctttaggtctagagaagagagagattccagaggatctcacgccaggtctttatgggtttacagaagctgatcttgatcgggaattctttctgggtgtatggaggatgaaagtatcgaatccaagatcggtgattacatcaacagcacttgctacatctactccagcataagtctccactctcctccctgacgattcagaccatctaccttggaaatagaatctcttagaggtatccagaaaaacctgtcttttaactaaattcccaaaagaatgcaacttaatcacatcgtttacgccttccgaatacacaggcacactcgatttcacggtgaaaacacaatgctttaatcgaccattatgttgtttaactatctcatacccctgcaatcaaatcataacaaaggattcaatcaacaattaaggctttgcacataaaacttaaatacataaaggagaggtttttcagtcgacagatacacaagtaagcacaaggaagaaaataccttgggagaggggcaacaagagatggaccctaacatagtactgattgccattttgagatgaaacccacaaactaaagcctaaaggcatttacttttgtaacccataaaccctaaagactcaaactttaagtttggataatatcacagaaccaagtttccgaaagaagaaattgactaaagctgaggaagacaatagaccacgtcgtcagagacgagaacacctcgtgtatttctccagatatatacgattctatatacatatacaggtatagggagtgagaaagagagggaaattgtcaagtctagagagataaaatattctctttttttttttaatcttgttatgttatttttgtggatatagctaaagacttcactgacattgaagcgttacaagccacacagacagattctgattgtggaagaagacaatcctttggttcttctgttgcgaactattaaaccgttaaccggtt

SEQ ID NO: 31019 - DNA, 4918 bp, Arabidopsis thaliana landsberg
  unsure (1)..(4918): unsure at all n locations
aaatattatacccgcaaccccaccttttatcatgcattgtttattaattttccgatcatgggagcataaatagtaatatatccctaaacaaaacgacttacattacaattttatgaaggatcatttgatcaaggattacaatcaatatctatgttttaagatttagaaactactttttttctttctaaatttccatgtttaatttgtgtggatttcatatttttttactataattttttttgtttctttagtaatataatcaaatctgtttcaattcatttcattgtaaagaccaacattggattatgttcgaatttatattggcactaatatccatgattcaatagtacctagacagtgaagatatttaatgaatttgagctaaatattggctttttagcgacagtgatagtgaggaaaaaaaaaaataataataataatcacagaaaagaaaagaaaaaattgtttcttttagtttggaatattggctgcacatttcagaaaagaaaaaaaaaagtgttagaatttttgagcaattttaatcttgagctttatcagctttaccaacaaatccattatctatattcacagaagaatcatcaatctcaggaggctgactcaaaccagctgtttcttgaagaatctctgctgcagaatctgagtttgaatcagaagctttcatttgcattggcttcatgagctggacttgtttttgtgttgcagcagacactacgtttatatcagatgctttcatttgcattnnnnnnnnnnnnnnnnnnnnnnnnnnnnntgtgatttcttcttgagcttgtatctccattgaatctctgaaaactttacttagaaagcttacgtcgtcagacattactccaaatcctgttaacagcttcgaaccgagctgtaaacttgtctgtaaaccgaaacaaacaaaactcgttcagaaagataataatttcggtgtgatcaagaaagagaaccgttttcgaagtttacctccgcattttcgagaattgcatccgtggctcctgctttctttagttcaaggagatgcggtaaatcttgagctcttgcgtaaatcggactctggtaatatgttaaaggaacagttgttgtcacttaaacttgatgtctcaaacgattttattgacaaaaggaagaaggaagagagaaataaccccggggaaggcaagacggagtctttgaacagcctcagtagttctcttcttgcctttatacattatcatgatagctttaggagatgaaacccctgcagattgcaaaaccgatggtcgagatccgtctccatacaatatcgggaaaccgagtttccttgattcctaccaaaccaccaccataaagaaaaaactagtttagaatgccaaaaatttgatcaggtcaggaacaaacaaagttatctgttacagaccttcactacagcaggattcagatcaaaaccaatataaggccatcccacaagatcactatctgagaccaatggcgttgacaaaaaattggccagaacctgcaaaatcatatcgactcgatgagaaaccacttaccacaacttttccaggaaagcaaatgatgacttttacctgacccatttgtccaaatccaatgatgacaattgattcactaacatcgaagttcacatcttcacctattttctgcacaattgtcaacagattcaagatgaatgcaaattttatttttcatataaatgcaaaagtagaaaatttaaaagttacctctccgggatcaagtctctcatcaagaaaatcggcagcttttcttccaagttggttaagataaggtgttaatgccatagacaaaacaactacgataatgagcagcttgttcagctcatttggaagcactcctagcctgcacaaatgattgtaacaatcatgaccacctaattagtgaggaaaatgtcgaaactaatgaaataatgaggagatgtttgagcaataatattggcagttagaaaaacctgttggctagagagaacacaacaaatgcaaattctcctccctgggaaagaagaaagccaactcttacgctttcttgtattgtgaggccaactcggggaccgattgcggttataattagtgttttgatcacaatcagaccacccaagagtgagaggacattaggccattctcgaaacaaaacctgcaagagattttaaccacaagagcatgagcatgaaatgtatcatatttttcagcggaaacaactgagttcttatgcaatgcagtataacagtttacctccatgtcaatggaagttcctgtggttacaaagaacaaaccgagaagtaaacctctaaatggcctaatatcagcttcaatttgtgttcggaaatttgtttctgctagaagtgctccagcgagaaaagctccaagcttcagagtaaaattgagttaggacattaaagtaaggataatagatggaaattttatttttgtaggggtattaattctaaccgtatcgctgaaaccaagccattgagtcacaagtgaagtcccagcaactgtgagaaggcaaagggccacaaaagcttctgagcttcttgtttctgcaacaacctgaatattgttttgggcttagtatttaagcactgcaccaaataaaacagtgtcctgtattcactctctaaaaaggggggattcaaaggaaagggttttgtcaaactataaggacacgaaataagttacctcaaaaattctacggagaaagaactttcctccaagagagaggatgcccaacccaccaagagcctttgcactttcttttgcaagcattggccatatgctttccccaccaatatcctttcaaaaacacagagattcagatataaacaaaggtttaactgatactaataaaagttcaatgcagcttttatagcttcttataacagacagtccacaaaagcccaagaaggtgctaagccgataaccaagttacctggctttccaacactggaaggatgactagtaatggcacaacagctatatcctgcaagcaatgcaaggagagtaagcgaaaaaagtttgtctacttcaggagtttgccaagatttttgcatatcttggatgaattttcaaagcaggagattcttttcccaaactcatatattcatgtcttatggagtatgggataaaaattcatagaatagaagatagggattatacaggataagcagaacctgtagaagaagaattcccaaggttgctgagccaaatcttgtagggagctcacctttctctgcaagaagctatacacttcgaaattgtcaataagaatatactaaattcttgatcaagtttgcctctcctcattatcattctagatatagatgactaaaagttattgcaactgtgctaatacctgtagaacaaaagctgaagatgacaatgatagagcagcgccaatgacaacggcctcgtcaatgcttctaatgtttgggaaaaccccccttaaaggaaaggtttttntgacagnnanaagtaaatagatcanntattaaggatttaaaagctctaaaaaagcccttacaaaaagcatcagagattgacagttataagaccatgatcacactgggaaaagaggcgtctgctaaatttgaaatacgtgatacaaaaggtactaaaacgataagagaatcatgataataccccaagtgaaaaaatttaccaagtcaggccttgaatgaaagaggaattcaagaatttttgttccgatggctccatttggtgggagttcaaaagcagtgaatgcagccgtgcataacaaaacctttgaaacaatgaaaagggtcaatgaaaaacagtacaaagtaaggtaacgttaaacaaacgatgtatgacatctttgcggacaatgatctggcaattatgatatggtctataaagtttcctaacgaaatcgggtcgtaaagatcattgatgactctcgagatgcttatctgacagaagtgaaaatataagaaggaatgtaaggagtttaaagcaaaccaagaaacatcttttagaaccaaacctgagttagtcccatgccaaaagcaaattttgcaagagctttcagacgagcaagtgaaagctcgagacccatctcaaagagctgccaaagataatcaggataagcccagtcattactactcattcaacacgtaaagcctatgaacataattatgcaaaatgctcaccaggaaaagaatcccccattctgaaagaactttaacatctgtgagatttctaatcaaaccaaattggttgagtacaacaccagcaaagaagaaaccaagtatctgggaaaccaccaaaaacacaaatgttatcgccaagtagttataaccgagaatacaaagcaacttcttgtagctttttgttgtaccggactagctttgagaattctgaatgcagggacaataataacagtaaccatcaagaaggtcaaagtatcgaatccaagatcgttgattacatcaacagcacttgctacatctactccagcataagtctccactctcctccctgacgattcagaccatctaccttggaaatagaatctcttagaggtatccagaaaaacctgtcttttaactaaattcccaaaagaatgcaacttaatcacatcgtttacgccttccgaatacacaggcacactcgatttcacggtgaaaacacaatgctttaatcgaccattatgttgtttaactatctcatacccctgcaatcaaatcataacaaaggattcaatcaacaattaaggctttgcacataaaacttaaatacataaaggagaggtttttcagtcgacagatacacaagtaagcacaaggaagaaaataccttgggagaggggcaacaagagatggaccctaacatagtactgattgccattttgagatgaa

SEQ ID NO: 31020 - DNA, 909 bp, Arabidopsis thaliana landsberg
gtaatacttatttctatttagagtaggagtattttgctacttgtgtctaactccgagtttaatttgattttctgaatttgttcagatggcttttgagctgtatgggatgttggctgggagtgttagtccaatgacaggggagcatgtaaaaccggcatatggtggtgaaggcgaagctttcctgcaaaaagtagtgactcctatatacaagacaatagcaaaggttggttgcttcagtttttcagtcttgatcattttgtcttctttagttttcctctgaaccaattccttcattttttcatcttcatatctgtgcactataggaagcaaagagaagtagaggaggaaaatcaaagcattctgagtggagaaactatgacgacttgaatgaatatttttggtacaattcattgatcatcttgtaacagactggaaatacacgtcttttacatttcttcatgatgattctccatgtattttaactggtaggtcaattcggtgctttcggttagggtggcctatgcgagctgatgctgatttcttttgtcagacagcggaagaacttcgacttgacagaagtgaggtatgggtagaagaaactaattgatggttgttcaaaactgtttgcaactttatgtcttatggaacacaaatttgttaactaagtgtttaatatcaaacttaagttcgatcaaccagcttaagctgttcataatgtctgttagaggaacatacaactttttgaacttcaaattgtaatttaacaagtcatgagaaacgttagatagaagtcatagaagaataccatttactttcctcgagttttgtgtatctagaatttcatggttgatgttcacaatgctgcagaataaaccaaaaactggagatcgatggatgggcaaagtcaat

SEQ ID NO: 31021 - DNA, 883 bp, Arabidopsis thaliana landsberg
attataatttacgttacactttgtaaaatcagaacgatccaattcacaagattaatgctacgactctgtttatttctttaaaaataaatcaataatcatctccactaaacctctcaataacttagcagtcttaatgaaatttaaagctaatctatcaatcacattctcaccacgtcgccaaactcgttgccgtttcaatcttttcaagttccctttcatgctgtttataaacccttgcactctttcactcacagactcactacaagtctacaccacaaacttaccaaatcatccaaaaatggcaaccaaaacttttctctactgttctctcttagccgacagcttcttctttgcttccaattcttcagctaaccgagagaacttaaccgtcgagctaatccaccgtgactctcctcattctccactctacaaccctcaccacactatctcggaccgtctcaacgctgctttcctccgatcaatctcacgttctcgccgtttcacaaccaaaaccgatctccaatccggtttaatctcaaatggcggcgaatacttcatgtccatctcaatcggtactccaccgtcgaaagttttcgccattgctgacacgggaagtgacctaacttgggtccaatgtaagccatgtcaacaatgttacaaacaaaacagtccactcttcgacaagaagaaatcttccacctacaaaacagaatcttgcgattcaaaaacctgtcaagccttgtccgaacacgaagaaggatgcgacgaatctaaagacatctgcaaataccgttactcttatggagataattcgtttaccaaaggagatgttgcgaccgaaacaatctccattgattcttcctctggctcctctggttctttt

SEQ ID NO: 31022 - DNA, 4395 bp, Arabidopsis thaliana landsberg
  unsure (1)..(4395): unsure at all n locations
tgttactagctttgcagcagtgtagctgaaaataaccaagtcgtaaactgttgaatcactcttgcagcttcaacggaaatcgtaacttgtgtggaaaacaaatcgatattgtgtgcaatgacagtggaaattctacagcttctgggtctccaacaggtaaagcaactgtgttttaatcaatttcttgtcaggatatatggattataacttaatttttgagaaatctgtagtatttggcgtgaaatgagtttgctttttggtttctcccgtgttataggccaaggaggtaataaccctaaaaggctgcttataagtgcttcagctactgtgggtgggctgctcctagtggcgctcatgtgtttctggggatgctttctctataaaaagcttggtagagttgagagtaaaagccttgtgatagatgtcggtggaggtgagccatgctgactcatattgtagatattctctctaagagttatatttttctctcaaaacttgacaccataagagacgattttttctatccaggtgcgtctatagtgatgttccatggagatttgccctacgcttccaaagacattatcaagaaactggaatctcttaatgaagagcacataataggctgtggaggctttggcacagtgtacaagctgtctatggacgatggcaatgtttttgcgctgaaaagaattgttaagttaaatgaaggttttgatcggttttttgaaagggagcttgagattcttgggagcatcaaacatcgttaccttgtgaatctacgtggatactgcaattcacccacatcaaagcttctgctatatgattaccttcctggtggtagccttgatgaagctctacatagtaaaccctcaacttcatatttacgggtttccttaacggagaattatgattctattaagtgaaatttttgaatgtgtagagagaggcgagcagctggattgggattcgcgagttaatatcataataggagcggcaaaagggttggcatacttgcatcatgattgttctcctaggattatacaccgtgatataaaatcaagcaacatcttactggatggaaatctggaggctcgggtatcagactttgggcttgccaagttgttagaggacgaagaatctcatattacaaccattgttgcaggcacattcggttacttagctccaggtactcaattacacagtaataacaatgcttattacttgttgttactatctgttaggacctaaatccgtgaactcataatgagtgttttttgcagagtatatgcaaagcggtagagcgactgagaaaaccgatgtttacagcttcggggttttggttcttgaagtcttgagtggtaaacttcccacggatgcctcattcatcgagaaaggctttaacattgttggttgggtaagcataacgagatccagcttagataataatattgactagtaaaagcttaaattttgttttttataatcttgcagctaaacttcttaatcagcgaaaaccgggcaaaggagattgttgatctaagctgtgaaggagtggagagagagagtctcgacgcacttctatcaatagcaacaaagtgtgtgtcgtcaagtccagatgtgcggccaacaatgcacagagtcgtccagttacttgaatccgaagttatgactccttgccccagcgacttctacgactccagctccgattgatctcacgttcacaaagtctgtctgccttctcttttcagagttccttttcagttttacagtacaaagttctcgagccattcatagtcggtaccttttttttttttttttttactttgaattggtagattggtgacacgcctcaattgatctgatcatgagattaaaatgtatatgaccatctattgtagaaacactgttcctaagaatctgaataatttctctatcataatactttcttgtttgctttcttaagttttattatacatgttgtgtacttcggaactagttgaaaccaatcatataatatcgatgagaagatcaatatagaaagaaggtaattatttttactagcaaggataatttttaagctttgattctgattttacatctccataacaaacaaatgattatcatggacaatataaaataagctcgatacgacgccgtcaaatcacaaattcgcagagcaatccatgtgttgaaacgacaccgtcctcgtctccaagtcatacccaactaggaaatccatctgagcaaagttcccatagatggcaacctcggtggtcggaaccatactcaagcaaaccatgtcttcactcagtttcacgaatgcgttgatcggactcagcctcacatctgcacccgtgaaatgcaccgttatctccggcaaaccgatctctgcacttccggatttgaaacagtgagacaaaagcccttgtggatcactcacgcgcttggctccggtcactgattcctccaccgccgagctaaatttgtcaaagaaaccagcttcgaggagggtcagtgtcgttccagagtcgatgatgatgtttccagatgtctccgagagtattccgtcgtcgtttgggttatacgagcttccggtgtaaggaatctttttcttcccgacggagatggcttcaagcgtcaagtagtagtaagtaagaggctctttatcgaccaacggagttgataccacgccggagtctttgcttagacttgaaggaatcgagttagtgcctaggtttatgacgcttgtgccattcgtggtagctgacttgtgagacaagcaataagaaaatttcttcgaaatcgacgaaccgagctgggagattagtgataaatgaccaccacctagaccgataatcccagaaccagtctcgtcgaaggtaccaccgttattgtagccacaaccgaagacagtaccaggaaaagaaacaggggaccctgaagcagagtcaatagagacagtttccgtggcaacgtctcctttgctgaacgactgatcaccgtaagagtaacggtacttgcatatattgttggattcatcgcatccccgttccgtactggacaaggcctggcagttacgtgagtcacaaggctcgctcttataagtagaggatttcttcttgtcgaagattggaccgttttctttgtaacattgttgacaaggcttacattggacccaagttaggtcacttcctgtgtcagcgatcgcaaaaacctttattggtggagtaccgatggtgatactcatgaaaaactcgccgtctgctccgattaaaccggattggagatcggtttgggatagttggtggttgaagcggcgggaacgagagactgagcggaggaaagcagcgttgaggcgatcagtgacggtgatttgtgggttgtagattggggaaaggggagagtcacggtggatcagctcaacactgaagttttttgggtgacccgatgaagagagagtcaccgagaagaagaggaagaaacagagaagaatttgggttgccattgttgattagttttagaaagtttgtggtggaaagagtgaagtggagaagaggtttttatacacaacaaaattggggaagtgaagagatttgaaactgtaaggagttatagctacttgagtggggaggtgaaagtctgaaatgcaattcattagctatcttttaatttcacactaaggctgctaatttaatttgaagctcccggggttgaggggaaattaatatcaacgttttcatattgggacttggaagattagacatttatcatcttaagagcatatcttgtgtgagtatatgtatacaccacactataataccagatataatcatnttggttttgtgtttcctaattttacaataggcagaggaactcatgttatgtcatataggaccaggatttgccatgttgctcgataacttcaaaagttcaaagtttaaatcatttgttgtggtaatcatgtaacactgagagtacttttggccgtgaggaaaacatgtgattaagttgagggaaaataattcaaattcagttggcacggagaaaagggaaatgtgatatgcttatattagtaatgcaatggcttggtcacatggtaatagattcacttaattcgaaggtgcatgctaaatcagaacgttaatcacaatgggaagatggacactagttcaacccctatggctatatgactgaaagactggtcaagctgcgtactgaacttgaagcttctgagactctttccaggtactgtcatgaggatggtcagattcccattgttgctgtccccagttcagtctttagaggggtcttccacactgtgcaggctgtataaagcaaataagtcaaatctcggcctctcagttaatgagtatattgtgaaaaagaccatgtcat

SEQ ID NO: 31023 - DNA, 1992 bp, Arabidopsis thaliana landsberg
  unsure (1)..(1992): unsure at all n locations
gtcctttactatctgtttgcttagtttcgctggtctaaatcctgctcttagaatcctaacctgccattgcttgtaggtctctggccttgcaaaccgctcagacccttcacaggctatcacactcattgcatctcttatgattagttccctctccaccagtgtcctgcaattgtcgtcttctgataatgtggtctcatacatgtcaaagagtgacgagcaatggaagagagcttctctgaaccttgttaggaagaagggtgaattgtaagtcccgttaatctctgcaaacacaaagaggtcagggttgatgtctctgaatagtttcagagccgtgtctctcggtgagttgagggatacggtttcatcaggtgtatattgtagccggaggatgcagttgacaactgttgtctcgccactattgatcaccagatcatcaagagttatgttctcccaattcttggctatgaaactgtactcaaacgggacattgaacttgtcacataacctctttagtcttcgcccggactcttctacccgctctgatggacggaaacctgactgaggaagctcgataccagtcacacggagcagtggtggaccgatgtcacgttttgacaaagcttgtatcagacaaggccattgaaatccatagagaatcccaaaatcaatgatgtgaagtgtggttgctttggaagcaagctcattgattgttctgtttgcagtgaaataacacattattaaggtgggcaagcctgaacaaatcccttgtacgccttcaaaatgtccaccattgatgttctgctagaagtagcagatattggtgtagtcatggttcctgtaatacgagcttcaagcgcctcagcaaagtgataaccaagtctttgagtcgcatcaccgtggcgagaagagtgttctcttatctccttcagtttctcaaaagctcttctctggtcaaaactcgccacnagttgcgcgcattgcatcaaaagattcctcatatctactggctgatctgacttttgctgcttgtatcgattcgatgagccttttacgtgtcttgttttcttctctgttgcttctccctgatcattcttttgacataccaacaacacttcctcaaacttctctgctaactcatccaccgtagaaatcgcagggagcttcgatttccttccactctcaagatcatcatcttcatcatcatccctatgtcgataccttctggtgactcctctgaaacttcaggttgatgcaaactcgttatagaactgaagtttccaagagaaccatcctctagatcacccgagattggagtttgatcttgaagcacttcgaagaaagatctctctgcggcttgtaaagccaaactgtcttccaacatacaagactgaccttcaagatcttcttccatcaacatgtcattgatgtacttaaagacaggaaggtaatctgaacataccttagactcggtcggagaagggttgctctgagattcagattcgttgaaacaagtgaaacgattggtcgtcccagattcaagattgttcctcggtttgcaacaagatccagaaccggtgtcgaatctgaacccatcaacgggtactggcaaaatagcatccatgaaacagaatctctctagaatgaagattgaaacaagagtactttagtaagtcaacgaaaagaggaaatgaaagagagtagtgagaagtttcatgtgaacacaagttgcgagatgttgttgatataaacaaaggatagggttgatatttgtcttatttaatctttgtcttggcaaagaagaaaaatgaagtttcgaggaaacagagaatgtgtggggttgaagataaacactaagccgccacaaaaggttagtaataatatgtccaagactttatctactgtcgtgggtccaaatggctaaaaagctatatgatttcttggtggtgtcttccttttggtcacttgtctggtaaatatttgacttattagtta

SEQ ID NO: 31024 - DNA, 4059 bp, Arabidopsis thaliana landsberg
aagcacaaaaccccacagacctaacgtcttcaatagcttctcatgccgagcaaaatctagggttttacatggagcgaaagctatcggcttcaaagttttcaaaagtacctcaagtttctcttttgacttctctagctgctttcgtttcttctgattccctttcttccgctttggtccacctccacggcggtaataagaagagcttacggcttgcgtcgtgtccatatcgtcctcttcgttcctactttcctcaagcgaagcttctaattgctgatctctaccgtcggactcctccagatcctgcaagttctgcgtttcttcgtcttgtgttgattctaaatttaaggctttttcagcgacattctccacggaaagacttccttgctctactacgctcggcttctcgattaaactagggttctgcgaaagagtttctgcatctcgatcggtgggatctgacggcggagaagaagccatggctgatcttctcctcggaaaagctaaactgaagaaaattagacggtcgcgagacaaaaagcctttctgaaaggaaattaaccaatcacgaagagccacgtcaataatccgagcacttatttttcattggccagtgccccaaggcccaaacactcatttaccattatttcatgggccaacatagaggcccaatttagcgctaaaatccaagaattacatgatacacccgaatctttctctttttcacgaaacattccaaaatattctcgagtctattcagattcactctcttgtcactgttagatcttccagtttctccgatacctttaacggtaactttctggtgctccactgcaaaatcagcggttataaaaaaaaaactcaaaaccttcttctcaacactcctttgcttgatcttctccctctctcgttactctcttcggaaatgataatgtctctccctcagtgttctcatctgcgtctctctattctcgctgcgacggcggcgatgttaatggtgattacgactgcgcagatcggcggtcaagtgatacaggtggagttatggtgtgtggcgaagaacaacgcggaagattcgtcgctacagacggcgattgagtgggcttgtggtcaaggcggagccgattgtggtccgattcagcaaggtggaccttgtaacgacccgacggatgttcagaaaatggcgtcgtttgttttcaacaattattatctgaagaacggcgaggaggacgaagcttgcaatttcaacaataacgctgctcttacttcactcaatccaagtaaaaagccttcttctaagaatcgatatcttatatctgctagtgtagtgtagtgaaatcaggattatcatgatgatctcttttgaaatagaaattcaagtcttagattcagatacatatgtgcatcttgttgaagtaattttccccccaatgtgtgttttcaggtcagggaacttgcaaatatccttcgaggtaatcaatttcaaactatctttgtgatttgaattattcaatttcagtttcctcaataagagctaatcctattttggtaataatggatttggttcttagattgttcaatacatgaatgtatgtctttgtttatacttgtgtgattctctgtgtagctttgttcactgatgattcaaatctatataccttatttcaacaatactctttaaaatcttatgatgtgcagtaagggagccaacaatggtcgattagcggatgacacttcaatgggtgcaggacaagcagatatgagccgtggtggcagaccgatttccagcagttggatggtgaccttcatcggtttcggtagcttattgacgatgacatggataattcatcatctttaggctcacacgcatgatgctctcattgatgatatgagagacggatactattttgatctctcttagtttacctttgaagataagcgtaatatctaattctttttttgtctggcattttgatctttctttctgtgaatgaacttataaggatgtaatatcatcaaccataattgtttaatcgattcaatgattggtcttttatcgttagagatttcatatataggttcaattggttttctttcacgattgcatgatttgatctttcctacttaccgaattggttaatagctcctcgattgccactagtccactatcccgactcaccatctttgcttgagctgataggctttcccaaagccatactgtctcaacaccatcaggtagctgtcctgatgctaccttttgaggctgtgataagataacactgcagtttcctttcgaaaccaaaacgcgaatagccctcaataaccctgtatatgtcttgagatgtctccgacgatcagcatcaaattaagtggtgtacttccacctctaaaaattgtttggcctagtaagtctactaaaatcctgtcacgtgtattttctttagcaccggaaatatacccaagtaaggattagtaaaagagaagaagagatagagatagaacctaccgtggaatcgacttgagggatcagggtcggctcaacaaaacgtgggaccctgtgctcattaatttgttttctaatatatgttctatatgtttagattttagtttgattatacactattgtttgtataatggaccttgattgcttaaagaaaatgaatgaaaaaataaaggaccctgtgcactagcaccaacggcacaccctctaagccgggcctgcgagggatcaatcatgtttttaacggattcaagacaagagagatgcggaagaaggcagacaagactagcggaggaaagggttgttcaatgaaaccaaaactacagtatgtgtatttgtctttttaaattttaaaagtccaaaaatcagacaaaataaaataagggctggttggcaaaaagatttagtcaatcccgaatagagagttattcgcgtttccaaacaaactctctggctttacactcgacggactacgaataacgacggtttgccaaatctcttccatctcatccgccgagcgatattggtgagttttttctcctctttcgtactttgattattttgatgtggacgtttgggaattagggttccttctgctactcaaatgctgacaattttaccattctcgtataagatttaggatcgtattttggggattcttgtcgcataaatcgttcaattttggatccgagtatcgtatctgctcacaatttgtttatgaaatctatacaactatgaaagatgcacttggtttttgagattctgtgattgagctaatgcttcattaccttttgttgaaatctttacttatgtggttaagctttctctaaacagttgatagctcaaaaaatggaggacactgggagcattaagcaagaagcacagtctcatcctccagggatcttcgagataccgggggagcctgcggttgttatcaatggtgtgcctgatgaacctcaaactgattgtatgattgccaaagatgaaccaatatcaagtggcactgtaggaagcggggaatggcttgagggtagagaagttcgcaagtttttcttgggtcgctactattctggtacggtgacaaagttcgataaacaatctggatggtacagagttgaatatgaagatggggattctgaagatcttgactggtctgagcttgaagaagtgcttctacctttggatgttactgtcccattgaggtctatctcattgcatatcatcaagaatcgacaaatacatgcccagctttatggatacacgccacaacgctagaccaagaactccaacacaaatgcgcagagtgaatatggtgaagcaggacaaagaggttacactcttatgccttaaaattggaaacatttgaatagtcttttgaaaatgaatatattagaagactagtatgtactagtggaatcatggaatggtagatacattagagataagaaacgttttttggtaacacgattatcacaaatgcttaaccaattttaattagatgaataacgtttcgttttaagtagagtcatgttttcaaaatgagtctttatcatatacgtgtc

SEQ ID NO: 31025 - DNA, 6533 bp, Arabidopsis thaliana landsberg
ttctccaatgaataaggcaagtaagtgccgagaatccttatcccacataccaaagaatggctcccagaagttgtatttggttccaaaaagttggtggtaaacatcatggtaagcagagttattcttgaagaagatgtgaaatggatttcccggaagccatagtccccaatgatcatctactgttttgatggtagcgaaggaaaagaaaaagatggctgatcttggggacataccagagaagaggaaagacaaagcaccaccaatagtgtccaacacaagaccttctagtggatggttgtatagagctccatacgaataaggcacaataaggcgatgatgctgagagtggatgtgcttgtataagaacttgttgaggtgcatatatcgatgaatgaaatattgccaagtgtcaattacaagcatagcgatgataaactgcctagccagaagtagaatggaaaattgctgtgtcgtagcagcatctgcatcacttcctgttatctaaagagaacaaccaaattccaaacaaaatatttcaggtaaacaagaaacaaatgctccaaaatgctaatacatgaagctctatcaacaaaatatccagagtgtaccataacatgagaactagaaacctcaatcaatttcttccaatacagagaaacatcacaagctcacgactctgaaacacacaaatagtgagaaattccaagactatctataacggtctccaatgcaagagaacaaaaccttgcacatgtgaatgatgaagggtaaagattgtattcctctaagcactattagacaagggaatcacaaatctagacgtaaaagcttttctaaagtaacgccttatgttcaagaatttcaagtgaaacaatctagcaaattctctatataaaacagcaagaagcaggagattcaagttttatttcatcaaacaatctccagaatctaaactattcttaatgcagcctaaatctgtaaccttgatccaacagcttcaggacaacaaaaggtgaattgaaatcagaaaacccctaattcattctcatcgacctaagttcactaaccacaaaattagattaacaagaagcacaaggaggacaacaacattattagcataatccacaaccaaaatcctataacattcacagatttgccacaatgttcaaagaagggagagagagagagagattcaataccttgaagagaataacggagataatagcctgaagagtctgttgaagaagaacgcccttaacgacggcagatttagaaacgagattcttctgatcctcatctatcttcgaatgcaatctatatttatgcaaagatcctaagcacatgtacatccctgaatacacccaatacaccagaatcggcacaaatgtccccagaaattcatctgaaatcacgaaactcatcatctctaattctaatcaatctgtgccccgcacaacaactcgagataacgaaatcaaacgccagaagaaaatcgcatgactcttcgctaaactacacgaagaagagattagattataatcttcttcttcgtcgcttcggtgttttctctctttctccttcgtcgcgaagaagaagaggagaagaagacgcagaggaggagatgacgaagagatctaacatgatttatcaggtgggacccaactattcggaattttccacgtggctttaaaggaatggtcaaggcgcgccaactggtttcgattttaatgtgtgctaattaattaattaatatctctaaatatttaataatgcgaatggttaaaaagtatgattagaacacatgccaaagaaacataaaagcctaaaagaacaaaatcattgatttgattttgcctctctgttctcttatctgtacaattgtggacacatttggtggctacctcgtggggttggcagtaatgtggtgtttatcgtttattaattgatatttctataaaatatgtaaaaaacattaactcattagtagtttaattagatcttctctgcttgatttccgattcagattcaaaacaattagagaagtagcaaaaaatgtgtgtaagaatacacaaatatattgtctaacgaagataacatactataatgtctaatataaaataaaattacaaccaaaaatagaaaatggagcactaataagatcgcgtaagtcaataacgaatctagtgttacaactagtagtgcacaagatgtagtagtaactctttcataacaggataagtaacttactttgcgagggcagccaataatggggactagagtcggagaaccacaaataatgaacttcaagactctgcttttgttggctccaacgactcttccggacctccagcttcctcaacaagctggttaaaaacggcacagcaaataacggttaatagtgagaaagatgctatcttaagtcctgtagagttagtcagtgagtgagattagagggagtgaacataccaaagaaccgacttgctcataggctctcattgctttcggatcttcttcatattcgtatcccaattgtagaatccgtgggccgttgactgaccaaaatgcccttcgacctgcctcctgcaacatcaaaagtagttttgacataacagaggaccttttgtaagttttgggtttgattggtccttcacaagagttcacaagaagggaaagcgagacagagaaatgttttacctctaagatgatcaaatatatagcttcgagtgtctgaacgcgaatgtcaggatcagtaactggttctcgctcaatggacagtgcacttccaagctcaggtggcatttttgcgacatcttgctcactgtatgtctaaggaaagtaaaacccaataatcagaaactattttctcataaaagaagaaaacctttttaagcaacaacgtagcagctataaagcaaaatcaacaaaccttgctgcctgcaactggtaggagcagagcgggccaaagaaactctgatatcaagagtatattctggagttggtttttggcttcaaaacaacagttacgaatagtcccagcaacctgaaagccgataagcataatccatgttaaattgttcaaagggtatagactaagcaacatgttcattaaagagtaatctgccaaactccttttaaacgtacccctttctttcgcaactgatttgttgaatcaaactgcctaatgatctgttttaatagtcgtctctttggctccagtaacaatttcctcccatcttctgtttttgatatgttgacaaggatcgaaccaacatgctcaaactgatcatctggtgcgcaaataaaaacaatattcagtaattcattcctctgtttatacagtagctatgaaacttgattgcaaactaaaaaaactaccagtaagtaactacgcataatattcaatggtgccaatgcaaacattaaaattctagactgtcctaccgaggattagatttagatatatgaaacaaaaacttgatatatgaaaagaaaattccaagctatcatatctagaagtagatatatatatatataaacttgggcaaattatattccaatactaaagtgggaagtacataccagcagtttcaccagaagacctgcaaaatgacctaacaagcttcatgatatgtagtccatgcatcttctcatcgtcaatctaacaaaggcataaagttttacacgattagctacgtcaccattagactaccaaaagataatccccactatatatcacacaaatttaacttatgataaacgacctgaagcaaagaagaaaccccatcatccaactgagtaagattcactagaagcataacaagtaatctggtaatacatgactctggcttatacaacatgtccatggccactttaatcaaacccatttgaatcatcttctttgccaattcacacttctgagaaagattaacaagagcttgagctgctggctctgatacctcctgcaaaattgaattcaaaacaacatttcaatatctctcaatccaaattcaggaaacaattagtgcttcttaagagttgattcaatgaccttgctttcatttagaagctgagacaatgatggaagaagaatctcggaatactttgatagagattgtaaaccttcctcggaaccagttaaaccactaacaatttccaccgcagctttcttcacctacaagtttgtttcttcattcaatcagactcatcggttacaaaaaccctagaatctaaaattatcaatgcatccccatagctcagaaacagatgaaaccaaaaagcttacaggcggtgaaggagatgacaaaaattcgacaagctcttccagctccgtcaccatatctccgaggaagaattttccgtcgagagagagagagtatcaacgtttctgcgcgtaaatgtcaccgccggcgaacacgaaaaatcctcagggtttttgttgtacaactaaactaaacactctaaattgttcagaaggtttaaaaaaaccccaaattcagtaatattgcaaaacaacccacagactaatcaaagttttcataatcaccttccaattaatagtaatacgttttgggttattttgtcaatattttagttagtttgaggattgttttaaaattttacctaaaataaaaccagtttcatctttgagacaaaaatttgtccgtggaagaaatcttgacattttcggatttgacaaagatggaagcttgtttgagatgttcacgaggaagctatctaattgaagccatgagaccattctccagctctctccggccttcttcttctgtctcttttagcaccggttagtttctactttctaatccttctctgtttctcaattaaaatgaccaaaattgaattagagtctgtgagttgcattttgattttggaattgggtattctgtaaattagggttcttattgtatgtctgtcaaactctgaccattttttttacttcaattatttgggcattgtgaaggcaagccaatcaagagagcttatgatggattgttgcttgatgctggaggaactcttttgcaattgtcgaaacctgttcatgaaacctacgcttccttgggccaaaaatatggtcactttcttacactctttgtctttgatctgttccaaaaccaatttcagatgttctcatgttggcatttgtttctagttcaggtctcaagacaactccagctgagatcaaggaaggtttcaagagagttttttctgccccttggcctgagaagttacgttaccaggtccctaaatgcatgtgtgaatctctctttgtaatagattctatctttgctcgttactgtaagcaaacgtattaaaaaagaacattctttcattgttagggagatggaagaccattctggaagcttgttgtttcggaagctactggttgttctgataatgactacttcgaagacgtctaccaagtgagtatcgagtgaaagactctttctttgaggcttttgactagtctttcggttccattaacaatccatcacattgttttatctcttaagtattatgcgaatggcgaggcatggcatctcccagaaggagcttatgagacaatgtcactactgaaagatgctggaggttattattactctctccttgttaacttagataactttttgtattctttatggcggatttgtaaaattggtgttagatgattgcagttaagatggctgttgtgtctaatttcgataccaggctaagaaagctattgaaggatcttaatgtcatagatatgtaagctttgtcatgttttgttatataaaccagaagtctgagtaccaaagttaacaccatgaatggtaatcgtttataatgcttgcatctcttgcaggttcgatgctgtgattgtatccgcagaagtcggatacgagaagcctgatgaacgaatcttcaaatctgcgttaggtattggcatattgcattctaaactgaagtgttgtttcgtttaaattataagaaaggattcagagttaacattttgtgtcaagcggagaacaaattaacgttaacattttgtgtcaagcgcagaacaaatcagcgtagatgtaaacagagcagtgcatgtcggagatgatgaaggagctgataaaggcggagcaaacgccatcggtattgcttgttggtgcgccaaatatacttttcatcttgttttttccgaggtttttaaattctcatccatcataacacatagtgctttttgtttatctgttttctttgaaaatttaggttgtggggagaagatgtgcagacattttcagacatacaaaagcggatcttggtttcagaactctaagcttcaaagattttgatctgcaatatttttcagaccctgtacacacttactcaatcaacactgtaatctgtctctttaaaaagttaattaataatgaaaaagctgcaaacttggacaacaagaatctaaaatttaaatcaaatagacggatccacgagaagcaaacaaaaagaaataaatggtgaaaggttacattatagagattaaactc

SEQ ID NO: 31026 - DNA, 317 bp, Arabidopsis thaliana landsberg
aaaaatgcagagagatgcaaatggcaaggcttgctggcccaataaatgtaagtttgatcagattccactcggggtgaacactctggtggcaccagaggatgtaagtctcgatttcgagtttgtttcatgtttaacatacacgccatctgttttgtactgtttgggtacagttagtgagattttgagagctattttctgggaagatcattttcaagagcgtggttttctatgttttgttggcctaggtgtgttcctatgagagtatgctagctgggctgttccggctcaaacatttagggatcactcggtttacattg

SEQ ID NO: 31027 - DNA, 2775 bp, Arabidopsis thaliana landsberg
  unsure (1)..(2775): unsure at all n locations
atggaagagggttcatatgtgattttgggggttttcttcttagggtttctcgaattgggggaaattattgggccaaaactatttgggcttgattttgcggattaaattagactaattattttggtgatagtcgctacatagtagctataaacacttattcttttacacatcggtcgaactatcaggtatgaacaaagagtcaagtttcatgaacactaaccgttttgatgaagtaaaaggaagagtagtgagattagctccagccttaatggattgtgttggaaacaaggatatcctcaagtttgttggcttgccatctggatttttcaatagtcggattgagtttaacctgcagcattagtcaaccaggcaataatctcaagaatagagattataattccaaacaaaattttgactccataaagcaactcaaaaagaaccctacgagtaaaaataagattcaaaaagaaaaatatagttagtaagcgcctcccccagacttaaacgacactatctccaaacttaaacgtcactgtccctagtagcattcaaatccggggtaagcgtgaaaaataaaagaaaaataaaaggaaaatcaaactattgggctgcctcccactaagcgttgtttagagtcaatagcttgacttggcggagttcaagatgtgggtggagtggtggaggaatatgctgctgcatcctcgccttctaaggcggtgtgtaaatggatctggttggagcagcttctggtgtcgatcgacactcagaggtgtgtcgatcgacactcttcttgtcacctgcaaaaacaacaggagaaacaagctttccaggaactctaggtttgttatcttgtgaaacagtcttcgaataatccaaagaattaatcaaagataaaacaggagaagagagagaagaaaacttatcacataggtccttaagtggtgtgggctgaacagaatgtgcagaatcatcgnnnnnnnnnnnnnnnnnnnnnnnnnnnnnagaggtagtaatgtcgatcgacactgttgccctgcaactctcatttgcgagctgggcggatgggagcgttgtgtgtggctctgtggtgggattctgatcagtctgaggatgtgtgtctgtgctgaaagcaatgcaactgataggcttagtaatctctgaaccatccatgccaaactccatctccgaatcacaaaccttgagagagattcttcctctcttcacatcaaacctagcgccagctataactaggaatgctcttcaaaggataagaggattcttgggttccttctcgtagtacaggaccacaatctgcagggattagggagttgccaaccttaacagtaacatcctcaagaattccttcagcgactctgttggaacgatccgcaaagaggatagtgattctagtcggcctatagttagccatgcctagtctctcagcaacagacttaggcataacattgatacttgatcccagatcacactaagagcggttgaacctgcgtgaggagatagagcaatcaagaacaaagctacctggatccgggagcatctcaatggtctgatcaggagtgatagtgcggatgtactcagcaatgtccactctctgtgccttctctttcttgaccttaggcagcatgattgcactgatgtcccttgtcagcaatttatcttcattagagctaataccattgtcaacaagtcgcttgacatacttgttgagtggagcagaagatgtctctaaagcatcctgaggaagaaaagtgaggatcctttccatgatggcggtgcacttagcagcatgaatctaatgcttaaaacgacgctacctcggataagggacatgaggagtgtaagcagcctcgggcttcattgggattcaccctcatatggtgcagtctggacccaatgtcgattgacgctaaaggtgtgtcgatcgacaccctcgtgaggaaccgtttttgaaaacaaagtcaggtccggtggtcgatcgacactggaaggtgtcggtcgacaccatatctgcaactgcgaactccaactcgtcttcagtgtccaattcttcccacacatcatccccttctatgatcaagatggcattacagctcttccttggtttagcatcaggattaccaggaagaaagccctcttgtctcttgattgattgtgcagttgagctacctgtacatccagcttattcaagtgagagctcagattgtcgatcttcccactaagatttgtttagacagcatcaaacttgccattaaactccacaacgagctttgttttgctctctcgaatctgctcaagtatagattttattcttgtctctgatgagagtggagggggggggggggcttggtaggctgaattaccataggtcctctaaaagttgctctaaggaaaggtcttctagaaagccggcttgggagtatagttggaggaactctggttccctgtaaacctgttgccattgaagttgccttgtggttgtccaaacttcatgtagctctgaccatcgatgtagaagactccctcttcagactcagtctcaggctcaatagtctcatcttcagctgcaaagtggacatgcttcttccttgtaagcaagttatgaaccaaatctagcttagcattcacctctgccatctgattgcctaaaacagctccaacaatcttcttccactcgaagtctgtgttcttagtgatgttgctaaaagcaagattctctatcagagctgtagcatcaattaggtaacgtgtgttgaagtt

SEQ ID NO: 31028 - DNA, 2426 bp, Arabidopsis thaliana landsberg
  unsure (1)..(2426): unsure at all n locations
gcaaagctatattgggtcgtgggggaggataagagcccattccctctcccacacctttcatcttcttctttttcttcttctgatcctcatctacataagcatcaccagtcagtgatttattgataaaatgaaccttaagctaatagcacaaatgcttagttgaaagcatgtaccttgcatcagcagtcggcataactcagcatattcagtagcttcatcttcaatctcttcatctgtctcaacttgagatggccgccgtctcatcttgagacctttaactccatccaatttgtcattcttagaaatgttagattcttccccctccccaccttcctcagcatcaagtagattttccagatctccggcaaaggagtccaagtcactattcgcctcattttcgctttcattctcatcaccatcaaaagctgaaagggacaaaagctgtctatcccaaatctcctgacacttttctcgggcctgctgttgcatctgcaggaaagacattctctggccacgagcatacttgcctatggttgtagggtcaaccttaacaccggatgcagcctgctcacttgatagcttccgtatcatagctatacgatgccatcgagtttnnnnnnnnnnnnnnnnnnnnnnnnnnnnnnnnnnnnnnnnnnnnnacaaagataacagccaaaccatctcttatgttcaaattttcgatgggatttaatttagtaatagtttagaagaaaatgggtaacttgtaagtatttttagctgaaccaaagaagtgtacctctcgagctgcttccatgcttaatctgcgaagatcagcatctgtaccagtgacagttggggctccacggccggctgctgcctttttcttcatatgcccggctgcagctggtgcttttggcgcagctctgacgtagctaaatcctagaccccgtccagagggatcaccaaccccagtaatttccaaccgctctatatttgctctgtcctactcaaacccacaaatgaaaatcagacatgtgagtattgaaccggccaagtacaaaagcatgagctatgactgatcagaagtatcaaatccacttccactgacaagattcagaaaggttcttaacaaaactagagaagatatatctgaaatagtttctagtcttgtttgcaaagaactaataatgcatcaccctggcttatctataaaagagaaccaagaataaacacgacacgacttttacggattagctgattagtgatgactaactcccaagttcctaacataaattacagataaaacccactggctgggtaaactactaactcccaaatatagataagtgatgcccacctgatttgtacaagcaacaaaattactgctcaggttccatggagtaatctgcaactcccgctcaatatgtgatgcagcagcaagagcaatagcttcgtctgggagctgagccaatgcatttgatatactggcaggtaatgtaaaccgggtgatccctaaatgtttgagccgatacagcccagctagcatactctcataagaacatacctaggacaacaaaatagagaatattatgcatctttccatttaatgctactttggacagtggaaaacagagtggtgtataaaccaatgaaatgaacccaaaggagaaatttacatgctctggtgccacaagctttttcagctcactctcaggaggttctagtaaactatcttttttggtccaataagactggccatttttatccctctgcattgtgtatgtacatgtaatagatcagcatgatgacgcaataagaaaagaagaaaaaaaaacgcaagtgtgcaactcctagatgctgcaacttatgcggaagtaataatatgatgagataccttccaacaagcaataattttcatattcttcttgatgattgcatctgtcaagttagaaaataagaaagacagctcatctgcagcaattgggtgctcccccccaccacgcttaaaaaattctcggtacacataaaccaacattctgttcactaaataagtctgtagattctttgatccaggagacattacttccatgcgaggttcctggaaaaatataattaaaataagatgtagattgctacaattaagtactgcaggtaaaacttataaccagactcttgtagtttaaaacacaactgaaatgagcatctcccatctctnnnnnnnnnnnnnnnnnnnnnnnnnnnntatctatttattctagatctgctagcttactatacccttccatcacttatcctaaaattttgctaggacaccaacgtcaaaatactaaaggaaaaatgataacggaaaagattagtttgattcgctcaccctagtaagcccattgttacgctactaaaataacaagcatggaatatatagattcaatcttaattatgtatgt

SEQ ID NO: 31029 - DNA, 1127 bp, Arabidopsis thaliana landsberg
tttctttcacctcaagctatgtctcaatatgaagcaaccctttttagttcatcacatatcggcaatcctactcatgacactccaaagatcacgaatttagctaaccagcagtctcttacttagtccctagatttttactccattcataataaggtcaaggagtatatagataccgagagtgtcgttaactagatggaccattgtaggattaggagttgatgtttacacattgtgaaacatcagtgtgcattgtatggctcgccttagaaacctggagatgtttctataacacctaagatattaagtccaatgtaaatcatgtccaacagagacgttttcaatctaggatctcgcagagagcatttcagagtctctagcagatgaccaccgaagcttctacaagaatggccaagaaaaaaaacaaaaatgatatataggtacccttcaacccttatatggtttcttgaaatcaaaaatgagaattcaaggatcaaaattcttacaggagatttaaaagaagaaagactctggatcagcaatgagttcatctgagatatcgaaatcgcactcccttgcttgtgcctcctcagagataaaacattaccctttctactatctttaaccctaatcataaccgaatttggatctgactctgactctgagctaacaaccaccattttaggattccttaaagatatatttcctatagcaataaaagatacattcatctctaccttctccttactaatcaccacatcattttcgctatcaagatcctcctttttattttcaagttcctcatcatcatcatcagaaagatttgtgtagttcatcacagaaacttgagtgacattggagttagttaactcaatcactgaaaccttaattggagacaagcaaaaaaaattccgacagggaataccaaaacactgaacaagcagaacaaccaaaccagctataacaatgaattccaacaacaatctcctgatgttcggaatgatgaaatctcgtaatgattctcatcgcaactcgagtttacaatcacagcaaatgaatttggaaagaattgagcaatgatacctccattttgtttatggctttaacaaagagagctttcaaacaaaaac

SEQ ID NO: 31030 - DNA, 6059 bp, Arabidopsis thaliana landsberg
atgctagagacattcggagacccgtacgtactatagttcctaaatcatattaatagcaaatatatatatttgaatatctaaattgaatattattctgtggggaaaacagaaagaaaagaaacaaaaagaaaagccaagacaaatttgatcagataaaggaataaaactaaagttaaagttatatagaatgcatatcacaacaaaaaaagaaagcatacaaataatacagtctttgataacgaaaacttgatcaatgttttctcgtgttttttcttgactataacctctcttcttcttgcaaacagtataactttaaaaatgaattttgaaagtacttgatttttgttatgaattattcgtcttaattttaaacctctgtttttcgtcttaatgttagaatatcgagaagattagtttggagaaatgtatgaatatataacacagaaaaacaaaagagagaaaaagaaaaaggaaagaagagagaaagcgaaaggagagagtgtcatagagacaagaaattaggagtgtgatggcgtgatttgcttttcctttatttttttgggtccgaatctttttaactccaaagtatctctttttaaaatttctttaaattaaaaacaaatactagtaaattcttagttgttactgtggttaaagcgggtaaattccatagttgacgcctgttgctatgattgatgcgataattgacatgattattacggtagcactgtaagaaatgcacaagatgcagcactatcaaaatactactagtattaactaatcaattaatatcgttgaaataatttgtttgtaactttaaacggactttattagatcaacaaaatcatcatgtactaaataacacacgcaccccatacttatcgttgaatcacgatagagttattgttttagattaaaatgaagcatgtgttgttgctttttgaaaattttgtcaaaagtagtgtgaaaattttgattttttagttaaaattgcttttgacaaagcagggaaaaaaatccactttgccaccgacccaacaagtaacgggtttatattagcattacatgagacaaaaatcgacagaacataaggtcaatttagacatatcatatttctccaattaatttgcatgttaacaaaaaaaaaatgtaattgacaaagaaaaataaaaagcaaaatattgaagtggacaaaggtttaatatgttttatgttagatatagtacataaaaataagatttggcttatatcatatgaataaatctgaacaaaatttctagataaccgtacattaacacgctaaaaccatatcctaaaacttttgtttatttgaaaacactaatttggtttttctataataattcttttgttttgtttttttcttgttcatctcctttctctttcaattaccgttggaacaagacgaagtttcagagacaacactacccaatctctctctctaaccttaagtgttgtctttctctctataagccagagaccagacagtgatgacgatatagtatatgagaccagagggaggattaaccaccatttcccgtcatgaatccagctactgacccagtctccgccgccgcagctgctcttgctccgcctccacaacctccgcagcctcaccgtctctctacctcttgcaaccgtcacccagaagagcggttcaccggtttttgcccttcttgtctctgtgaacgtctctcagtcttagatcagaccaacaatggcggttcctcttcttcctctaaaaagcctccgaccatctctgctgcggctctcaaggctctctttaagccttccggaaacaacggagtgggcggtgtaaatacaaacggaaacggccgggttaaacccggattcttcccggagctccgtcgtacgaaatctttctcagcatccaagaacaacgaaggattctccggcgtgtttgagccacaacgtaggtcttgtgacgtcaggcttcgaagctctctttggaacttgtttagccaagatgagcaacgaaaccttccaagcaatgtcaccggcggtgagattgatgtcgagccgaggaaatcaagcgttgcggagcctgttctagaggtaaacgatgaaggagaagctgaaagtgacgacgaagaacttgaagaggaggaggaggaagactacgttgaagctggcgactttgagattctcaatgattccggcgaactaatgagggaaaaaagcgacgagattgttgaagttagagaggagattgaagaagcggtgaaaccaacaaagggtttaagcgaagaggagttaaagccaataaaggattacatagatcttgattctcaaaccaagaagccatcggtacgacggagtttttggtcggcggcctctgttttcagcaagaagcttcagaaatggaggcagaatcaaaagatgaagaagcggcgtaacggcggcgaccatcggccaggatcagctagattaccggtggagaaaccgattgggagacagctccgggatactcaatcggagattgctgattacggatatggtcggaggtcgtgcgataccgaccctcgattctctctagacgccggaagattctctcttgacgccggtagattctccgttgacatcggtaggatctcgcttgatgatcctcgttattcgtttgacgagccgagagcttcttgggacgggtctttgattggacggacaatgtttcctcccgccgcgagagctcctccgccgccgtcaatgctctcggtggtggaggatgcgccgccgccggtgcaccgtcacgtaacccgagcggatatgcagtttccggtggaagaaccggcgccaccaccaccggtggttaaccaaaccaacggtgtgtcagacccggttatcatacccggcggatcaatccaaacccgagactactatactgactcatcgtcaaggaggcggaaaagtctcgacaggtctagtagctccatgaggaaaacggctgcagccgttgtggcggatatggacgagccaaagctttcagtgtcgtcggctatatcaattgacgcttactcaggatcactgagagataacaacaactacgccgtggagacggcagataacggatctttccgggaaccggcgatgatgatcggcgataggaaagtgaatagtaacgataataacaagaagtcgagacggtgggggaagtggagcattttaggacttatttacaggaagagtgttaacaagtatgaggaagaggaggaggaggaagaggataggtataggagattaaacggtggaatggtggagagatcgttatcggagtcatggccggagctgaggaatggaggaggaggaggaggagggccgaggatggtgaggagtaatagcaatgtgagctggaggagttccggaggtggatcagcgaggaaagtcaacggattggataggaggaataagagttcaaggtactcacctaagaatggggaaaacggaatgttgaagttttacttgccacatatgaaagctagccggagaatgagcggtacaggaggagcaggaggtggcggcggcggagggtgggcgaatagtcacgggcattctatagcgaggagtgtaatgaggctgtattgatcaacaaaattgttcattggatggtttaattagctctatgaagctgaacctttgtttttagtatttcgttggtttaggtttaatttcggttcaattggtttactttgtaatgttaaggaggggatgcattctcaaacgaatcacttgttgtcgttgtctattttaaccggaataaaccgccattcgaccagctatatttttggttccaggcttcccaatcaacacctaaattttttccaatgattaaccaaattttgattagttaattttcattggaacaaataaattgaatagtctgataattttgttagttaacctaaattaaaattttaaaatcgaaagagattgttgactaactataatcaacagagagtttattacttcacttctaattaaaggcaaaaagcccaaaacatgccggagaaataacgttcaccaaaaactctcacatggtcgtgttcccaaagtcgctgtcacccaaacacgtccttaagctcttgaaatcggagaagaacccgcgtgcggcttttgctctattcgattcggcgactcgccatccaggctatgcacactccgccgtcgtttaccaccatatcctccgacgtctctcggagacgcggatggttaatcatgtaagtcgaatcgtcgagcttattaggtcacaagaatgtaaatgcgacgaagatgtcgctttatcggttatcaaaacctacggaaagaactccatgcctgatcaagctctagatgttttcaaacgaatgcgagagattttcgggtgcgagcctgcgattcgatcttataacactctacttaatgcgttcgtggaggcgaaacaatgggttaaagtcgagtccttgttcgcctacttcgagactgctggagtggcgccaaatctgcagacgtataatgttttgattaaaatgtcttgtaagaagaaggagttcgagaaagcgagagggtttctagattggatgtggaaagaggggtttaagcctgatgtgtttagttacagcactgtgatcaacgatcttgctaaagctgggaaattggatgatgcactggaactgttcgatgaaatgtctgaaagaggagtggcacctgatgtcacgtgttataatatcttaattgatgggtttcttaaggaaaaagatcacaagacggctatggaactgtgggacagactgttggaggactcttctgtttatccgaatgttaagactcacaacatcatgattagtggtttgagcaaatgcggaagagtagatgattgtttaaagatatgggagagaatgaaacaaaatgagcgtgaaaaagatttatatacatatagcagtttgatacatgggctgtgcgatgcaggtaatgttgataaggctgaaagtgtgtttaatgagttggacgaaaggaaagcctcgattgatgtggttacatacaatactatgcttggtgggttttgccgttgtgggaaaattaaggagagtttggagttgtggagaatcatggagcacaagaattcagttaacatagtgagttataacattttgattaaagggttgttggagaatgggaagatcgatgaagcaacaatgatttggaggcttatgcctgccaagggctatgcagctgacaaaactacttacggtatttttattcacgggttatgtgtgaatggttatgtgaataaagccttgggggtgatgcaagaggtggagagcagtggtgggcatctggatgtttatgcatatgcgtcaattatagactgtttgtgcaaaaagaaaagattagaagaagcgtcaaatttggtaaaagagatgagtaagcatggcgtggagctaaattctcatgtctgtaatgcattaataggtggtttaatccgagactcaagacttggtgaggcttccttttttctgagagagatggggaagaacggttgtcgcccgactgttgtatcctacaacattcttatttgcggtttgtgtaaagcagggaaatttggtgaagcatctgcttttgtgaaagaaatgcttgaaaacggatggaaaccagatctgaaaacttatagtatactcttatgtggtctgtgccgggacaggaagatcgatttggcccttgaattgaggcaccaatttcttcaatcgggactcgaaaccgctgtgatgatgcataacatactaattcatggtctgtgctctgttgggaaacttgatgatgcaatgactgttatggccaatctggagcatcgggagtgcactgcaaatcttgttacctacaacaccttgatggaaggattcttcaaagatggagatagccacagatccacagtggaccggggttacatgcacatgatggggctgctacctgatattatatagtgcaaaactatagtgaaagggttgtgtatgtaccataggtgttggggtttgcttatggaaatttttttg

SEQ ID NO: 31031 - DNA, 858 bp, Arabidopsis thaliana landsberg
atcgtggctagtggggtattttcaaaagacttttttgacaaatcaacatcacactattaaaaaagggatctcgacggagaccaaccttcagctctctggcaatggcgtatcccggttcgcctatcttgatgaagctcctcgtcttcatctttttatcaacttttgtagtcactaacgtgagctcggaaactaagtgccgggagttcaaatcgatcatcagtttcggagattccattgccgacactggaaacttgcttggcctctcagatcctaaagatcttcctcacatggcgtttccaccgtatggagagaacttcttccaccacccaactggtcgtttctccaacggccgcctcatcattgatttcatcggtacttttgactttacagttttacttaaggtgtgagtaagtaagtgtgtaaaaaggtgaaactaaaagagttattaaatttcttcagccctttctttgttttcatcttctttatggttttacttgattaccaagtttgattgtgtaaaacctgaaatcatctaaatacagaaccattaagtgtggttaagtctttatgaccaacttacagggctgaaggtacagctcttagttcatgtttttttttccggttatgttcacagctgaattcttggggtttccgcttgtgcctcctttttatggatgtcaaaatgcaaactttaaaaagggagttaatttcgcggtagcgggagcaactgcattagaaccttcctttctagaggagagaggaattcattctactatcaccaacgtcagtctaagcgttcagcttaggagcttcgcggaaagtttacctaacttatgtggctcaccttcaggttgggaa

SEQ ID NO: 31032 - DNA, 3559 bp, Arabidopsis thaliana landsberg
aaaggctcgttctaaacgatacaactacaaagttttgtaggccatagaaagtaaattgccttgtcccacctttattataaggcaacaagaaaggctcattgagtcatcatcattgatcactcaacggtacattccaaaacaataatatatataaagtaaataaaaagatagaaaaacagaaagtcactccggaccacacccatggcgtcgctagattctcatgtgttgatgaaactagttagcctctttttatctactctttttgtcactatcttaagctcggaatcgcagtgccggaacttcgagtcgatcatcagtttcggcgattcgattgccgacactggaaacttgctcggtctctcagatcataacaatcttcctatgagcgcgtttccaccgtacggagaaactttcttccaccacccaaccggtcgtttctctgacggtcgcctcatcattgacttcatcggtacttctctttatttatatgtaaattgacttttttgacgcagctttttggatcaaatttatataagaacattctaatttttttgtgtgttctgttcactgaaatctttctctgtttttctgttttcttgaactgcaagttaacattgtgaaacctcaagtgatgctccaattttttttttctttgcagctgaatttttggggcttccttatgtgcctccttacttcggatctacaaatggaaactttgagaaaggggttaattttgccgtagcctcagcaacggcattgaaaagttcttttctagaagagagaggataccattgtcctcacaacatcagtttaggagttcagcttaagatcttcaagcagagcttaccaaatctatgtggcttaccatcaggtagtaatagtgaagatcaactttagtaaagtgattataatgtatttgttttcaagtggtttgagctaacttgtatttgttcttagattgtagagatatgattggaaatgctttgattctcatgggggagattggagctaatgattacaatttcccattcttccaactcagaccattggacgaggtcaaagagctggtaccgtttgtgattagtactatttcttctgcaatcacggtaaacattcttgatcagccagttccgggaatgactaaaacatatttgtatctacgctgataattagtttggtaagaaaaaacacatgtacatgttacgttgttttgaaactgaatgttgaattcaggaattggtttgcatgggaggaagaacattcctagttcctggaaatttcccgatcggatgctcagcatcctatttgacattatacaaaacatcaaacaaggaagagtatgatcctctaacaggatgtttgaaatggctgaacgatttctcagaatactacaataagcagcttcaggaagaactcaacggactcaggaagttgtaccctcatgtcaacatcatatatgctgattactacaacgctttgttgcgcaatttccaagaaccagccaaattcggttaggcttcttgaatcctccaagagatttcttcacaaccaagtcactcatttgattcactaattaattaaccgattttattatccaatcagggctcatggacagacctttacccgcttgttgcgggttaggaggaccatataactttacctttagtataaaatgtgggagtaaaggagttgaatattgtagtgatccttcgaagtatgtgaattgggacggcattcatatgactgaggcagcatacaaatggatatccgagggagtactcaaagggccatatgcgattcctcctttcgattggtcctgcctcgactctaagattaagaacaatgagtcattacacacacaatattctttgatgaacagctgatgcaagctcaagttgatttcaaaatgtaatatatctgaataaaaagatctaaggatagaaaatttctaatatcaaccaatttatcagttaatgaatctcctactttgaatcctaaaacccagttggaggactaatgacattgccacacatttaacaaaagagacggtaaaacatgattcaattgataaataaaataaaaagtttagaaatcttctcctatttgttaaaaatgatggattctacttccaaaactgcttacaatgaaaaaaaaaatgttgtgttaaaagtagatttctagagatctttaatcaaaatgtatatatattttgaaaaatggtttggttacatggatagtctgttaagatttttagactattggtaatatgtagatttaattatttaaatactttcgtttgggacaaaactaaaattacatgttgtagctttgggtttggggaataacgagttatggtccagtgttcattgaattcaacgatcttgctagagatacttcagtatccttccagctggacacactttttcaggtaacccaaaaatctcatacaccagtggcttattttagttttacaacaattgcgataatgtaatgacttagcttcttcatagtcaaatctctcgttgtttagcttatgattcgaacttcttttttagaaaatatatagactgcaattatgcagcttttactctatttgcagtctattacattgttcagcaagtggttgatagtatcaacttgatacttattacttaatagagttccaacatgaatacaacagattcagaaccaagactaagcagtgcatgattttattttatttttgattaaataaatctaaagcaattagcatcaaaaatagattatctttgttcttgttgacaatatttacattttaacaaataagtccttgtttaaaatgtttcctaatgtatgtcttattaatctaataggaaaaatgggtaaagaaaccctcaccttttccaaaacatgtaaaaaaccgtcaactattttttgaaatggtaaaataacacctaagattattaaaatcaatttaaattaatgcaaaataaatataaataaataaaatgaatttggtgtaagatttattttcctaaaacttcaaaagttagaacaaatttgaagaaaaataaaattaaatatgctaagctataaactaattttagtttacagaacaatttctaatggcaatgaaacttatattttataacgcaaaacaacaacaactaaattctggaaaagaaatcgaactcgaatttgaaatagataaatacaaactaaattgttttatttatgtttcaaaataatagtttatttgatatttatttggtttgataatattagatgttattttaccagtttttaaaaggtgagggtttaaatagcaaaagaaaagttgacggttttttacatgttattggataaagaaaagtttttttttttacccattttccgttctaatataatgatcatttttctatttctcacagtaaactcatgttgcccgtgagagtacttctccataaatcctctcctttgcataaaatgagaagcacatctactggatttggagtatgatgcgctatacataattattaagaatatgtaaatgaatgagatagtaatgtaaagacaagag

SEQ ID NO: 31033 - DNA, 6402 bp, Arabidopsis thaliana landsberg
aaggcccagatgaggaggtaagtgtggaagccatgaataaagctattactgtatatgctaattgatcccatgagaatgtaaagtttatggttcttatatgtaggcagtggagcaagtgtatgaagcattagatagatgtgaggagattcttggaaaacatcggtacatctgtggtaacactttgactgaaacagatatcagattgtttgtcacccttataagatttgacgaggtaagttcatactttcaaagcaagaaaaagaagtacaccatatgtgaacgaatctctaatgttgaaacgttgatccaggtttatgcagtccacttcaaatgcaacaagaaactcataagggagtatccgaatttgttcaactacacgaaagacattttccagatccccggtatgagtagcacggttaacatgaatcacatcaagcagcattactatggaagccacccgtcgatcaacccttttgggatcatccctcatggaccaaacatcgattacacttcgcctcatgatcgacacagattctccaaatgaaaaacatctcatcaaagatcaaatctttgacacatgagttgagttctgtcttcagaaagttaggaccatctttaccaaataagcttaagtcgtgtctttaacattgcaagtgatgttgagttttatgttatgagaaaaataaaaagctttctgtttgatatgatacagtttattgcaatctccacggttgaaaacactgtttgtttttactgcaatcacattgaaacttcgaaggtcatgtggcggattagggtcttttatgtaacctttgaaccttggagttcgattctacttttcctcagcattttgtggtctcttatgtaactaaaattttaattaggggctgttttgcaattaacaaaactaaaaccaaaaagtgttcatatgagaattgttttttgtcatttgacccaaaaaaagtcatcactgcggctatgaaactccgaacaaaaccaccggcgaagaagacgaagaggacgacaaatgcttcgtcaccaactccgtcgtcttcatctccttcgttttcttctctcccagacgaaatcgtcgagaactgcttagctcggatctcgaggtcgtactatccaacactctcaatcgtttcgaaaagcttccgttcaattctctcatccaccgagctctatgtagccagatctcacctccgaaacaccgaagagtgtgtctatgtctgtctatctgataaaagttttgaatttcccaaatggtttacactctgggttaaccctaatcaagccaactccatggttgagaagaagaggaagaagaagaagacaattggaaagttgttggttccaattccctcttctaatctttctcctgtatcaaaatccgccatagctgttggttctgaaatatatgtgatcggcggaaaagtcgatggtgcactgtcttcggccgtgcgaatcctcgattgtcgcagtaacacttggcgcgatgctcctagcatgaccgtagcccgaaagaggcctttcatatgtctctacgatgggaaaatttacgtaattggagggtacaacaaattatcagaaagcgaaccatgggctgaggtattcgatataaagactcagacttgggaatgcctttctgatccgggtactgagatacgtaactgtaccatttacagaatagcagagatcgaaggaaagattcactttgggtatacacaaaaaacgtatgcttatgacccaaagcaaggtgaatgggaatgctgtgaaggcgaggttgcatttccgaggtcccaatgtgtgatggagagtgtattgtacacctttgctaataactacacttgggaggacgactacgggtgcaagtggtggtcaacgtatggatatggggaaaaggtaaaagggttggagtcactattagagatacacaagaggaatggtggctcaagtgataatacgactaaactagttgcctgtggtgggaaactcttacttttatgggaagggtacatgaagcataatcccaataataggaagaagatttggtgcgcggttatcgcgttagaaaagcgtgatggaggtaaggtttggggaattgttgagtgggttgatgttgtgcatatcgtccccacatcatgcaagctcttgcattgtctcgttgtctcggtttgattaacttgtatgatacaagttgtatccaggtatgtcagtccttaactccatctttggatcccttgtcttagttaatttgagttcatttagttttataaaaagttcatgtttcttttttttttccctgtacatatatgatgttagtatgtataacattatatatatatgaatggattgttgaccagttggaaagaggagaaggaagcaaaggcaaaaaggagtgcaacatggattacctttcgcctcatgatcaacacagtgtcttctcatgtagatgatctaaccatctttcaaactttgtgttagagtttcgtgacttctgacttcagtttgttagaaatatcctcctcatgagttgtgtctttaacatctttcaaactttgttttaacattgtaacttcatcatgaattctttgttttgagaaaagaaacaaattctgtttattatgttacagtttgcaatctccacggttaaaaacaatgttggttagaagtatctacatattaagggacttctgtgatcgaaaacaaaagtagggaacacattggtaaaacaaaaaacactagggttattttgttatataccaaagaggtcctcttttttttttttttggtcctcttcatattttctcatttgacccattttagtcaagatcccgtcactgccgctgattgtaatcacagtggctatgaactttcaagtggaaccaccggagaagaagaagactaagaactcgtctccaccacattcacctccgtcgtcgtcatctccgtcgctttctctacttccagaagaaatcgtcgtgcactgcttagctcggatctcgagattgtactacccaacgctctcactcgtttcgaaaagcttccgctcaattctctcttccacggagctctacgcaaccagatctcacctcggaagcactgaacagtgtgtctatctctgtctatgggatcccagttatcaatttccccaatggcttagactcttagttaaccctaaccgaaccctagccaactccatcattaagaagagaaggaagaagaagaagacaactggacaaatgttagttccgcttacctcgtctaagtttacatcagtatcaaaagccaccgttgtagttggttctgagatttatgtacttggcggtccagtcgactccgccgtgcgggtgcttgattgttgcagtcacacttggcgcgatgcaccgagcatgaatgtatcccgaatgaatgcctgggcatgttcccacgatgggaaaatttacgtaatgggaggttgccaaggattaaaggacgaaccatgggctgaggtgttcaatacaaagactcagacttgggaaggcctccctgagccgggtagtgaggtacgtaagtgttccattgacagaagcggagtgattgaaggaaagattgagtttggaaatgtaaacgagatgtgtgcttacgacacgaagctatgtaaatgggagtattgtgtaaacaaaagtgcagctttgaggtcagaatgtatgattgagaatgtttcatatggcttctggaacatgcgcttgttgtggtatgacaatgacatacaaaaggattattggaaaagattggaagggttagagtcactagatgataagtacatgaggaatggtggctcaagtggtaatacgactaaactagttgcatgtggtgggaaactcttacttttatgggaaggatatatgaagcataaccccaataataggaagaagatttggtgtgcggtgatcgcgatagagaagtgtgatggaggtggagtttggggaattgttgagagtgttgatgttttgtatactgtccccatatcatgtcagctcttgcattgtctcgttgtctcggtttgattgacttgtattcaggtatgatcagttcaaaatcagtttgtaggatctaactgtagtataacatagtatgaacgatggattgttgaccagttggatagaggagaaggaatcagaggcaagaggagagcaacaaagtgtatgagattaattagttaaggttaagaggcacattttgtcaaactagctactatggcatattagtgtttgtctaatcccttgttattaatgaatctgatttgttgtttgagttatcatgctatgaattgagtctttctttactaacaagtagggatggcttgcaaaactaaaaatccgtaggtatgatcttttggattaaccctttctgggtcatatccttcacgaacaaaaacattgatttctcttcgcctcatggtcgacacaattctctcctctaaatgagaatcgcaccaatgataagatctttcacacttgagttgagttatgtccttcagaaagttataaccatcgtcaattcgtcatcaataaaagagatgctgatttctgtttggagtatgggcttctgtaatgagaaaaacaaaaggtagagaacaaattggtaaaagaaattacaacttggttttaatctgaaataatgtgcccatgtctataaataattccaagtattgaagtatctcgaaactttagagttaaataatattttatattattgctttttatgtctcaataattcaattgtcactcttgcgttatccatttgaagatggatccatcactatgacaattatttttctgccaccttgacttgtccggcttatattccaaaaatttattttattgttcacctctttttcttcaatcagtcaatttctctcaccaaccctagtttccccaaatttggtaatacgatttcgtcaatttacttcgcaatcgattcaattcgattatgtctctattgctggaagagatcattagatcagtagaggctttgttgaagctcagaaatcggaatcaggaaccctatgttgggccgaatctaaacccggttcttctagttccaggaatcgctggatcaattctaaacgccgttgatcatgagaacgggaacgaagaacgtgtttgggttaggatctttggtgctgatcatgagtttcgaacaaagatgtggtctcgatttgatccttcagctggtaaaaaaagtctttacttttttttctcataaatccttcaatttgtgcaaattaagaaagtgatatagaaagtcatcagctttgcatgttaagctcttagcatttttatatctgaaacaggtaaagcgatatctcttgatccaaaaacgagtattgttgttcctcaagacagagctgggctacatgcaattgatgtcttagaccctgatatggtatggtttaatttctagctgttttgttttttgagctatggatgtatttgttctcaaagcgttctcttttctcattgggatctttgaactctatatgtagattgttggccgtgagtctgtgttctatttccatgagatgattgttgagatgatcggatggggatttcaagaagggaaaaccctttttggttttggttatgatttccgccaaagcaacaggtaatgcatacttaatctcttcttcggtctaaacgttgatcggtgtattgactgttttgtgtttgcattgagtctagactgcaggaaacgttggaccagtttgctaaaaagttggaaactgtttataaagcctcaggagagaagaagattaatgttattagtcattctatgggaggactattggtgaaatgtttcatgggtctgcatagtgatgtatgcaaatccctctttctttattcgtaagtcttttctaagatttttcttgtcatctgaatctgacgtttttggttatcagatattcgagaagtatgtacagaattggattgctattgctgctccatttcgaggtaagttctctgacttgtggtacttctgatagtactggagacaactaccacactgattggtttcgcattattgattcaggtgctcctggatatatcacatcgactttattgaatggaatgtcgtttgtcaatggttgggaacagaactttttcgtctctaagtggagcatgcatcagctggtaacgatcaatcaacaataatgcaatttagttataaatcttgcttgtttgatgtcttctagagattggctgatataattatcctctcgtttcttctacttgtttcagcttattgagtgtccatccatatatgagctgatgtgttgtccgtatttaaatgggagctccctcccgtttagagctgtggagagagaaagagagcaatgatggagttgcacctctg

SEQ ID NO: 31034 - DNA, 1958 bp, Arabidopsis thaliana landsberg
aaaccccacaccattatatagtggtctgacagggattaatcacaacattaaaaactacttgctgtacagatgatactaagtaatggaagtaggtggaagctttttgagtgcaatttatttacagatacacactcacttccttcccaacctaaccaaatgggcctcgtgctttgctgctgcagttacttccgctgctttgtttgcagcttcacgcttcattgccctttttgcacgtcttcctgttgtgtttgtcgtcttcacctgcttatccttaggctcacttgaggatgacccagagctggaactggaactagaaccagaaccactgtatctctggacaggcctggcttcttgacgcccggatctgacaaaaccattgccaccccatctccgatttcctatgcgaagacttgagccgtgcagataaaactcgtcaaggtcatcatcttcatcctcgtagtcacaaggaatgtcaaaatcatcatggtaaccatggctgtacgacgcctgttccaccacatccaatggtacaaaccatgaggctctaaggagaaggcacacactctcctcaaacagaaaatcttcaatgctgcatagaaatacaaaagagaatttatacaaccaaacaagaataagaaaaagagtttgatcaagcaaatggagtaatcgactaatatatacacaaaattgtaaataaagaagggaagtcacctgccatcaagtgctcggtggacactgagaaaatcaaatggatgcttacattgtgggcatgtgggactctctttgcaactcgcccaacgaagtatgcatgtcacactaaatagatagaaatgaattactcctcttaaaacccaaagtagaaagaaagtcagttaccacgtaggcataaaagcaaacacagaagataaaaggtgatcacgagtttacaggttaaacctaaaaccaaattccacaactgaaaacttgtgagaagaaaacaaaattcatttgacgaaatcaatatgttcatactacagtacagactaaactttgtaacaaataaaatatagatgtaaccaaatcagatgtatatcatctaaaagaaacaaagagaagaaacaacagtattaccagtaagtgtgttcacagcctttgaccatagcagtttcttgaagaggaatttcactcaaacatattgcacaacagccaccatgattcccgaaactcggctcatggatctcttcctggatcttctttttgtcctgagagagaggttcagataaaatctcttaaatcacctccacatgcagagaacacacaacatcatcttaaagagttatgtttagatgtaagaacaagagacctaagttctgtgaaagttatgaagagaaaaagaaagcagattcataaacaatatcagtagcaaattcagcaacagtcaacttcacattgtaaacctgaagagccctaatcgtccaattcgaaattaaacacataataacgcacaaaatcaaaaatttacgaaaccctaatattgtggagcaaggctagatacatttccacttagaagcagaagcatcatggacagaatcagctccaactccgaaacaagaccgacacacaaagcaaacatatttaaaatttgaaaattttcatcaagagacgagaatatgaattgaataagggtaacaaagaacctgattttgaagagccaaatcctgaataccgtcgatcacttgctgctcagacacgatctcggtaacggaactcatggcggcgaaattagatagaaaaaacgaaagatttggtagttgaagaaagaagatgttcttctgaaatctgttcgtcaagattaaggagcccggattagagagagtggctgtgggacagcgaaccaccgagacgagaaaaggagatatgctaagagaatgattcccgatacctcaagaactaacaacaaagcacacaagagacaatac

SEQ ID NO: 31035 - DNA, 1302 bp, Arabidopsis thaliana landsberg
  unsure (1)..(1302): unsure at all n locations
ctcatgtaaaactatttactttttagagagaattgaataaactacgtatatataaaaatttggaaatgggagagtttttattttttacatttatattaattattttatatggaaagagttttaaaccattaatgtgtagtctaagatacattaaaatattaaaaggaagaaaatctaagattttgaaatgatttaaaactggacggtagagatggatctaacgaccataatttttcttgtatacaacaacacgtcatcctaattttctttaaatagaggattgtttttccgattttcttcactatacaatattagagaatccattataattttactaattcattgataaccttcactctacaatatcagagaatcctttctttcttgcttccaattttctcgttctccttcgatccttcttctctattgaattttggttttaaggtgattcgatgtgtcaatatgttattgctttatgtgtcgttcgtgttgaggtatatatatgtgtatatatatatgctacttattatttttgcgtaaattgcttgactaatgtttcaagtaatttagatctgaatatattgttatgcaattctataataatatgttgtttgaatattgtcacaatgttaattaccacaaaatagtttttaaatatcttcttgtttaattatgattgatatctgacttttctttttataatgataggatttcttttgcaaccgataagtctattctgattgaggcaacaccagttacaacaagatttattagacaatattaactacagtaatggtctcaacacctccaaccctattaatgctatttgatgatggagatgctggtcctagtactggtttagttcaccgagaaaaatctgatgctgttaatgaagaagcccacgcaacatcagtacctcctcatgcaccgccacaaaccctttggctattagataacttcaacattgaggactcttatgaccgagatgctggtcctagtactggtnnnnnnnnnnnnnnnnnnnnnnnnnnnnttaatgaagaagcccacgcaacatcaatacctcctcatgcaccgccacaaaccctttggctattagataacttcaacattgaggactcttatgaccgagatgccggtcctagtactagtccaatagaccgagaagcatctcatgaagtcaatgaagatgcccacgcaacatcagcaccttctcatgtaatggtctcaccactacaaaacagaagaccatttgatcaattcaacaaccaaccttatgatgcgagtgctggtcctagtact

SEQ ID NO: 31036 - DNA, 3478 bp, Arabidopsis thaliana landsberg
  unsure (1)..(3478): unsure at all n locations
aacaaaaccttatatttgagaaatgagaaaaattgacataaaaagtacattattattttgttactatttgagtgttttcatttcgagtagtggtttgtatctgattagagcgtccaaaaatgatattgaaacaaatctttatcacctattcaccttaacattatttgaccaatattctttgatgttgatacacaattacgttagacaaccaaaaagatcactagaacaatctatgtttagaagggaggaatactaaaatcaaaaccataatgttgaacttgaacctaaaaacaactagtcgcccataaaacgtagaaattgcatgttataattctagcaaccaccactcaaaatatcaaggttaagtcaaccaaaaataatagaataaaccataaataaccaaaaccaaaccgaaccattatatataattttacatggttttatttttttataaaaccgaaaaaactgtaaaaatcgaaaaaataaatcataacgaacccgaaattagataaagtttctctctggttttaatttttgcaaaagcgataaaccgtgaaaccgaaaaaaattaaactaaaaccaaaccggaaaaccgcacaccgagttactaatcatctatttgtacttgttaaataatattagtaggatcacagacagataatttccaacaaattacatatgtgccccctttgtgattcaaagtttcatttcatttcaaacttgtataagctcatatcccttttaccttatcatcatcatcactgtatttcaaactgtgacaatggagtcatacaaaaccctagaaatcattcgcaagaacactgattcctccgtatttcatctcatcatcaacagaccgtcacatctcaacgccttatctctcgatttcttcatcgaattccccaaagctctctcatctctcgaccaaaacccaaatgtctccgtcatcatcctctccggcgccggaaaacacttctgctccggtatcgatctcaattccctctcttcaatctcaacacaatcctcctccggtaacgacagaggacgatctagcgagcagctacgccgtaagatcaagtcgatgcaagcggcgattacagcgattgaacagtgccgaaaacctgtaatcgccgctattcacggcgcgtgtatcggtggcggtgttgatctgattaccgcttgtgatattaggtattgctctgaggatgcttttttctcgattaaagaggttgatctagcgattgttgcggatcttggtacgctccagcgattaccgagtatcgttgggtatgctaacgccatggaattagctttaactgctcggagattctctggaggtgaagcaaaggatcttggtttggtttctaaagttttcggatctaaatcggagcttgacaacggcgtcagtacaatcgctgaaggtaatcaatctaattttgcttaaatctgttgaatcagtggttgatttgtttcaattttgatttctgagatgatagaatcacatttttgtttcattaggtgcttaaatctgctgactctacgatcaatttttgtttcgagtttgattctggaatgatttagggttaggatcagttgcttaagtcttgttgattctatgcttggtttgtctcagttttgattctgagatggttgatttgtgagggaatgagaattggagtttatggatgttttcaggaataggaggcaagtctcctttagctgtgacagggacaaaggcagtgttattaagaagcagagaggtgagtgtagaacaaggacttgactatgtagcaacttggaactcggctatgcttatatcagatgatctcaacgaagctgtttctgctcagatgatgaaaacaaaacctcggtttgctaaactgtgatacagtctctgtgttgcttctttgtctttcaaagctcttctggtaactaaagtaataagatattacttcaaataagtttagttattgatagttccctaattacggattagggctatagataaaatggtcttctacacatgagaatatgattaatactctgcacaatgcatattggtaaatgctatacctcaatgtttattagtttctgtctcttctctccattcatttcacagtgtatccagaaatcagagtatttaaggatatgagcatcgaccggaagatttccaagtatcttataatctgattttctaatactttttgttttccattggatccgttaccatggaaatctttgccgtgtcgatgcatgtaatcagaatcatatccattaccttattgtcagacacaactgcatataccaacagtgagatgtgacatctccggtgaacagattacaaacctgatgtgaactcatccattctggtatctaaaaacattaaacaagtacggtggaaaccataaaatggtcttaatcaatttcaacaaagcaaaaaacgtctcaaatcatatcgaatcaatcgtaaacatggagggcataagaaactgatcgaaatcttcaacttcgaaagcagtcacacgcaaaattttctttcgagcaggtgaaacttcggataaaataattgcttagtttcactcaatagacatgaaaatatactatgaaattagaaaatggctcaaccggcttagtagaagaagctaaccctaaagtttttaatcctttaccttctttttcttttctttctttatatttgcctcccgcttcaaaaaatttgcagttttttaaagagtgattgaaaatactgtaatatggtttgcacattttaaagagttgatagagtgcttcttaggctcgtccattagccgcaatcaggattagtagccacacggtcagagttttttcaggttatgagcttattcttgtttagctttatgttgatgaagcacattgttaggaactttactcatctttgtttcgttattaaaaattgttttattgatttgttagatggtttctcgtgaaccttttataccgctcaaagaggatgaagtagctgaagtcagaagtgccttctccggaagaaataggtattttcagaagcttttgcatgtcatgtgatttacttataggattttaaccagttttattgctatctcagatcgaatttttagattattatattgagtgcaatacaaaacttttagattattatacatgttcattattataaaaagaagggcatgaatgaacattaaacaataatataatttgtttttttattaatgtttaacaaagttacaatgccttatttaatatcactaatactgcaacgacaaagatttcttataaaactacatgtacgaatatacttaccccgtctcatacaaactcttgcgcaatcaaaacagtaaccaattcttccaattttaacttcttagttcagagaacgcggatcaaaaagacttgctcttggactgaaagaatatngtctctcttcctcactagaaacatttataagtactgatgtacctat

SEQ ID NO: 31037 - DNA, 4785 bp, Arabidopsis thaliana landsberg
atcctttctggaggtcgttgagtgtttagaaagggcgtatttttcgatctattcaacttgcagtcttgctaagaggcacaggatagtcgctgagttagaatctatgcatagtgtttcagcgtctcttatgtgtctcttctttggttgcctgttcctatggagtcttttgtttaattaccggtgcttatttctctccacgttgtgtttatagatcctcacttcaatacgttgatcttgcttatgttcgtgtcttttcacgtgtgttggcaaaaaaaattagaagtcagataatgcagatgcatcataactaagtacatacaatgagattagataacagaaagggcaataatccgattttatgaaacttcaaagttatataaaaacaatttgccaatgaacaaagcagagagaggttcattttctcttcaaggagtgagaaccatattattgcacttacaatgtctgaagacgtgacccatgagtgacttaaccgatctgctacccgaaactacagcgtgagtcatgaccaattcaatgtcacgagcatcagcaccggtctcaccaacctcctcttcatcttcttcagcttgtgcttctactgtgactgttgattacttgattgccttctgagatgtcgcaggcatcctaaatagttgagcggcttgtgtttgaagctgagagagctcatgtcctcgatcgaatataacataagcttctgaattagaagtcaaccaattgtcatttataaattttttctcacttgttgtcattaaactaagaattacagaaatgataaacatatagccaagccaaatggtggaagaaaaaagcacaaaactcgtaacaaaaactgacaaagatacactaaagttcggataagatagcagggatgtaatgggagagttctgcggtgagagactgaaatccattgacaagctgagtatggaattcctgatcttcttctccgattaatctaaagtgaaccctaatggctcgcttacaaaccgccatgaattcaagcagtgccgcgattagttgctgcagttcctgtgaacgcaatctcgttgcaggctctcctgataagaaagctgtgcacacgctcaacaccccactgttcacctgcatatttccatggaaaggcatatgatgagcatttctacgttttacaacacaatctataacacagatattatgggagaaaaacccacctgcactgcaacacttccttggagaatcctctgcagactttgaagccgtggtaggtgatccccatccgagctacgaggctcctctagctcatttctcagagcggttgtccgcgtttcaatcattccaatcgcattctccactggcgagaattcaagggattcagacttggtaaccaacagcctattcacaagggcagggaatgaaccctcagtctgcagcactgttcttctcttccattgatcttctaatccaccttgggttttaccatttttcgtaaatggtgtgtcaaataagaaacgatcaaacactcgtgctcgaacacttccagttgaaagagaaaatattctctctcttctgctcccaagatcctcatcttccatcactgcatcaacagcagtaatttgcagatagcacactcctgcctgcaagtcttctgccttcacttgcctcgaatctggtataatgtgcagaatatggttgctgtccattcttgactcatatatatggctcagtttttccattatatcccctagccgcacatctcgtggttctcggtatacatattctttcctgtccaacttcccaaacttttccccataaaatcccacccggtaatatgtagcatcaataaatgggattgggtttgattcttgggtcaagaatggactcgtatatattagtaagtaaagtgtgacacttagccaactgcccataagccttcctgctcttgtaaactggaataacaagttctaatatgcttgcacaaaaatggtagagctcagcttgagagaaaagcttattagcaagctgtaaatacttgacggcggagtcaactgttagctttgaagcaccataaccctcgacttcagctgcagatgcctctgttgtaaactcgccacttaccatcgggcaaatcttacgcaaggcagacacatgatccttgctccacacaccatcattcctagccaccaaggcctacaaggcgaaagccaatacatgcacataagttctggaagtagtatttagtggacgggaagacttgattgaagacagcagagcttaaacgccaaccagactgcgagatgatccactgcgcatgtaaaacacataccagatctatatattattacctgcattatcacacctgcaaccgccacagcacactgtgcagcttctgcccaagactgcatttcctggtgggcatcacatagatgcaataaccacattatgtgaagatccggaacaggagcaaacgccattccaagtttgtagaagctctctgcagcagcatatcgatccatagccatcacagatccctgtaataacaaaattttgcattggaaaaatacagaatgacttccaaactggttgaatctaatggtatcacgatatgaactaagaagaaacgtgacaggaaatggtgcaaacatgacagtgatgccacaaaacaggattggaaaacttgtgtaagtttgacaagcccggctgtgatacttattttagatcagtgatgtcaagacagtcattcacagtaatatctgaactcacctattttggaactccctaagattcccaagtttaaagttcaggaaatattaggaaagagaagggagggacaggaattactctctataagcgtaaaattatcttcctattagtgatgagaccatacgatcatgacaggaaatgcagatgtactcggacacactttaagttccatcactgtcaatttccaacttccacaaacaggacattgaatcctttgttatcttagttacctatcagttcgataaaaaactaaaaataggtgtcgacgtggaggaattcgagtgtaaaagacatgacacttccaccacataacaattttaaggaccaatttagcagaagacattttttccgtcactgacaccagcaaaaaatatctttacgaaatgccaagatgattataaaccataccaaaagggcatgcccgaggctggcatcaagagcaagaacaaggctgtcagaaagatgtttgacttcagcccatgaccagcggttctctgtaaatttctcgggaataatcaacagtgtatcatcaggaagaccacactccctcaacaaattgacactcttagcttcatcagccatttcgcttaatgactgttgaagtcgccgtgcttctccactctcttctaatgtattatctgacttcatatgagtcacttggacatccgacatgagttctgacagtgtaatcgtcagcaaagccctcagcctagcagtctgcataaagtatagcgagctctgcaagaacaaagcaattgaattcatacctgatagtaagaaacagagaatctttacaggactctagatgtttcaccttaactagtatttgaagaccaataacagcccttttcctgacactgtcattgcggtaaacagcaagccggagaagatggaaggctatctgttttaagaagcgatcattttccctggccatcagtgtagccccatgaagatcaaagattctgttgaaaattggaaagaaggctttccagaaagctaatgactggtttcgggagaagaaactcgtcagtattgtagtaatgcagtccaatttgccatagtcggtcgcaatattgtgagaggctgccattgatgaaaaattttcagtgatctccaaaacctggaggctaacagtggcactaacattctcctcccaaagttcctggtgagagtgaatgcaattagtaaactagctcattgaagactatgccagcaaaaatgatgcgtaacattcaggacaggcatgaaggcaacataaaactataccagtttttgcctcaaaattgggtgcagcgattctcttagtgcctgggctgaagctccaatccgggaagattgtgcttgagctaaagcttctcttagagaataaggttggctaggggaggccaactgagaattaactctctgccacaggtacccattatcaggtgttccctctagctgcagtaaagattcagaaggcatttgagcgttccctaggtttaacatataataagcaaaaagtgtaggacattctagcttagttttgaggagcccaccaaaagaaagcagcaatgttacggactctagctgaacatgtaggtttttaccaaaaagtagaagagaggaacgagcatataggataaagttagcaactcaccctgacttcttggcgagaagcctctgacagataattgttgatagcaggagaaagtcgctcggagtactttggtgatccagctccttcactaacaggaccacgagaattgttgcccccgaggatgctgtcagcagccttcttgtgctgaaattgtttttagttcaacattatcaaatcaccataggagtggactacaaatacaaacatttttgggtgatacatcaaaaatctaagttctaatagagtgtaagcagtccccaaatcattctaccacatccagacaactagctaaaatcaaattttctccaaaaattatcatataggagtatgatagataacttatatattagttatagataacagtttcctttggcttcctttaacaatga

SEQ ID NO: 31038 - DNA, 1519 bp, Arabidopsis thaliana landsberg
ggtacctcgctgcgtcgcttgccatgcctcctggaccccaaattcctatcaaacgaacttcttcagcagctttgaaatccagcaatttgtagagtgtttgcatctgacgatccataccaaccagtccatcacctttggctgttaatggctttctattcgagatactcaagatttcatttgcaattaactcaatcatgtccgcttcgttgctcctatgataaaatcaaaaacataaagggaaaagaatcatgaatccgagtgaaaaaacccttgaatattcttacgtacagattaagcttgtgttttaccaatatcgtgaatccagggcaggtatgttggtgagtttagtgagagaaaccctccattcttgaatcttgtcatctggatatccttcaccaagctcttgaaagggttccgcgagatatccagtctgttttctaacattataaggatcaactccgtagaaaatggggaggatggaaagtctaccttcgctgtgagagtttacgatcttctcgagctgattgaggcacaaaacagagattggatagctctctgagactacaacaaccgcgagttttgactcctctgccagaaacgagtcatctttgaaattggtggtaatgtctttttgttccaaccaacggtccagaacagagacaaaagtttttgaggggtcttcgctgcagaaactaaggaatacttcaaatttggaggatgaagacattgctaacgagagattgagagttgcgaattgttaatttcttgaattacaattctcaaacgggaagaaatggaaaacgaaaagtatctgtttgccaaagaaagcgatgagtagaagctgccaaagtgcgcgagagtcgagatttgactactcaactatcgtgcacttaaaggtacgaaggataatataaacttttgttttgtattgtttaaggttaatttatagcagagtttgtttttgaacaggataacataaactatcttcaaactaactcacttcaattttgattttcttttttattcagttaactattttaaaaatcaacctggctctattcgtatcatttcagcgtggcttcatagcgggagctccgagacagctgctttgtcagaaacctccatgtgatcaaattgacccgacccggaaactacgaggaatactaaggggaaacaaacgaatgcagaatattttcccatttttctctttccatggattcctcgtcatcatcttatgcaactcgtctcaggcactacggatgtcttcctcagttttcgaggggtagatacccgccaaaccatcgtcagccatttgtatgtggctctacgtaataatggagttcttacttttaaagatgatcggaagctcgagattggcgacaccattgccgatggtctagtcaaagctatacaaacttcgtggtttgcggtggttattctctctgaaaactacgctacttcgacgtggtgcttggaggagctccggttgataatgcagcttcacagtgaggagcagatc

SEQ ID NO: 31039 - DNA, 3496 bp, Arabidopsis thaliana landsberg
ttaaattaaaaaaaagaaggaaaaaggaggtttcaataagagcgggagccagcagtgttgcccggcccggctactaactccaaaagagtgcctatcagaacataaggtgaattatgcccaaacgagaaaagaatgatagcagaatcaacatgtgtaaagcagagcactgcacaagagtgcaaagcggaaggttaaataaaggaagcttcttactcagatttgcgagccttttctttaaatctctcttgcatatgcctgatgaggtcatcactggtctccatgttcatgtcgtcaccacgcctaggaacaacaatatttaagatagtatctaagccaagtaatctacttgagtttgtaggctgcttctgctgcggacccaaaccatcatccttcatctttatctcatttctagatatcctttcatataatgcacgtagatattcctcaggcaaatctttcccatcatctataccacgattgtttctaataaaaccatcagctgtcatctgcaagttgtaattgaaaaatttagtaatgagttactttgtttgaccaatcacaagcttcaaacaagatcgtattaagatattcctcaagagggatttcagaaagcttctaagcgaaacagctcaaatatgtaccttgctcttcaccatagggttatgtgcatctgtgttgagcaaaatgactgagtaagcgaggacatatgccgtatcagcgctagaaaaatcctttgggttgcatttacagaatcgctctgcaaatttttccattatacgatcgattttttgtgcttctcctggcagcctaaagccccggagaaaggctcgaattgcctcatcaaattccatgccttgaaattcgaaagaatccacatatgcatgcatcactttcagagataagtcttctctttcccccagataatcccctatcaaagtcttgttcaaccctgatgcatctttgagaaaagctgctatttcctctggcgagtcccccaccttgtttgccttgattaaaaattcaatacctttcttaggtttctggttgaaaatagaaataccttcctgccattaataaaaacaaatcagctaatcaggttttagctgaaagactgagacaaaagtcaatgagcgctgaatcaaactttaggtaaacttttacctgaagttcaagcttgtaagctcggcgctgctctattgctaaggcatcagaattcccactggacaattcagactgagagtctgatctttcaaaaccaccatggcctccatcccccttaccattttctactggatgacttccttcttcaagatttctatcaacaatttccagcatttttgccgaataaggatctggaagacgcaactgcttattcacccagtctcccatagaccttaaaacagcaactaagcatttcatggcttcaagcttcatggctgcttcctgaggtggcaacaaggtagtaactgtaccaggaggcactccttgagcagtcttaaggagaccattgaccatcctaaaaacaaggtcaagaaaaccaatacagaaatgaatgctacttcaaatagttcgcactagttaatgatcgcagctctgataccacaaaataaatagattcagggcgtaaagataagccacaacaagatattagatcatacctctcaaatatattggatgagttgacatcgcaatcatagttgatgaagatatctaccaaaatctgtgaatcaacgcagagcttgtccaagaaccgaagcactatcatcttctgttggaaatcaggttgagcaacattctctaatactcttagaacaatcatagggaagaacaccccaatctctgccttcagcccagcacgaaacctcgaaaccaagctaagtaaaatcgagcaggaaagctggaaaatgatcataagatttgaagcactgttcttcagcaaggagagacacagatactgcttgatggcgcctaagaacctgttccataatgagttgatgccaaattttcagaagaaacaccaaaagctaaattacattctgtccaagcaactatcaagcagaatgttgaaagctgagggaaaaaagactgaatctagagatatgatagtttaatctacctaacgtgggttataataatgcaagaagataaacaaaacaaacctatcgctggttctaaagacagcaccggcattctcaagcagaatcttcaataactcgagagccacaatcttccctctcatcaactctggatcttccttgggaggcgtcttcatggacagcttgcaaagtgccctgaaaaccaagaaggcgtctcttctcagcttattcccaatctgaacttcagaatcatcgtctttctccacttctccatcggccagctctccttttcttccctcgagggccgacttatacatactgatctcccagtacttggcatccaacatatccttatcagtagaatccaacaaatcagtaggattggcagtgccaggcaatgaagtctcgaaggccccgtcatggccgccgaatgtgcccttggcgttagctgaattgaagactccgtcaatgtcctgcataatcttggtaatgaaaccttgaacagactgcgtcgtagatgggtctgattcggatttgtccatgggctccatcagctcggccacgacgatgggctgaatggggacggtggatgaatctgcctccattcttctgaacacgataacagacatctgcacgagcgaggctttagcagtcgcctgattaaccacgtttctgcttcccaagtagataccataacaagtcctgacgatctgtagcaaagaatctccatggatcctcagggaaattgaagttaccgcagtcaagagcgtcttcagcacgagcaactcgagcccttcgtcgtctagctcgtgacatttgcagatggtttcaatgagcttggaaaggagtagcgcctcaggtccgccggtgggatcagcctcaccgcgaacgtagccatgagcaataagcttctggatgcaatcaacggcgggatcgacaatcttgagaacgccggtggaggaggcgttgatgagagggctgaggatgatctcggactcggcgagagagtattcggcggctcctccgtcgtgaagtggtccaggaatggaggatccagattcagagtcggcaacaggagaggaattttcaggggatctaaggcgttcgatgacggatttgcactcgtgggcgagcttggagtgcttacgccaggaggcgttcttaatgaccttgtccaaagcagggataacaactcgacctaagcgggaatcgacttccgtagaagccattccagattggtagccgtgacttcaacgaatcaccaatttagatctataagaggagagtgagtatctatctatgtagcccagagagaacggataacaacaccaagagcaacgcctcctcctgtgcgatccaatcaaagcagtattcttatcagggagacagtgaattgcaga

SEQ ID NO: 31040 - DNA, 5220 bp, Arabidopsis thaliana landsberg
  unsure (1)..(5220): unsure at all n locations
gaagactatttacacaataatagcttaccatgttgcataatacacacactcatttctaacatcaaaatcgttttctgtattctttatgtggttccctcttaacactcattttcaggcgagaaaannnnnnnnnnnnnnnnnnnnnnnnnnnnnnnnnnnagagagcgttgaaggagcagaggtgacagtagagcagatctctaaagacttccccattggatctgccatctccaaaactatccttggaaacattccttaccaagtaaaacacactcgctaaagtctacactaaaacaacaatgtctttgcttctttaaacggattctgttttgataggaatggttcgtcaagagattcgacgccacggtattcgagaacgagctgaaatggtacgcgacggagcccgatcaaggcaaactcaactacacattggctgataagatgatgaatttcgtcagagctaacagaatcatcgctcgcggtcacaacatattctgggaggatcccaaatacaatcccgattgggttcgtaatctaaccggcgaagatctccggtcggcggttaaccggcgaatcaagagtctaatgactcggtacagaggagagttcgtgcattgggacgtgagcaacgagatgcttcacttcgacttctacgagagcagactggggaagaacgtcgtacgggttctcgccgcggctcgtgagattgactcattggcgactctgttcttcaatgatttcaacgtggtggagacttgcagcgacgagaagtcaacggttgacgaatacatcgcgagggtgagggaactccaacggtacgacggcataaggatggacggaatcggtctcgagggtcacttcacgacgccaaacgtagcgctgatgagagccatcctcgataaactcgctacgctccagctcccaatctggctcaccgagattgatatcagcagcagcctcgaccaccgctctcaggttcacaagtctctgtgttccggtttagttcagtttgcaatttgaatctggttttggttacaatttttagccggtttattaacggtttttcgaattgattttggctgaaatacggtatgtctgttaggatgataaaatctggttggagtacacattgattatacttgggtgcaagtaaccggaaatttgttacgttttcaggcgatttatttggagcaagtgttacgtgaaggattctcgcacccatcggtaaacggtataatgctatggaccgcacttcacccaaacggctgttaccaaatgtgcctcactgacgataaattccggaaccttccagccggagacgtggtggatcagaagcttctagaatggaagactggtgaagttaaggcgacgacagatgaccatggttcctttagcttcttcggctttttgggagagtatagagttggcatcatgtaccaaggtaagacggttaattcgtctttctcgttatctcaaggccctgagaccaaacatgtgaggcttcaaatctaacttaacggctctatgtttaagatatggtgtaaatcttactgaggtacaaatagagggaatatatctatttttcaatttgcaaatttcggccagtaacaaaattgaatgtactggtggggacaaaagtaagtgacaatgggtcaaaaggagagacgagactttgtggcgtgggcaaacttttttcataaattttttatgagatagtgtagaaacatcaaatcaaacatgaatccctgcaaagtaacttaaaaaagctaaagtggaatcattcacatcacacagccattaactgtgagccccagcttgcctctgccgacattatcatacacttaaatgttactatactctctaagaataaagaaatacacctaccaacatccaaacacaataaatatgaaattaactctagtggcctaatcatcactttggtagatctaaagccacaaaagatatttctttaaatcactaagcatatctcacaatttcgaacatgataaacaatcttcaatgacagatgatacaagcacacacgcgcgtacacgacaaagctacaatgcaaaaccctaaaagcctaaaacccaaattgtcgcagtcttaagcgataaacatcgagtatcaacaaaaactaaacaaaggcaatgctaacaaaacgactaccaaatctaaagacgatgatgctacgagaaaataaacggaaaagtaaatgcagcaagcagcactgtcaatgaaacgccggctggtctgcttgcctctcccatggccaaaccagccatccatgatccgtcttgtaacatggtctcacccgtacccatctccgacccagtcccctgtgacccgtacacattaccttgacctggagtctgttgaccctgaccagcgtaaccagtatcagaaccaggcacaggatcggaaccttgggaggtcgacgacgagtctgtcactggaggggagtagctagtcgatttttgactgtatatacaaaatgattcaaacactagtcaaaattattgcaatgtcgaatctttcaacttgagctttcaaacaagtttggcattttttgaaacaaattgctacaaactttctcgattaaattactcgttattgacaaaacaaagagaatctttttactctaaaaatgatggtttatgaaaagaagataaacacaaactttggctttttcgacgacaaaaaacataaacccaaaatctaagattaattattacggaacccattaacacatagaagtttcaatttttcaaagcaaaagcaacgcagaaattgtggaaattaaaaaatgaataatattataataagtaaaattaattacctaggggaagaagggcaaaacgtcaccgtataatctccaccggcgcaagtgaaagtgctcgtagcatcgtcgtaagcgtagctataggagcgaggacacgcggctttaaacatctccgaatacacggaaggccgacaactagaaggtgtagcatacgcgccgctgcaacagtattcaggactccgaaacgctaaacacgcgcttttgcaagcgtctccgtcgccgaaacgcagctcagcagggcactgaatgttaagatccgtagtgcatccggtagaagcgcactgcccagatccaccggcgacttcaactatcatcggaatgttgtaaccgtcgacgagactaacgtcgtagaaatcatcgccgccagtgcctagagtgaactccgcgagagttacaggcggtgcggcaccaagcccggcgcattcgacagagttggagccgcagtcaccggttttgcatgtaccggagccagaactgtcgaacttgcaaccggtacgagcccagaatcgaccggaccaaccggtgggagcttggagagagcgagaggtgcctttagggagctcgaatccggtggtggagagagtaggtgagccagcattcgataggattccaggccatacggtgtagccgcaccgattagcgaatgtgaatgttgagccatacgaaccttttaacatccaaaagataaagaaacaaatcactaaaaaaaatgaaactttgaaacgagtgtaagtagatgtgatagactttgaagtaaactttgaagtaagtgagtgagagactcttcttcttcttctggttatacctgtggaagctaaaaggagaacagtgaagctcaatgtgagagtggaagaggcgcgacgagaagaaagattcatcatggttctttgtcgtactcagtgttcttggtctattctaaccagaagtaaaggtcttctttgatgttgggaagaagatgagagagattagtaaaactgtgaagctatttgagttgaaatggggttttgttatttttttccttgaatttgttattgagtgttactgggctctatgcctgaaacctgacaaaatttctcttgtgcacttattattgaatctttttaattgggttaaaataactacaaaaaagatttatgggtagggagagataggaccaaatggttttcaatatcattattcattattatttcacttgtaaaaaaatataattgtattgttatgattttctgtgtatactagtactactatgtctaaattaattaaaattcattttcattttgtgtaaaattatgatgacaacgccgtatttattcgtatcaattggttgaggagctttgtctgtgtaaaaaaaaactatgttattagcccacactaattgggcttgaaagttggcccatgtgaaggtggaaagtggacccgcgttcaaaacgcaacaagaaaaagacaaagaaagatgagaagctttggggctaaaagggagacctaccgaaactatgttaaagcatattcatttctgtgattgtccacagtccacataactttaaacccaaatttctttgaaattcgagttttgaatcgtgataattgcttatttttcacaatccctgaaaactaactatccccaaaaataataacgagaaacataacttttggcacagagccaaacaaacaagattatgtaccaactaccaacttacaagtaaaataaaaagtaaaccaattactgccatatttttgacattccctttctttgtttttgttattagaaggattattttaagggtggagactgtggatttactgagactactagtatggtttgagccactaaccgttgatgatcaatgtatgaaaatgtgacgatgttagatcgtgacacatggaagaacacagctggaagaattagtggcgaaatacagaggatataactctcttctgtctttcgtcttttgaggaacaagagaaagcgagagagagagtcttatctcacccatgccactactaccattgagagctgggccctgaccgagtctttgactcctaaatcttttcaatatttttaacttcgcccaggtaactgacaaactacattttatttaaatgtcgatttttttcccaagaacttttgtaagtctacaaaagcctgatgtatatatattcccaaaaagcaaattacaattttctttattttttctgttactttgcaaattaacaatgctcaaaaaggcaaattcacattggagtaactaaattttggtacagaataataagctagcccaaaggagtataagtgtaaaacttaagaaattgaacgataaaggtagtagtaagccttggttttccagacgagcgtgctgtgcaaatgggcttgtgggact

SEQ ID NO: 31041 - DNA, 6190 bp, Arabidopsis thaliana landsberg
atttgcattacccaccaactcctgcagtgtaagtcacaacatcagcctcacattcatacctctttatctcaacaaataccttcattgcctcctccattctatctaccttacacaatgcttgaatcaaaaccgtgtaacagttcgcattcggttcaaagcctcttcttctcatatctctcaaaagatcataagcatctgccattttaccagcattagcatatccacttagcaagttagtgtaatcaacaatgtctggctcaaacccagcttcgttcatttgaaccaaaacatatttagcttccatcatcttccctaccctgcaccaaccatacaacaacgaagtaaaataccgcaaattcaccggaaaccgcattctcatatcctcaaaaagctttgcagcatccttaacactaccgtgcttacacaatgcatctagcaaacacccgaatacatactcatctggctcaaaaccgaacttaggcatttcgtcgagcacctcaatggctttcttcaccatatccgcagacgcaaatctctgaaccaaaaccacaaacaattccggttcaattaactgcggattctccttcctcatttcttcaattaaaccccaaacagctccaaattgacgcattttactaagaatcttcaccattgacttatacacttcgatactgtgacaataacgaggttgcttcgccgcccagacgaagaatctgtaacctagattcccagcatctccacaacgattcaaaacccgttcgattaacccgggtcggagttcaacaccggattcgttaagcgcgagttccaacttcggaaccctagaatgaaatttccgcagaattctgtatgatttctcgacatcactcgcgaattcatcatacttggagtttttcgtgcgatcgttgtggctcttctcgagacaaactaagccaatcccgttacttctccggaaattatcttcgagagctctagaaacgtgaaaacttcggtgaatcaagtcaaagcgagacttaaattgagaataatgtaagaaaatttggcgtttgctaagaagaaactcgactatgggagagaatctatgcatctctctcgtaaacggtagcatttatgcattgttgtcatcggcttctcgcattttcttgtccgccacaattaacgacagttacaacgcagtcgtttagattaacgaataattcggacctaggccagatgtttaatgggctttatcaagcgtttgtttgggcctgttaatgtaatttgcgcaataagcaaacaaattctggacaaataacgtgagaagttagggatcgatccataataatgtggggtcattaatcgtacttactataaatttttaagttctcgaagcagggtttgacactttgactaactttcggcgcgaccgttcttcaaatttctatattgcccttacataaatgatgtcattataaattacactttcataactacaaaaactatacaacaataacttagtacctcatgcttaaaccttgtgatttttgttaatatgtatccaaagataaccaaagaaacatgtatatatgatcaaagcattaattaaccctaaattcgcttaatgcaccctccctattgctgtatgcttttgatcaaaatggaaaaaaaaaactaattatgtgataaaagaaaccgttaattatacttaagaagaaaaaaaacgaaatgtttgtgtttagtaaacaggcatggagtgacttatctttccttcttcttcctccatcttcttctctgtaatcttcaaccatatacaaactccagtgaagctaatcactaagctcgcgattccacttccaagtccaatcccaacaatcgccattatcgacaatcctttgttcttcatctcctccaacggatacccaaacaatttcttgttccctataaacgagctcgcattaaatctcggcaagtttccgttacgcatcgccagattcgagggaatctgaccggataatttgttattagagacatcaaacgccgttaatctagcgagaagcccgaactgaaacggaatttgaccggagagttggttatcgtgaagatcgatgacgtttaagtaagcgcagagagcgatttgtggtgagatttgaccggagagacgattagaagagagattaagaacggctaggttaacgagaaactgtaattgcggcggatctcgccggagatctggttggaagatagatctagggattggagatttgtgcaattagagagaaacggagagattgagccacggagagagagatttgttaaggagagtttgtaaattctgccattgttgcaaatgactccatgaagataagaagagaagccggagcaaggatttatgaagaaggattttgtccagttacggagattattcgcgggatcttctaaactccgacggagattcgtcaagcatgcttcgtcgtttgggtcaccggcgaccaaacgctgtgccgtttcgaaactcaaaaggaagatgaggaagagtaaccggtagctaaacgtaaaccggtgatttaccggcatcggagaaattgttcaaaaggtttgaagaagaacgaagctttcacgtgagtgttaacaaaaacaaaaagtgaattttttttgcttgtgagagtgatcgtcttcttctttcggccgggttttaatgcgcacgttagtagcgtcttgggctgcgcgcattatagagatttcatagataagtatttgtccatttgggattaaaattgattttgttaataaattttgattatacgatacaatagtcactttcaagatttgcgtttttatcgttttcagcctttaaaatagtttatatggaatagaccaagatttttatgcttagtcatgtcacaccgcattcgtaattttattataattttttgactaagggtattgaattccgtattattataatcgtatgattcgttcattctctcttttcttgtttttccaacataaatactattagaaggaagattcatatcacaaatgtctaagatgaacatagagatatgtttgatataataaactttatattataaaaatgtgatgatatccgccagttatgttagtgcagagttcaaataaatacaaacacattttctatgcactagtgaaaaagacaaattttatcctaataacaaaccaaacacttgtcttgcattacattagaaaagacttgtgtggtttcaatgaattgtcgacatcttacaaaaatctacatgagcggtgagagagactggacttggacatatgttgcgctaacttcttagtgttgatactttttccaaagcttaaagaaatatagacattatttcatagctacaaatatacagtgatttttaagtatgaggacaaaccagagagactttgatcccatatgtttcaagcaacagtggctttgcagcagacattaatgacatcatccagagatggatgatctcccgtgccttcgtcttttcgaccgtacaataatttcttgcctctgaacacaaacgtacctccctgagaagaagacagaacaaatgatcaaaccaaaaataaaagcagatatcttgtcttgtggagaacttaacaagaaagaacctgttgcaacacactgcttctgtcttcaggagtggcttctatggtgtaattttttgttgcttctcgaatctcgctaaatcttgagaagaccttggtctgcaataatcgaagttttctcatgtttcgaggtgaaaatagtgtatacaatgagacggtaacaatgtttgaggtgagtaggttcatacgctagctgggttgaagaaagtgcggcccaaaccgaagtataaaccaagaacatcatatgcctgcatttaagaagagccctctcaaaacttcaatcaccatttcaacataaaagatatcttaaaaacaaggtatatgtttgtttgtgttaccttgcgttcaggatccgcataaagacattccatgggaaaaggtaactaaaacaaggaaacaatctagactcagtatcttggttaaacaataaagctcccataatacaaggacttctctgggaagttggaacttgctattttgatttatgctgcgcctgttggtatttctgattctatccaaaagtacactatataaagccatgaaaatgcgcttgaatggagaatgaaatcaagctaactcttccctatatctctcaccctcttctcatgttcgagttgcagattttgcaaagaccaagcaattaacaaatcttactaaattgtatcactaaagagcttgagaataatctcacaaaactcaacccaatcttggtctgattttttaattcacaatgacaccaaacatgctcaaaacgcccattagtgatacaactaactaacggttggtcttcgtaaacatgcaatgttaaagtgagaagagggagctagacactcagagatatggagaagactcggtctgatctcatcctcgactcatggctagaaaccagagtactactaaatgcacttatcatcagagaggaaaaccactagagcatagcataacaatcaaaagcaagttcttctcttaaaaagttcaacccaatgaacaagcaaacataacgtacatccaaagaaaacatatccatgagctcagtaagttggtatatatatcgaagaaaatggagaaatcttatacccgagttgcaagtatacgagccttgtcaggagttccaactccaacagctatcaatttaacaccagccgcatcaaatctcggtttagcctctttcaaagcagtagcaagttcccaactttcatataaaaaaaataattcattatcaaaaacgttttacaacaatccttgattttgcaacaattccaagtgtttatgaatgaatcaatttaccagcaaacgcatccgaaatgcctcaagagtacaacggcagcaattccctgtgtccaaaaaaaaacactattcaaacaataatatcccaaaataatgaaaagaattcgttcttcataagcatcctaacatacatctttctgatcccagagatcactgaattgcaggcgttggcctgaagcagtaaagatagagacatcgccgagaatctcaccgatatcttctctgtaatcagtgaaggactcagtggcagctctcgcggcaaccacacgaggcctactaatcggtgaaacggaggaactgtaactggattttaatttggtgacaggaacagcagcaatcgacgatgagaaattcgatggtaactgagacaacatgggtttcgagcacagaggagaaattgtggaacaaataagtggcaatgagctcgaagatcgtagagagagaatcgccattggtgattcagaaaccaaaatcataaactcaatttggcttatggagaagacgagaagaataagaacaagagcatctagaaattaaacacgtggcgaataatggaccgagaatgtatccggcgtcgtttttagttaaaagcccatatttattttgaaagcccaattcaaatccaagtccattaaaacaaaattacgaaaattgctttcgattttctcatccaaattggttcgtcttccccataaactctcagtctctagggttttaaccgtcggcgtatccgccatgagaacactgcggagaaatgttacggagaatcttcttaccatctcccggcgtagaacggagaagaagacctcaccgaataaaacagaaaagtcagtccagatcccagttgatatcatcatcgagatactcctgagattaccggcgaaatctatagcgacatgtcgttgcgtgtcgaacctctggatctccgtaatttgccgtcaagatttcacagagctgttcttgaccagatctttgcatcgaccgcaactcttattctcctgcataaaagatggtaacttgttcttcttctcgtctcctcagcttcaaagtccatatgagaactcgtccgccatttctctaaagaatttctccttatgctataaaatttcgcgtcctgtcaatggcttgatctgttttaaacgtaaggaaatgaacgaaacagtgacagtgatatgtaatcccagcactggacataccttaagcttacctaaaccaatgaagacgagtattgggccgtcaagatttttcgtgtatgaaccgattcagaaacagttcaaggtattgttgtgat

SEQ ID NO: 31042 - DNA, 3113 bp, Arabidopsis thaliana landsberg
cacgtgatatcgctggaaaggttggaccttgaaacaacttatcattccaatgtcatcgtaattctcagatattatagctgctgcaaagcaagtaaactttcaccagttaaatcaaattcagctctaactcttatcgtaagaccaagtataataatacaactactacagatagaagattcctcatctccccctctttaatgttgaaagattagtatgtgatttttgaatttgttccttttttgggtgatgtagaacttggcgaacccatccgagttgcttctgagtggagtgatgatgttgcgtcacctgaagttcaacgaacaagcagaacaaatccacagtgcaatcatcaacaccatagcagagggcaaatacagaaccgcggatcttggaggtagttcgaccaccacggaattcacaaaggcaatctgtgatcatctctgaacatcgtaaaatccaattctttatcgaatcttcttttgggagccttttttatagcctcgaattcttcttgttttcttgttttacgattagaataaaagaaaaagcaaaaaaacggctcttcatgagttttgaagttattgtttctgccttaaaatttctctgccgtaaggcaagaagattcataacactggaaaaagtgatgttctttctgaatccatcagaagaattttgttttgttgcttgaattgtttacatactcttataacttcaatcagtttatcaatttcatacatacatccaaaccttttttttttttttcacttgtagaacaaaatgagtaaatgactatgattatgaatgaaatgacaaaatcatcaaatgaagaaaactcatacgtttgtaaactttttcaatacaaattagtcggtccacaaaaaaaaagaattatacttaaaaaaatctaaaagaataataatgtgtcgttggtgcaccaacttcctctagctaagaatataaaggcaagacgcttcactcagcagcagtaactaaacttgcctccaaaaaccaatcccagatctgaatctcaacctaaacctcagattcatcatcatggcttcttcttctaactacgatggaatctttctcggtatgggtaacccactcctcgatatctctgccgtcgtcgacgacgaatttctcaccaagtaaataaactctcacatccctctttttctatttgtttccaattccttttgctgtatccattgtcgctatcctctctctgggattttggtttgaatctaggttttattacttgattcttcttcagtggcataaactctgtgatttgcgtgcgatttttgatgttgttctctaatcgtgttacagatacgacatcaagttgaacaatgcgattctcgcggaagacaaacatttgcccatgtaagtgaattcactttttctcaatcctagcgtgcatttgaattcaaatggtgataatgaggattgattagtatttactcttcaagttgttctgtaattgatgcggatatgtatatgtaatctgcgtagaagaattatgatttgattgtgacaagtgctatgtttaagggaaacagacacaagtgtggtgatttttcattgcccttaagtgattcttgatgtgattttaatatgacagtgattatttttcaaatactctttgtttattcacatgataattggtatgtttaggtacgatgaaatgagccagaagttcaatgttgaatacattgctggaggtaattcatcttttgagctatcaatagacatttggtgttcatgtgtatttgcagtatttttgatattttcttgatttcgtttggctttcaggtgctacccagaactcaatcaaagtggcccaggtaaaggataattacggtttctactcatacttgttttgaagttagtacctttttttgctaaatgaatggtatctttgattactgcagtggatgcttcaagttcctggggcaaccagttacatgggatccattggaaaggacaaatacggagaggcaatgaagaaggatgctacagcagctggtgtcaatgtgagtctgctttatgtttatcaattattaattattggtggttggttttgcttcatgttcaatcatcaggaaatagactgttaatctgcgcttgttctgtatccaggtccactattacgaagatgaggcaacacctaccggaacttgcggtgtctgtgttcttggtggagaaaggtcagtttacaataattctttctatgtctgcttatcatttgtcttaataagatgtgtttctgctgagttgtactgaggcgtgtttccccttttgcagatcgctcattgccaatctttctgctgctaattgctacaaggttgaacacttgaagaagcctgagaactgggctctgggtacaaaactcatcttctgacctttttattctgagatcggatattgtcatatgttggagttatctgagattttgtgaaacatatttctttcttggcagttgagaaggccaagttttattacattgctggattcttcctcacggtatcaccagaatccattcagttggtacgtgaacatgctgctgcaaacaacaaggtatgaatacatgatcctttatgagagccaggcacagtgatttgtttctcctaccagtgttgtctttggcatgaacagtcctgatatgctcacatatttgacaggtgttcacgatgaacctttctgctccattcatctgtgaattcttcaaagatgttcaggagaagtgcctgccgtaagcacatcctaatctctcgatccatttattccatcttataattgcctaaactaatcactggcgatatactgaaaagcaagacgctgcatctaatgtcttgcttggaccaggtacatggactatatttttggcaatgagaccgaggcaagaaccttctccagggttcccggctggaaggtaactgtagaaatttcaccctgtattgtttgaagaaagacagtttattaatctgtttggttatattttatacagactgatgatgttgagctaatagccatcaagatgtcccagttaccctaagcctctggaacatgcaagaggactactgtgattacgcaaggcgcagatcgtgtgg

SEQ ID NO: 31043 - DNA, 4493 bp, Arabidopsis thaliana landsberg
tagcagcttggatatcgatcaaaggaatcacagcgttgatgatgatagctgcgaggatggcgtttggagtgtacttgaagagaggagtaaggaagagcaatgtcaagagaacaacaattgacattatgatgtttgaaaccgctgtttgacatccagccatgaaattgacagctgatcttgagaaagatccggtagctacgtagcaagaagacatcgatccaactacgttcatcatacctaatgctaccatctctttgttaccgtcgatttggtagtctttcattgcagcaaaggttcttccaatcgctacagcttcctgcgaaaacagattgaaatattcgggtttcaatgaggaactttcgtttaagagagattgaagtatgagtcattggtttgtacttactgttaaagcgaccatgccagcgactacaccgatgcggatgcccttagcaaggttatcaccagtgaagtagattagatggaacgaggaagggttgattccttggtcaaggtgtttcacctttattcataaaaaagaaaagaaaaaagaatcatattaggtattaccacaacgacaaattgtttgaaacgcaagaaactagttagagggagttgagatcttacgatttggactccttgtttgtcggctcgggttatgtagacaaagaaggtggaaacgataactgatatcaatggcgcaatagctggtacccagaatagtttcttgctcttcttcccctgtttcagcatcaagtcaagagaggtcagaaacagatctaaacaaagaataaacttagatgttttgttaatagatatatgtcttacaatgatcttagacgtgagaaggaaggtcaagaatgatgcaccaatgagtatagtctgccaattccactgcatagccaaatttatatgaattagtaaagagatttacccaatggaggaatcaagaaacaaagtgtttgtatcagcgtaaagggttcttacgccgtgatgagctgctttgaaaacggattcaagaacagaaataatatcagttttcttggtgaatttcttgatcccgaggaagcctttaagctgctgaagagcgatagtgatggctgcgccgcccatgaagccaaccacagccgcgtgggaaaggaaatcgatcaagaatcctaatctgagagtagtaaggaagaggatgaacattttgagagccttttcaaccatgaaagaaggaagaaattgttaatagataagagatcaattttttacctgaagaatccaagggctgcttcggttataccggcgaaaaacgtagcagtgaaggcaaggcggagatattcatctggacttgtgtttggatcaatctcagctcgaagcaatgtgcctagcaacagcgaaaccacagcgacaggtcctattgctatatccctagaacttcccatacaagcatacaccaatggaggaacaaaactcgaatctgtaacatcaagaaacatattttgtgtatccaatgttttatcaaatgaggtcaatcaagtgtgagcatgtcaaaatcaaacttacataaaccgtatttgggatcaagattcgccaacttagcgtatccaatatcctgaaatcatcaaggaatatacataagaaacaagcaagtacagataacttgtgatacaagtacttgagtttaggtttttcacctgaggaatgcagagacttgcaatggttaaaccggagatgagatcacctcggaacttcttgaaagtgtagttacgtccccaatcgaagaccggaaagaccgattggagaccgagcataaactgcttagacttaggctgatccttaaaatccctaagaggatcattatgaaagaaagtttctttgaatgtgtacatgaactccttgaacatgttttgctttggtgggattccaactttatgccgagtgggtgaaggtttcatcggaacatgtccaccgtccgtcgtcggacttccgtccacagggtgagctcttgacgacatagctatgtatctctgcaaacagaacacgagactacttagattagtactttactttgcaagtttttgagattatataaattgtgtggatggagtaatggtatcgaaccaggagaaaggatagagataattgggttgaaagatgacttttaagtgtgaattttggagcaacattgatgaagcttatttataacgaaagtttaggatagttttgttttaatttaatgataagagagtggtggtcatataaaattttgatgaatctggattactaagagaccaagtacattaagaacattgaaaagtctaactagaaaagatgcaatttttaattggcgttgatcgacattaaagtttaaacaaattaagtcaatggtttctgtggcaaactttgtgtgcaatactgaaaacaatctcaattcaatgatctcgtttacttttttgctataaggagagatagttgaccacaatagccacgtggcagatagtgagatttttttaaaatgccaacagttatccctcaattaacgacgaagaattaacgttaattatttcctttctttaaaaaaataataataattttagctaagagtagacgaagagaaccttattaattaacatttgatttctggattttttatcatcgttttgggttggacataaactttagaaaaggacctaagaaaacttagaaaacaaacctaactgaacagaaattcggaaagaatacctaaaaggctattatataaaacctaattcatatgttcttttttggtggttctaattgggacttgatctcttgtccaaactctatgtagatgttctgtcaataccagcatattagtttattcattagaatgcattaaaccaacattttaaatcgcacattttttagacaaaagctttaacttgtgcaagttgatggacaatgacatgattattataaaaactagccgcaattcattttcaacctaagtttttctaaggaattaaccggcgtttttctgtcacataagccaatttcgatcacaaaaagctatgaaaaataatacgttctcttttctaatttttatatactttaaaaaccaaatattgtaatcagtttttgctggagccaaagtgagcaccacatgtgttgactttgtaatgtagacaagtatgcatgattgatagtgagttaattaatattctaccgatcgaagagacgctgtaatcgtaaactcctacaccagacgatacctcttcaacattttcctaggtctactcattattgtataattgccagttataaaattgggtgattaatctgatatctatacacatagacaaaaacacaattgaaaaaggaatcaactagtattatactattttcaccaaaaaagaagaagatgattaaacattatatgcacgtgtattctataaatgagaggtttcaaaataaattaattggtgttatgcatagccattgatagttggaaggtgaaacacccacttacctggaaaaagaagaagaagaattcgatctcgctttttagcctttttcctccaaattagaccttttacgtgatttattttaatttattaaagcgaaaagggatcttaaaaagtagaaacagaaaagagagaacgatttaagaattagagaaaaagtacacgagagatattagttaaaagcctcccctttttagattttagaacaccagattgttcatgttcactattcttttctaaagttttaaaacagtaaaatcagtaaacctgaatcatgtccaggttcactgaatcactctctcatcaaaatacaaaacgaaaaccctagtattttgtgagaaaagtacaaaatttacagagaaaatagattttgcttcaaactggaaaaaaattaaagaaagataaacaagagataaaaaaaattatttaacaaaagtgaggggaaaaaagaaatatagatctgagcttttataaatttaatgttttaaattggaataaacattaaattataagagataaagatcgtgattacgaatatttggcttttttaggagaaaaaaatataaaggtgataatgacagaagtaatggaaactaagcaagaacatcaaagcggttagatcaaatgattttacgacaatgccactggctccaaatcaagaaaagcgaaaaggtcaaaagttaggagcgttttttttgggggggtgaagttgacttttatagaaactggtgggcctcgtttgaacgtggactataatgtggctaggttcgtctttggtacaattagccattgactacgtgttcgctacgcgctagatagtgctcaggtggctactagctacatgacttacatgtgggttcacggtcagtcacacactagctcagtataatgctgctagactaaatgtgtaatctaatactatgatgtcaatgccactttcttgattactcgggtaatccactggatgcactccacagcagtgataatctgttttgatatgtactg

SEQ ID NO: 31044 - DNA, 1042 bp, Arabidopsis thaliana landsberg
aaccaaaatacacctttatgcacgttccaatctctctatttaaaacaaataattgagtagttatttaattagtatttagttttggtaaagtaaaaacatacatgtcaagtgaatatatgtatatgacacttcttaaaataatgatatttgatcaaagtaatgatgcacatcttacttctgttataatactttaccaaaagtgtataacttctactaataattaaatcatttacaatgtgagtctatgacctaatgattcgagttatagaagctcatcgattagaatgttacttcgaagtaaagagtggttatatgatattctttgatgcatgagtactaaaatatgatttactaagtttaatgcgttattttgcccgctaaacttagaattattaaaagaaggttttaatgaccaaaaaggagagtttgatgaaatataatactccgatatgtttacatcatatattagatttcttattttagaaaatcgaaatttatgctagcaaacgaaaagattaactttaatttgtaaaaaattaaaagccatatatgttcataaaaaaaaaggagaaatattattaacaaacaaatgttttttttttgctgatggttatcaagatatcattctagatattcaataaaaggcaaacaaaaaaacaaacaagaaaaactaatgcaagaaaaaaggcgttacctgaaaaagaaggcagatcaaagactgcatgaggtttctgctaactgagtcaccaacaaacgccatggttttacctctcacgaactcaaaaaacctatccgggtcaaataccggcgtagccgtctttgcacccgtaaggtttccatttccccttaatgaaatccgtgtcgggtcttccaaacttcatgctattttggtgttcgtgtatcgcccagcacgtcgtgttggtgtagtaagcgtgcctcagggttaagaacccactctcccgaaaatatgtcgcagctgtcatgtgatgcatccacgccgttttccaggttgattcttcagctatagcttaagcgttgctgc

SEQ ID NO: 31045 - DNA, 1871 bp, Arabidopsis thaliana landsberg
tgccttatttctgtgagcattgccacaacatctttcattaaaggtcgttcgtttgccttgttgctaacacacaagaacgcaaccgcaagagtttgaagcatctcatgcattatcgagtcagtccgtccatcgagtctcggatcaagaagcctgctaggatcttttttctcagccaagtgatctctcacccacttaaccaaatgtgcacctcctggtagatccggatctaacggatgctttccggttaaaacctctaacaataccaccccgtaactataaacatcgctcttctcggtaatacgttgcatcgaagcatgttctgtaaaacccaacaaacaaaacaaatcaaaatcaaaactccaaacttagttaagtgtacaagtactttctcaagcttacctggagccatgtaaccataggagccagccatcggaggccgattggtgggtttccctaaatcgattccggtatttggataaccggagatggttctagctaaaccgaaatcagctaagtagggttcaaagtgaggacccaataagacattcatagctttaacgtcaccatgtataattgtggggagacaatcatggtggagataagcaagtgcatgggccacaccaagaacgacgtcgtatcgcgcctcccaatcaacacatcctccttttccggcgccgtgaagccgagaactcaagctaccgttagggagatagtcgtagaacaagagtttcagattccgattagagcaccaaccaagaagacgaacgatgtttctgtgacgaatcgatcctagagttttaatctcggagttaaacgcaccactctcttcctttgaccacattttcttcaccgcgagtgactcgccggagggaatcgttatacggtaaaccacaccggagcttccggttccgatcacgtttgctgacgtcagattcttaacaatgtcgtcgattgaaaaatcgagtttttggtaaagcgtcacttcccacgaatctatttcttctccgaggagttgttttccggcggctcttgcccggactagagtgtaaactgccatgagaacaagtacggcagtgacgacgacgagaattaaaatagtcaatctaacgacggagctgttcctggtcgtcgggtcgggtcgggtcgagattgcgttcgagatgtaaagccctctgtttgaggcgagatcagaaagtggaagtcgccggaaaaagggcgtgttgggtaaatcgccggagaaatcgttgtaggagatgttgagagagacgaggttttgcaaatccgttaaaacgtttaagtttccggtgagttggttgtgagatacgtcgagcactccaaggtttttcaagtcggagaatctagacgggatttctccgacgaacctattgcagctgagattaagagatatcgccagagacgggatttgacccaattcgtcagggatttcaccagaaaagtcattttcgccgagattgagaagctgtagactccgacaagtggagatttctctagggatttcgccggataatctgttcttggcgagattgagctttgtaagctctgtcaacaatcctattcccggaggcagagtactggacagagcattatcggagaaatcgatgaacttcaagctctttgggagtgtagtaccgagcaatgaaccggagagactattcgtgtgaagatcgagaaactcgaggctttcacaaccagagatcgccggagggattgacccgacgagacggttctcacttatatcaacaaagttgagatttttcagattcccgatttccgacgggatacttccggcgagtctgttaccgttgagtcttaaccggtaaagattcgtacagtttccaataaccggaggt

SEQ ID NO: 31046 - DNA, 901 bp, Arabidopsis thaliana landsberg
ggaaagacattaaagtgtgatttaaatagactttgtaattttagataagacaacagtctgtatggggtatagggataatattggttgtcaaattaatggacacgtacgtatgattcattcttatttcgttggtacttagtcgcttaagctctctgctgtagcctagtatgaactcgttgattctagaattcatagaactaatgtccttaaataataaagggttgcacattgctggtaaaagaattcactggattcaatttaggatactacacgtaaaaaggcatcaacgcttgcattagattgatacacgttatgcgcaatggacatcttgggttaggtacaaaattctagtggataatgaacaagcatttttgttttttgaaacataaaaatgcagtatgatagtggtttgaaatgcagtatctaatggataatgtgaaaacattggttaatatttaattcttatcagcgccaaatgcagtattgtagtcttttaaataattaaattaccaaatagcaaatattggaaaggtaaaaacatacgaacctgttataatattaccatttttttgggatgagttatttaatatttataacgaaatgtgatgaaatgactgttttattgtcaactgagaaatgtctttaaggatatatttatatattttatcggctgattcggttagtttcagaaggaacgtaccgaactattacttactggaattcttccgatccaagtagaattggcttacccactgtctgctccgagtttagaatacctgacgactaatgtcagagatagtcaggccgccgcatgcattttttactatcaagtaaatcaattgggctaacacccaacttatagacttcctaaacaaatgtattttgtttttagggacaaatc

SEQ ID NO: 31047 - DNA, 2816 bp, Arabidopsis thaliana landsberg
ccccccctggtaaataaaaaggttatttaggatgaaaaaaaccataaaagccgtgaaaaatatttaatttagccccaaatcaaatgaaaagcgatctcaagcctaaatagacaaggaaccaagcaataggttcctttaggtcttttagctcttaatatctcaaaattccatgtctacaaaagttaattttgtagtccagccatcttgaggttgtcaggttgggtaccgtttcatattcacacctccttgatctctaaacgaaccatactacttccaaaaatttcgactttacttttgagtaaatgagtaaaggcatgaatattaagactgcatgtttccctgacatgaataaccactaatgaattctgtgtgctatagtggagtcaagctcgagaccaagttccgtactatcatggacccttaatatatactttccatcaaatattttgggagaaatatgaaagaccgagatcgacaatgatagtgctaagtactagaagactaaggcaagtaaaccataactacaaaagttgctggagaattgaactaggttctaaaactgaataagaaatagaaaagaaactgtaaagtgaccttcataggcttctcgaaccatctgatagctgacaaacccagaaaacagagtaacctgcaaccaaaagcaccagcatgtcaatttctttctcattagaaagtcacgaccatgtaatgtgtccataggccttttgaaaaccattgagcttgaagttaaatcatctttacaaaaatcacaaacaatactttagttaatttgtttaagatcgaccgttgcaagcatcagtgaaactaccgacatattcctctgtatgacatggttaaaagatattttcaagcattaaccacaaattaaggaatctatttgaaactcatagcaggtggcaaatgaataattgatagatgattggcagcaactgctgaaaatagtgaagcataggtgggaaaaaactagaccttaggatctttcacagttctagggtcagcattcgtattagaatcactcgaatctttaacagttgcacttggaaaggctgccccatcgtgagaattaagtagtacgcaatagcaatgatctttatctgtcagaacctgaaaacatcaatgacaaagccaatgaacaaggttggaaaaaaactatggtcagtataacaacttccatgcatgaaacctaaccatacgacttaagttatttataggaagcataaagccaaactcctctacgcctaagcaaaactaaagaagaagacaggccaatcctctgaagaagataataaatagcaggtactaaactcaaataaggagaggatgttaaagcaccgcaagaggtagttgaaataatattatctggatcctccagtcctgtaccaaaagccaacaaacgtatcctacaaaagattttactatccagttaaggagaaactaagaatgcacgtaacttcaccctagtgacaaaggggagttcatgcatatttcctcaactaaaaactattcttccagagccgatttcattatgaacaaaatgtcataattcctttgacattcatgtttagagtttctttgaacgaaatgactacataatataacagttggaaggacaatacaacaaaaagggagaagaaaatttgttaccacagcatcaaaggttgagtcaaaatcatctacggcaaaacaaatttctgggtaggcaggtgttgtttccacttcctaggtaaacaacaatggaaacatcaaacacaaattccaaaaggacaaacattggtatgagaaaagcgactatacttgccttctttgagtccagatgaaaattaacacgactaggtgatgcatatacagtttttacaacctgcacaatatgaatgtcagattagagaacatgattactattgacttacagaaaatgaaaccaaagaaatatccatatgcttggtccaagactcatgtgaaaagtcctctccttatgaaaacaaaactgaattcatattccgtttccttactcttttcttaataggttgatgattagaacaaagctgcactgatatattttgaacagcagagtatataactactctttggcttcagtttctttttcatatgaaaagattatagaagagttgaaaagtcaagagtaatattatccaaaactcttaggatctctcaccttgcatataggcgagagtgtcgtatctttacttccttggtacatctcaagggcctattactttaaaatcaccagcacgttaggaagatcttgtcatggttccaacgttaaaacaaagtgataccattctagtatatactatatctagtattttatcattgtattgagcatgctgaaaaaaaaacacgaaagaagagtaaaataaattaagaagatcatacagttgaattaggagagaaaacatataactaatcaccccaaaaaaaaagaaggaaaggagaagcacctatgtatctctgatctctctatggatttatactttagttaaccctcattataaaaattgattgattactaaattttattttctttttcagtggtaagataaatatgttgacaacaaatgaaataagatattgcaggttaaattaaccaaaatgaagtaagatattgcaggttaaattaaccaaaatgaagtaagatattgcaggttaatttaaaagtttggttaattaccaaaaaaaaaccccttttgatagtaaaatactcgcttttatctttttgttcgccaagatgtttaatttaaagcttttttaattcaaaaaatctttttaaaaaaccc

SEQ ID NO: 31048 - DNA, 605 bp, Arabidopsis thaliana landsberg
aacgaaccaaaaaacatgactcactatagagcataaattagagtatatgcatacatttcaaatcttaccaatctggtaggtcttgtctttccttttttgacagacaatccttccaactcagcttcaaagctatcaatctacgactctagttcactcactcacatatcaaaagcacgaaaataagtaatgaatcagctacagtactgataggagatgctccaagaattctcaattttacaaaagaaacagtctgaaagtgagttggcctttaaattttttgcttttaaaaaaaaaatcttgaaaatcaatatttacataaatcgtttttgataagtgactactagtaagatagaatgtgatgatttcattattaacacatacgtttgattatttttttttgtttttttttgtttttttttgcttgctaagaatgaaatatgaatttccaaagtaatgaatgatgttggtattgcatggtggatttatttggttgcatcatgcatggattttatttccttaaggtatatagaaaatacgaagagccaaaatgagtgaaaaagagatatcttctcttgttggtcgtcctgttttttatataaactagt

SEQ ID NO: 31049 - DNA, 3727 bp, Arabidopsis thaliana landsberg
  unsure (1)..(3727): unsure at all n locations
atactcatatgaaagaatcttgtattagtatatgtatgttatcatttttatctcctatttgtacaaaaatttgtgggcgcaatgacttattagatgttaaggattgaaactctgtatttgattaatgatttagagagcgacgccacgcgctctgccagagctggaatgcgtgactctaagttctgcacatcctccatctgcaacgacttttcggattggaactcagaatcgatcctcgtgaattcatttgcttctgcttcacatgtcactttgttttggctcatcatctttgagaccaatgaccatttcccacaagcctttgatccggacatgaagctaaacagagattcaaacagagccattgttacagcttctgctcttccaaatacaaccaaagatgcattggtggaatctttgctttggcacactttcaaactcttgattactttttggagtgatttcttgaggaactttcttgagactaagtatttcttgacctctccggatagatctccacgctttcttcgtagaatagattggatctccatgagaccttctttcatctgtgaaatcgcatccttggcgatattgcacaaatctaagatcctgagagatccatcaagaagtttctcaatctgatcttgagataaagctaggttggtgacagacaagcgaatcatcttttcaagagaatcatgtaaatcttgaaggttgctaagtctctggcagatagaagatgaagaggctgaatcagaagatctcaatctggtcaattgctcatcgacatgagcggcttgagggtgttgtctcgaagggtagctgttagatcgaacatggaaggagactgccatttttgttgagcttttcttctttgttttgagaaggcttaaagagctaaaagatgtattgttctgctttcataatctcnttggtcatctcatatatacacctntgatggggagagacaagaggaatctcaaagctggctcagatttaaatcataaaatcctatgtttgtgcaatgtctccctccaaccacttatctcaatgcataaacaataagaaaaaagatatgattaagatatggattctcatataaaatgcaaaataatcttataaagaatgcaaccgcacgagcgactctgcacttacacgtctagttttcattagaaaatgcagaaccagcttggcttttgtctccttggtagcaagatccttattcctcgattttgacatgtgaactatcatactcactacaacttgtgattttgtttttattctatcatatttgttgtttcccaacacaccaacatttttcagacttattattgtaacaacgtgtgtatttcagagatgcctttataaaaatacatataaagttcagtggcctaagctgttaaacacacatagttaaatattgcaaattatgtttatccttgacatttaaacttgtttttgttcataagcttttgaacagagaagaaaacagagcaattgcaagcgcttctgcttctctgtaattacacaaccaagtgattcatcatccatgttctctttattctagaaaaccttaaacgacttgattactttttggatttttttatatatatagaagcctttgtctcttgaatacaagaaaaggccattacaagaaaagacaactacttcttctgcattcatcgcttttgcagtccattcatatatacaatcaaaactggaagacctcatgaaattttttcttattaatgactattagcgttgtttatgaatttcccccctccataaacatatgatgtgattcacattcaaaaacaaaatgcaaaatacgatttgaatataaaacaagaaatgaatgtgcacgacggattctgcaccttattggcatagtttaaggcaaatccagaaaggcttgtctccttggagttgatggtaacaacaccatgatattagtatattacagttcatgacacaactacaagagcctcataaatacttgaaacaaatcaaattttgcagtgtaggaggcagacaatatctgaatacattgatgtatccacgagtggtactaatatcatattctttatggagacaagccttgctggtagtgcatgttactacaccaataagatgcagaatcgtagataatccatgtgatcatatatattgcttttgtacgttggatgatgcgttatggtgagtagttggagggagacattgcacaaacatcggtttctattattcagatttgaacaaccataagattccttccttaaacgatgtatatatgtctagaccggagagccattgaagacagaacaaacatctaagcattttcttcatctcaaaaacagagaaagaaagctcaaacaaaaaaaatggcagtctccttccatgttcgatctagcagctacccttcaaggcaacaccctcaagccgctcatgtcgatgagcaattaacccgattgagatcttctgggacagcttcttcatcttctatctgccagagacttagcaaccttcaagacttacatgattctcttgaaaagatgattcgcttatctgtcaccaaccaggctttatctcaagatcagattgagaagcttcttgatggatccatcaagatcttggacttatgcaacattgctaaggatggtttgtcgcaaatgaaagagagtctcaaggagattcaatcgattgtaagaaaaaagagtgcagatctatccgctgaggtcaagaaatacttagcctcaagaaagtttctcaagaaatcattcgaaaaagtactcaagagtttaaaaacaagccaaaacaaaaacgacgctttggctgtgtttggagaagcagaaactgtaacaattgctttgtttgaaagtctatttagcttcatgtccggatcaaaggcttgtggaaaatggtcactggtctcaaagatgatgagccaaagcaaaggtacatgtgaagctgaagcaaatgaattcacaagagtagacatggagttccaatccgaaaagtcgttacaaatggaggatgtgcagaacttagaaatatgcattcaagatcttgaagatgggattgggtcactctctaaatcattgatcaaatacagagtctctattcttaacatctaataaatcattgtacccacaatttttttgtacaaatagaatacgtaaatgttaactaacacaaaactaatacaacattctttgatacatttaagttctaccatttaaacattctttctcaacataagaactcaaaaattccaaggaacaagaattttacaacttttatggttgcaaattgtaacatattttattatattgattattggaaaaaattcctttatggtatgaaattctagtatcgtatgcttcaagaagacaatgggtttgctactttgcttgcatgtgtcaactagtggacttgttactttcgcaccaagaaacgatttgctctgttttaattgtcatgacgatttgggcctataattaattcaggcccataaattaaacaaccccaaaatggtcaaaatcaattcatcttcttcgtgatgatcgtaatcaccaaccagtgacctaacaatggccgttcctccattattcttcctcctcacactcctctctctcccttctcttcttatatccgccggtgcttccaatgcctatccttctattcccggagccggtccgacctatgtaagctggtcacacggcggtgaaccccg

SEQ ID NO: 31050 - DNA, 1543 bp, Arabidopsis thaliana landsberg
tcatacgttatttgcattgggtttgtacaagttagtagttaactgttacttgattcatatcccaagtattggtttattaacgctactcgatgcttgtactgtattagtgctgatagaaccatgtacataggttggagtttgatagatatttggccatttggggatctaggaatcaatagtttatcaggtcctatcctttagcatgttctaaagtttagtgaagcatggttgtctgttagtttgatggtagcttttagaccctgaaagtttgaactttgtgagtacaatttacttgtttcaacattgggttggtagctgatactcccattggttctaactagaacaggaactgcaacgtattgtcatcagaagaagagtatgtaattgaatatacgtgtagagatgtttcaatagatagaaaaagaggaaatgatgtgaagtgaatttggtgatagtttattgcttcctgctcaataactaatactgcacgtctctgaacctggctattgcatagtactagttcatttgtgctgatagaatcatggtatatagtttagagtgcgttttgaagacatcacagtctattgtcctgtcctaattgtcacaggtcctggaaggtttcacagctactcttgtattgattcattgattgtttctctaagcctgtacgggaaatgtggtagattttaacacaatatgcatttgaatgttaagagttttcttgaacaagctgctgtttgtcccactcattgtcctaggtatttccctcatcgacctagaacctcctttttgacagctcaatacttgtttgcactaccaattccagagttagtattaggcagagattttttagtgagtgtgtgcatatataatcttagcctcgtaaccactttaaacaacacactagttttgattctgtggcatatcagtgttagggcctcaagttaaagaagtgttttggtagctaaaatcccattgtcccctacttgaatatgcacaccaaacttttagttttgagaacaatcgatgattgctaaaattagtttgtgaaatcacaaagatgacaaagaagacttgatccagagattcaaaggtctgaaaatccccttttgtcatctatatatatgtgtgtatagagaattagagatgtttcaacagatagaaaagtggaaaggatgtgtattgagtttgatagtggaaatcatttggcattgcttcatgctcaaaagagttatgtggcccttaaagttgatactcatagcaaaacagactttggaaaatgataacaaactagccaaaaagtcgaaacataccaaaaataagttgcgtcgttgaaacattaccaaaataagtactgataaaacgtaaaacgacacgatccacaaaacaaacgacaccatcccagagaaagggtccaccatactagaaagacaaaatagtttcatcatcaaaatggagggataaggagacgaatgacaccgttcttggcgatgggcttgatccgacggcttgtgaatgtcaaacaggagtggaagagcattag

SEQ ID NO: 31051 - DNA, 541 bp, Arabidopsis thaliana landsberg
cttggggattactccggtgagattcagtgaagataaagtgagggaagtaagagacttgaggctccggagactagtcaccggcagagaaccttgcaagtccatacctttgagctgtatctccgaaacttcacctctacggttacattttacgccgacccaattgcagggagatgtgtcggcgacgtgccaggaggaaaaagcgtcgccggagatgttcagttgagacttccatgacaagagagcttgaccttgttggtcgagagagaaacaggggatgaagaagaaacagagtagggatgagaagaaggagagtctatagatatttggtggcatcggagaagacgaagatgaggaagaagaatgagagatgtgcgttgggattgtaaagcgaagaaccaatccatcggttttggttttaatttgtttataggaaatatataaataacacagagccgagagagaagttcaaaggaggtttttgacccaaaaagttctatactaaccttagtatatttatcttgctttgattttgaaaatgaaa

SEQ ID NO: 31052 - DNA, 3068 bp, Arabidopsis thaliana landsberg
gcgaaaccatggtggtggctcttcggttttgaagttgatttcatcggaaaggttattagtaacaagaaacgagtctttttcaagttgggcctcatattatttaatgggccttagttagcctatttgcgtagtagtgccgagaaaataataaaattttagctttgtgcccacaggccacaggttttgtttagctttgagtgttggttacttggttttcaaacatcaaccgaaaaaaacagtttcattattttgcaacaacaaaagaaatagtatgtgttttagattggacccgttaattccttaaaaacaaatgcaacagaataaaacatatatagttttgaggaatatttggttaagttgttgttatagcacacttcttcctcattgtccagaagacaggatagtatcggttctgcaacagacacacacaacatcatgcacaaattaaacccatctctggatccaaaaacatggaaaaaaatctgaccttcatcatagaccgggggtttgtagagtacgttgtttctattgttttttctttctgcaaatattgttaggacaaccactcatataagtgaggaagaacatgcatcatgagatgtttcatttctgacaggcaaatgtcattgccattatattgggtagatttacctccatctcaaacccataatgtgaagcaactctctttacattctccaaacttagctcaatcgacatttcctaaggagaaacaagatatatatatattattgttatatcaaatttatttatctagcgagagattgtgtgacaattccaatgcttacattttcaaggccctgctcgtctgcaaagtgatacaacagaggtcctagatttatcaaaacctgatggataaattcattaatttagataggcgagtgatgaaatatcaaagacgttggaaaggagggtacgtataggaaattacgtactcctccatcctttaaaatcttggatatggtttcgatgtactcgatgatgttatgagccgtgtcaatgaaaaagcaagtcacaactgcatcccacattcctgaaactcagtgatgagtggtgtatttggtataaaacatacacatattggcttaaacaaaagcaagtagtcaccatttcttacctgcttgacttgattcattgaatacttcaacaaaatcaccacgacacattgagaaactttctgttactcctgcactgctctcagagagtgtttacattaaactttttagtaaattgaaataaatgattgtagtagctccatgaaatccccaatacaagttgcttagtccctttatccttaaagctatcaaaaatttccaaaccataggcaaagtactctctctgataaggcataccttgcaggatgaatatcaggaatagaaatagggcgtagttgatcatcatccgagagtgaattgcagttagtgtgtatccaggggtatattgtccactcaccaggcaattgtgtactgatgaaaaagaataaaaaaaaacaatagagaaaaactcaaaactggaacagaatcaagaaattaactcaatcaaatttagagactctccaaaagcaacttagaaacacacttataagtttgttgctggctgatgttaaaaatgtataagagaaaagtaagaaactcttactaattaagaataaaacttgagcataacatcatgtagtatgaaacttcattgccttggcttctgaaacctgttccaatgtacaagagttgttatattaattcctcgctatcatcaaagcttccaaaaaaaaaaaaaaaaaaaaaaaggtttgcttctccactgcatgcctagacaagaaatttcaagggccagccgcccaagtccagcaccagggactaaacaggctggacgagtgctgcaaatcatatacgttaactttgtaagcagagtttatggattagacagcaaagccaccaaatttagatattgaatggtaaaacaaaaatactcagaatgcattgatgggaggtcagaaactcaaaagtcagaaagtgtacctctccttgtgacgatcaggaaacaaggaatcaagctcttcaaggataggcttgtagcattcatctcgttctctctgaccctgtaagtcaaaatattgtatataccactaaagttgtgatcatgatattagagaaaggatctcatccttgccatcatgacaaacaaaaatatgattacctctgctccccagtctcgaactatattccttattacccaacgaacctgtggtagaatacaacaaaaaccatgcatgcacatttctaagtaatagatggtgagcaatacacacaacatccaacatatatatatatatatatatacaattgtactggtgtgcgtgtcacctctcacctctaacatgtttcatgtacattttgagaattgaggatatattctctttatctttggtcacactaaaatatctctacaacaattatgagttgctaggatgaaaaaaaactaatataatcaaccatagtaaaagtgaaaaagcataccttatttacatcaaccagaggaacatgcgcctgtaacgaagaatccaaccaatcatgagatgaaaatggtacctaagaaagaaaagagagcaacattagaattagtattacactatatgaggtataaaagtatatgagttggcatgattacactgccatggtcatgatttaagtggcctccatcaaattcacatgtcttgttattgagtcttatctctgcattcttgagggaatgatcatgatgatgttcctccctttggagctcctgcatttatacatataaattaaagatttcaaaatgaaaaggataaatttccaagtcttgatctgacctccatagacagtgctcctgttattggctcgcgcatgtgtttactcaagtctatagggggctcaaaagcctgccaaataattacaggacatggttcaaattacgaattacaaatcaaataaatagcatgaagcaattgaaacgcaaatggaatttgaagaagatatgtttccaactgacctgaagcatattatatatgaaatgtg

SEQ ID NO: 31053 - DNA, 1395 bp, Arabidopsis thaliana landsberg
gtgaaagctccgacatcgacattgtggcgaacgtccagtgccggtggctttttgatttttagggttttcagtcgtatatataataacctataagcccatcttattatgggctttcttgtgtctttggcccaacaaaatatggcagcgacgactctaatctaggattaacataactatgttagggtattttttttttggtatgaatggtaaatttattcaccaaaaaaagactgttttacaataaatgcaacatcaagctgaaggtttgagaatagaaattaagaaaacgaacaactgaaaaatagttagtgcggatgagtatggctctcgtttcaatacatttatttgcttagttttacatctaaccacaatcaaagagtgtttttggattatcaccttccgtgttataacttagatatgcccaaaaaaaacacaagcaaagttgtggtttcaagtaatttgggtcattgggtggcttagagcatcttcattggataaaagttgatagatgtctttagtattaataagtaataaaattaaagacatttcctttttgatgtgtctaaaatgtctttaggaagacacaaatttcagttcaaaaacctttattattttgttattatcatttttattagttttatatttagagacactcactaataatcaccaatgtggatgatcttagtgtatagaacttgaaggttagtgggttgaatgatatctagctgtacaacttgtaagggagtgcgtttggtatatacctctaaacaattaactatcaaacgcacaaatatatacggatttattttagacccctcaagtaaaaatctcttaaacataaaactcattcgatttattaaaagatgatgcctaaattttttaggcataaaagaatgtcagtttgtttttaattagcaccaaaaacgtgatacaatagattgaaaaactgaaatgatgaatcaatataattaagatatcgcatcacataatacgtaaaacaatgaaaataaacaaattcatgtattgttttagtaactaaataaatttaaaataacatataagcacaatagtggatgatggttacactatctttgaatttttaaatcgatattagcaatttttaagaatataagttttacacatttttaataagcattaacataaaatataattaagcgagatatatttaaaacgaaggagttttattaaaactttgtacataaaggtgattttcattaataatttagttaaatattttatatgcacatactattaggtaagggtttttttcattagattttcttagttgagagttttttttattataaattaagttaaaggttttaaaatgaatcaattaaagtctgcgggttttattcaagtattaatcttaga

SEQ ID NO: 31054 - DNA, 2035 bp, Arabidopsis thaliana landsberg
  unsure (1)..(2035): unsure at all n locations
cgaaaaaccgctttctttttgcttactagacatacacaggaaatatattgattgctgtaaacccttttattcaactttcgaatctttacaatgaccatatgatggcacaatataaaggagccgctttgggagaattgagtccccatccgtttgcagttgcggatgcagcttacaggtgcttgccattcaactttgaagtttttctcttgttccattcatcattggtggatttctgttttgacatttttgttttctgtttgtatagacaaatgattaatgagggaattagtcaatcaatcttagtaagtggtgaaagtggagcagggaagactgagactgctaaaatgcttatgaaatatctagcgaaaatgggaggtcgagctgtttctgacagaaggactggggaagatcaagttttggaggtaactaatggcaaatagtttattatagaccttgtggattgtcaaagacaggatttctagagtttagtgaaagattattctttgacatgaatggtttgtgtgcagtccaatcctgttttagaagcatttggaaatgcaaaaaccgtcaagaacaacaattcaaggtgaatgtaacacacacacacgcatacaaactcacaaattttcatcatttcttgtactcaccatccattgaccaaatatttcatcaccttttcatctggacaatcattatcatgttgcagtcgatttggtaaattcgtggagattcagttcgatcaaaggggaaggatatcaggagctgctatcaggacgtatttgctagagagatcacgggtttgccaagtgtcagatcccgagagaaactatcactgtttttacatgctttnnnnnnnnnnnnnnnnnntaagttttagatcaaaattaacttttaaaatgaccagtgaagtagctgctgattctcagcgtactaaaatgtatacttatttctactttcaggatgctaagaagtttaagcttggtgatcctaagatataccactatctcaatcagtctaagtgtatacaattggatgctatgaatgatgcggaggaatatcatgcaacaaaaaaggctatggatgtcgtcgggatcagttccgaagagcaggtacctccatctgttaaacatagcaaaacctgatatgttatcttgatcaccaacttcttaacatttccggcatgcctttaggatgcaattttccgtgttgtggcttccattctgcatcttgggaatattgaatttgctaaagggacagagattgattcatcaattcccagagatgaaaaatcttggtttcatttaaaaactgccgccgagcttctcatgtaaatggcttgacttatatagactgaagtgggttgcttctgtatgtgactgaagtggggatccttactagcatattcttttgctgcaggtgtgatgaaaagtcacttgaggattctctatgcaagcgtatcatggcaacccgggatgaaacaatcacaaaaactctcgatccagaagccgctcttcttagccgagatgctttggcaaaagtcatgtactcaaggttgtttgactggtgagtttctctgttctcaactgacgaagacattctcagtagctaattctcttcatttgaagacataagtttgaattgtatttagacagaactgttttatactaattatttttctgtctatgcaggctcgttgagaagattaatacttcaattggtcaagatcctgattcaaagtacttgattggtgttctggatatatatggattcgagagtttcaagacaaacaggtgcttaaccggtatgcctgttgttttaagattgcatagatgtgtttcgtaacaataacaggtctacattggaattctggttgtttaacataaatatggaaatttaaacttgtctcatgtcgttgcttgtacatagtgttctatattggtctgatccatttcatcgtcaaggcagtgatgtttctaacatggacggttgagatttaaataattccaaatgttgtttgagcttgtgactctacctt

SEQ ID NO: 31055 - DNA, 1391 bp, Arabidopsis thaliana landsberg
tactaataaccatatttgcttgtatctgttggttcacgtttattaaaattcatttggaggtatcattaaaattttgcagtcttccattaaggatgtgtcaaagaaattcttgccctgatgtactgtccttctattatttaatcaggacattaaaaaatggaaactggccgatccaagaaaatttcattacctgaatcaatctcaatgcattgagttggagagaatggatgatgcgaaggagtatcgtgaaactagaaaggcaatggatgttgttgggataaattcagaggagcaggtaactttttgttttttggtcatttccttggtaaatattatggtatcgacatatgagtgtcttttgatataactttatgtcaggaagcaatatttcaagttgtggctgctattcttcatctgggtaacgttgaatttggtaaagggaaagaagcagactcgtcagccccaaaagatgacacgtccaactaccatctaaagactgcggctgagcttttcatgtgagtaaattatctatgaatttataatgtgaaatcttcgtggaactgattcattgaagatgggataaagaagtagttcctgactccttggatttcgtcaggtgcgatgagcaggcacttgaagattctctttgtaaacgtgtaattgtgacacgtggtgaaaccattacgaagtgtctggatcaagaatctgcggcactcagcagagatgcattggcaaaaacggtgtactcaagattgtttgattggtatgtctaatcttaaatacactcagaatttgggtacctaaatgcttctctttctttgcatacgtactttaataaaactttcttaatttgctctattgctctttcaggattgtgaacaagatcaatgattcaattggacaagatcctgactcagagtatttgattggagtgctggatatatatgggtttgagagttttaagacaaacaggtgcttaagcggtatgccttttgtttgataagggaatgggaccactttagagaaatgctatggaacttagcctgataagaatataaggttcagcattttcacatgatagcctcttgtttactttgttggttctttatggatctctagttttagtaagcaatggtaagggtcgtgaatgttgctctcctttcttatttatatatattgaaatggaaagccatagaatatatcacatggattttgcttgtgttatccttgaaacatgctttgtattgcactttgcaattttctacagcattgcatcaactttaccaatgagaaacattatccacactttaatacagtttgcctgaggcttgatcctcgccagatggtggccattctacagcctgatgctgacataatcatgatccacattt

SEQ ID NO: 31056 - DNA, 1565 bp, Arabidopsis thaliana landsberg
cccgcgatctctctaacaaataagtcctgatagcagcacctgatatccttcctctttgatcaaactgaatctccacgaatttaccaaatcgactgcaacattataatgatcatgaacatgaatcaataggtataaggatattcagcacaaagagagaagaaaatatgtacgcacacacatatgcatatgtataggtacatttatactatatacaccttgaattgttgttccttacggtctttgcatttccaaatgcttctagaacagggttggactgcataaaaaaaacaccaacatatctaagaatcgacttcaccgaaacttgactttgacaatccagatggtcatactaaaaggtataacatggataacctccaagactttcttttcgactgtccttccttcagaaacagctcgacctcccatgtctgccagatattgcatgagcaatttagtagtctcagttttccctgctccactttcaccacttaccagaattgattgactaatgccctgatttttcatttgtctaccccagtggaaacaagccagagaatgtcaaacaggaaacaaccagaaccaaaagaagaagaaaataaacaccaaaattaaaaatggcaggcacctgtaagctgcatccgcaactgcaaacggatgggggctcaattctccaaagcctgcacctttatattgttgcatcatatggttgttgtaaagatgcggtagtcttctaaaagggtttacagcaatcagaatattccctgtataagtctggaagaatagatatattagcgcaaatgcataacaaagtgaaagaagatatagacgttcaagaagctccagtgagcagaagaaattgacatatatcagtaaaactcatttgtaatgaaattcaatagaatactcacatatatctcattgatatcaaatcttgatttcatattttggaggactcctggttcatgtaaatatgctagccttgtcatatcatccactccagaagctggagcttcaacatcttttgggtaagcatttgaaactttaatagccacctgaaattttccaagaatgtaacaaagtcacttaatttgaacttactccacgtataaacaaacaaacaaacaaacgtaaaatttcaaaattgagaagttgatgggtaaataatgattcaaactggtaaaacataccgtcttccctgaagtacatttgaccttaatatcacttcctttaacctcgataacttcaccgtctatccatgccacttctggatcttccacccaaacgcaagagccaacattgactgtagtacaagcctgcaaaaccaacaattcagatacttctattttcacagctttatttcaacttctaaaacatagtatgagtatattccctttcaaactagtaacaagccatatctgctacaacaagaaactaaaaacagttcaaaactaaagttacaataagaagaatccctctccgaaagaggaccattctatactctaggtactacacttgtgtcaaagaactagaacccctaaatggatgaacttagaaccttgatcccc

SEQ ID NO: 31057 - DNA, 1522 bp, Arabidopsis thaliana landsberg
taaatccttatcttcttaaccttggtcttgtaattcaaacaaatcgtttttcgtctcctcaattttgaattcttttataaagatttcacccttttcctcctcgaatctcgaattgcttctactgattatccaaattttcttgaggtttgtaacgcttttgaatttgggttttagtgtcaatctgtaatgatggaggtaagtttgacggcgggagcaatcggtaagataatgaatggagaagtgacgactgaagcagatatgattccggtgttgcaagtgacggatttgaagcagattatggctcaacaagatccaacaagagagaggtttaggatggtgttatctgatgggacatacttgcatcaaggaatgctaggaactgatctcaacaatcttgtcaaagaagggactcttcaacccggttctattgttagacttactcgtttcgtcggtgatgtcatcaagggtcgaaggtaattggttgtgaacatgattttgaagtttggatatatagccaatgatagttgcttcatgttagagactacattaccaaaatttcacataatcttataaagttttgtttttgatgccaggattgttattgttccgcaactggaggtgttaaaaacgatttctgatataatcgggcatcctgttccaggaggaaagcataatgatcaacgtggatcagattctggtattaagtttaatacaactgagcaacatggtagtggtgtccgccaagtaatcaatatcgagccagggagaagtaatgcagctatttcacctcaggttggtggtactggttctagtgttcctgcatcaacaacaccttccactcgggcatacagcaatccgtcttcaggtaatggagtcactaggcaggactatgctcgtgatcctccaacaagttatcctcatcagcctcaaccaccaccaccgatgtatgcaaacaggggaccagtggctaggaatgaagtacctcctaagataattccagttaatgctcttagtccatattcaggtaggtggaccatcaaggccagagtcacgaataaagcagcacttaagcaatacagtaatccccgtggggaagggaaagtgttcaactttgatcttcttgatgctgatggcggagaaatacgtgttacttgttttagcgctgtggctgatcaattctatgacgagattgttgttggtaatctttatcttatctcgaggggaagtttgcggcctgcacaaaagaactttaatcatcttcgaaatgattacgagatcatgctggataatgcatcaactataaaacaatgctatgaagaggatgctgcaattccgcgccatcagttccatttccgtaccattggggatattgagagcatggagaataacagcatcgttgatgtaattggtattgtgtcatctatcagtcctactgtaacaataacgaggaaaaacggaactgcaacaccgaaaagatcacttcagttgaaggatatgtcaggccgaagtgtgaggtactatg

SEQ ID NO: 31058 - DNA, 3407 bp, Arabidopsis thaliana landsberg
cgcgacgtaacaagtccaatgtgggatttgtggaaaagggagttcaacaggatagattgtcccttttggatggaattggttctactaagcaacctgatgatggtgctgctgctggagataacaaggctgttttgcaatcaaagagcacaaatgtcagtggaggttcgtttgtctctagtgaatgtgaggacaaggatggcgctaaaatgtattgtgatcttgtgaatagggtgaatgatgttacgttgtcttgccaggagtctgtgtcttctacaggtggtcagaaggttgagctttctagtgttgaggatcaaaagagtgctccaaaggctgatggggcagggaactcttcaaatgaaagcagtacgagacattttgatatctttctcgagaagaaggggatagtactcaagcccaaccttctggttctgagcagagaaaaaatgaaagcagctaaagggtacagtggaactgttattagacctggaatggtacttctcaagaactacttgtcaatcaatgatcaagtcctagcacgctatctctcaatctctcccctgtttccctctatatgcgtgtgtctgcctttgtatctgcactcagctgtctcattgtgcctcgtctgttcttcaaattgtgtgtaggtaatgattgtgaacacatgccgtcggctgggtttgggtgaaggtggcttctatcacccaggttgcagggatgaagcaaaattgcatttgaaaatgatgtgccttggcaaaaactgggaccctgaaacatctcgatatggagaaactcgaccatttgatggttctactgcgccaagaattcctgctgaattcaatcagtttgttgagaaagcagttaaagaatcacagtccctagcggcctcaaattcaaagcagacaaagggaggagatgaaataccatttatgttacctgacatctgtattgttaacttctactcatccaccgggagacttggtctccatcaggtcagtatttcaaacaacttcttgatatcatgaagctcaaaggttgtatcatgagtttccaatccttgatgtttcaggacaaagatgagagcgaaaattccatccggaagggattacctgttgtttcattttctattggagattcagccgagttcttgtatggtgatcagagggatgaagacaaggcagaaacgttaaccttggagtctggagatgttctattattcggtggaagatcaagaaaagtcttccatggcgtcagatcaattcgtaaggatactgcccccaaggctcttcttcaggaaacaagtctccgaccaggtcgtctgaatttgacttttaggcagtattagcccaaagctagaaactttggcaatgcatctagagctgttttgaagtgccttaacatgtacaaattgtagactcctcacctgcttttgttctttcggtaacaagaagaaacaaatcttcgcagaaatctatcttcttgacaaatttgtttttttgtttccgattatatgcaagaacctccacacacggtctgtgttgtattataaggtcttggtaatatgattatcctttggttttcctctttcttctccagaattgctgcatggatccagtatctatctcttcttctaaattagattgttctgatttgttttaaaatcactgtttctcattttatttatctcttctgtctaccatttcctccaacccattctaccttttcaactttgtaagaattgcagaagattttgtgagtctggttgaaattgtacttgtcttgttttcctcttgagtctagtcagttaaggtggggggaccattctcagtgcccaggagggtagaaactcaagaagatgcgataacatttgtcacctgacatccatctcgtaaacttctactcctccatcggatacttgttctctataaggttagtgtatacggccacagcttcagggtttcatgaagacagtgtagttgttgtctcgagtaatatatttctaaaaaaagaatttgtcgttccttcatatatgtgatctttgaatcatcttaggttggttccatgtgtcattgtcaaacatatgtgccaagtgatctttgtcaaaccttaaaatcgtttcgcagaaccacagaaactaggcttcattatatatgcatatgtctggtttctttttcaattatacacaataaataagcgcacacaatgtatatagcttatcttctagtttgatgtgtaaagttaattcattgctgctaggcaacttatcacaccatatcagttgtattttcatcacgtggttatactccaatagctgatgcagctgaatccacataaagtagcaagcaagaatatattttcttcttcaatcgttctatattctctaacaaagaattatcactagagagattgtcatttttaactttttccagccattcgtttgcttgcttaagttgggataaagtctcggcaatatgattatctggttccgctagtcgcgctcctttggtttttcctttcttctccggaacagtagcatgtaatccagtatctaatgcatcttccaagaatttcaaaaaccagcttcttgtttctcgtttcaaagtgtttgtcagttcttttatttcttctgtgccatttcccttaacccattctagcttttcggcttctgttagagcttttgaaggcttcattgtggctctgcttgaagatagactagcttttttgctcaacttttcaggttccatccataacgaatgaatattcaccggttggaatgatttatctttcgatgctacaactgtaacctgtacttggtcaaggatactctggagggtgaagaagtttctgagagaggtatgtggattctttggtgaagcatttgagctgagttcagcaaacatactgcaaaatcattgtttctttgatcaggctaaagaaaaagaaaatttctccatgatatatatgagcagatttggtttcaaaggtaacttgcctgatgcatttgatgagatgtgaagcagccaatgcctctctttgcacttctgcggctatgagagcagctaaatttctccttctcagcattccctttggattaagagattattatcatgtgataagctcataggggaaggattcgaaaaacaaaaaagagagatacagagatcagataaagcgtactttacccaattttgatagactaacaggcagagagctccatgatgcatcctcagcagaattactcttcctgtttatgtagttcacagtggagctcaaagagagtttctttggctctgcctttgttggagctgtcgcaggccgacattgtaaaggaccagcttgacgtgcctgtgcataaacatgttactaaccacactcaataagctaatttagggatccttagacctgtgtac

SEQ ID NO: 31059 - DNA, 4604 bp, Arabidopsis thaliana landsberg
cctcatttatctttgttgtagttcagcaacagagactggttgttgctgcttctgtcactttctttgatctcttctactttaaatgttatcaatgattcaagttcgacattcaagtaacttagtgaaaacaattaaacacatagagtcttaatgagtcaagctgggacttttaagaggataagaggattgtgttggaggaaaaaactagtttttttctttgtttccaaaattcacttagaaattctcaatttatatctccaaactcaatttgtacacaacaggtcctcctccagataagaggacaagttacaactacttagcacaagtctcacctacctcaccacttcagaaaaaaataacaaaatgttttaaatgttgccaaaacaacaatactttaagagcatgggtatcaaaaacttgtgaattttctgaacggacagtgttcaaagagcatctttaatttttttttaagtatagttaatctttttgttaaagagttaaattagcttaaatataaatatttcaatcataatgaaacaatcacttggctcataatacaaatatttcaatcataataacaaaattatgtttactaatttaacaaaacgaaaaagaaaacaaatacagtagaagcgatctttttgatccaaacaaaaaaaatcaaaccaaaaattcgtagcgatctttgtttgactgagatgggcagtggctgctcttctctctcttactcatcatcttccacttgcagtgccactgttttctctatttcttctcctccatcatcttcttcttcgctgaaactcaatccaagtagcttccttttccagaaccctaaaactctgagaaatcagccacctttgaggtgtgggagatcatttaagatggaatcacagaaacccattttcgatttggagaagttagatgatgagtttgttcagaaactggtttatgatgctctcgtttggtcttctcttcacggactcgtcgtcggtgacaaaacttatcaggtttacttactaaagttcctgtcttttgatcttgtcttcttataaagttagagaaaaatcaaaacttgatgatctttatgcatcttgtatagctgaatcaaaagcttatatatcacttgttatggatgataatgagaagaaggaatcaatctgtttttcttttgattggttttgatgattacagaaatcaggaaatgttccaggagttggattgatgcacgcacctattgcattgctaccaactggattcccagaagcttactggaagcaagcttgtgatgttactcctcttttcaatgaattgattgatcgtgttagcttggatggcaaattcttacaggatagtctctctaggttcgtatcgccaatctatcttctttggattatatcatctaataacaagcataatgatcttttgattgattttctatgttctagaacgaagaaagttgatgtctttacatctagacttcttgacattcactccaagatgctagaaagaaataagaaagaggtctttttacattatctctggtttcatgtttatcttaattctttggttctggatgttgttcatttggttgtgtttgtgatcgcaggacattcgtttgggtttacaccggtttgattatatgcttgacgaagaaacaaattcacttcttcagattgagatgaatactatctcgtgttcgtttcctggccttagtcgtcttgttagccagctacatcagtatgtaacagtgacagaccatcttctgcattacctgttgtgttttttttatacagcggaattttattccacttgtttgcaggtcattgcttcgatcttatggggatcagattggcatagactctgaacgtgtacctataaacacatccacaatccaatttgctgatgcattggctaaagcttggttggagtacagtaacccaaggttagcctggaacacaaatcaagaatcagtgatgtaatttaaacgtttttgtgtttaaagctagagtttttcttggtttcagagcggtagtcatggtaattgtacagccagaagaacgcaacatgtacgatcaacatttgctgagcagtatattgagagaaaaatatcctcttttgtcttgtttctttggtttccaggggtcgatcttgacttcttatgctatattttgtaccacaaaaaatggtgttgttcttccttagcttcagaacacgcataatatagttgtcatcaggaagactctagcagaagtcgaaaaagaagggagtgtacaagaggatgaaacccttattgtgtaagcatttgtttgcattgtggttttttgagaacttacaccttcatcttgaaagctatgttaagagttttcattgttgcagtggcggccaagcagtcgcagtggtttatttcagatctggctatactcctaatgatcatccgtctgaatcagtaagttgccgtcaagattccaatattgtggctttactctttgggaaaatctgaatcatatcattggtttatttgtttcaatttgcaggaatggaatgctaggctgcttattgaggagtcttcagctgtcaaatgcccgagcatagcttaccatttagctggctccaagaaaatccagcaagaactggctaaaccaggtgttctcgagaggtaaatggaggctgatactgaagaccgtttccaaatatttcaaaggcgaaaacttttttaacttaaaacatgagaaacaggtttctggacaacaaagaggacattgctaagctgaggaaatgctttgctgggctttggagcttggatgactcagaaattgtcaagcaggctatcgaaaaacccggattgtttgttatgaagcctcagagagaaggcggaggttagaacccaattgagtcccactaatgcttcaacttttccggtcatattctaagcgtgtcttcttggattcttccaggaaacaacatctatggagatgatgtgagggaaaatcttttgagactgcagaaagaaggagaggaaggaaacgctgcgtatatcctgatgcagaggatattcccaaaagtctcaaacatgttcttggtgcgagaaggcgtttaccataagcatcaagctatatcagaactcggtgtctatggtgcttacctcaggtacagagcagatagatgaagaatttggtatgcttcaataattctcaacttaattttgtgccataatctttgattaaatgaaatatgtaggagcaaagacaaagttatagtaaacgagcagagtggttatctaatgcgcacgaagatcgcatcatcagatgaaggcggcgttgcagctggttttggagtcttggacagcatttatctgaattgagatggataactttcacaaccatactgatcaattttactggtttattccttcttcttctcttcttgcttgttaaagatttgtgtattaatcatgaagatcaataagactaggcaaagctctttacaattctttccacaggaccgcaaagcctacattgcttattgttatttttagaccgtgtgagatgattactcgtttataaagatcatgaattgaataagataagatcaatcatggaatttggggtataaagattattaccatagcaacatatttagaccataggcacatatacgtacatacacaaataaatgttatgaatcaacgaatgtctgtatatccgatgcctctccgttttgagggaaagatagcaaagaagaagcttgccattgtcaacaccataacagcaaagtacttaatcaaaagtacaaaatgaccaccccaactgttttcatcgtcctccgggagcaaacacctccgaaaatccgagctctctacggctaacgctaagaacacgataaccgacacgaaagcatgcacgaaatctacaaaactcagcttatatctctgtctcttatcagccgttaagccggactctggatcataaccttcgtctggatagtcgttgaggatgtggagaccgttagaggtggcaattccgtagtaaatgcggccatcttggcctacatatgagtcggtgaaggaggagaagaagcaagccgcggcgcaaaaggagatgagagtaatggtgaggagtttattgacgggtttgttgttgcactcgccgccattggagaaagacggtagtagggtttcgaatatgagggcggtcccggtcggcaataggttggcgaagtttccggcagacggtagcgatctaatgaacgacgcctccatttcgtaatttgatcggaagtgaggaaagtttgtatgttatgtggagaaagagtgttttgtatgttcttctatacgtaatgcatgcatgcgtgaggatatgtttgatgcgtctttatatacatttcttaaagatgtcgagttttatttggtgtccgaatatgtaatatatatttagttttgttactatatatttccacattttgtcaaaagaaaataaagaactatagatatacacatttggataccccttttttgttagaagttagtttatatattgggacttagtttgtggtttatcactttggctagtcgttagtgaaattatggtgcgtcaagattatagggc

SEQ ID NO: 31060 - DNA, 3755 bp, Arabidopsis thaliana landsberg
atgggaggttttgaggtttttgtaatgattaattgagctttttttgttagtttaagcttgtttctagcatggcatgttctcttataaatttttcgatcaattcgatatattcttagttctaccgtgacacagcttttgttgaatttgatatttctttaggttgatgatatgacggcggatttggttataagtcagctattgttactagatgctgaggactcagaaagagacattacgctttttatcaattcacccggtggatctattactgctggtatgttcgttcccatttggacattttcggtgtggatatcgagttttcagattttgaaatgttttttttgcagggatgggaatatatgatgcaatgaaacaatgtaaggcggatgtatctactgtttgcttagggttagctgcatctatgggtgcgtttcttcttgcttctggttcaaaagggaaacggtattgtatgcctaactctaaagttatgatccatcagccacttggtactgctggaggcaaagtacgattctttgatctgtttcatatgcttctcttatggtttttcttttctgctgttaaaaagtgtaagataacagtaaccgtcgtacttttcaggcaacggaaatgagcatacgtataagagaaatgatgtacactttgtttttcattacgatatcctctccaaaatcactggtaagcctgattcaacggtatgtatttgcagtcggttccattggttttcttcgacatgagtcttttcatcacaaccttatgatatccttctttgcagatggaaagtgacacagaccgtgataacttcttgaatccatgggaggcgaaagaatatggtttgatcgacgctgtaatcgatgatgggaaaccgggactaatcgctccaattggagatggtactcctcctcctaaaaccaaagtctgggatctttggaaagtcgaaggaaccaagaaagacaacactaacttgccatctgagcgctccatgacacagaatggttatgccgccattgaatagaactgttgttgcagcgtttacgccttttatatgttattctggtggtacctgtaaccatataacgttgcatttcctgtgtttgtaccatttctctgatagatttttggaataatttgaaggcaaaagatagattatttgttgtagaagaagctacaaaatttaatgattaaattgaatcatcaagccatgagaagctttgtgttttcgcccaatgttcttgccctgtactaaactgcaaatacgttggctcttacacggatcccaaaagccatgctcattatgaacactcttggaacgaggatcatctcatcatgtttgtgtttgatcgtcctttaatctttaatcctttaatgttggtaagaagaagatggttgtttttctggaagacaatgaggatgatttgattgtagttcaggctttcaaaggactcgagggcgtgtctgagctgtattgcacctatggcttcggaagtacgcaacctctcatgcagtctagcagaactcaaccagcttgggttttgagtagccgaaccaaaccgaaccaaaaatcttagttccgtttggttaagtttgttcgcactactcaaaacccccatattaaaacgaaaggcccataagatcagcatagagccggcgaaaaccccatcggaggagatttaggaatggcaagatctggaggaaacgacggacatagagccggcgacaatcgtctctcgaagaggcaacgacttcctccttctcccgatgaatctgaagaggaattagacccagagttgttcgaagagccaagtaatttagaaggatacgaagatggagaattcgaagaagatgaagaagaattcgaagaagaagaagaagaattagaagaggaagaagacgaagaagaagaaaacgttactactgatgaacaatctggaagtcctaaatcatcccaaccggtgaagcttcagagctcagatgttctcgattgtcctacttgttgtgaaccactcaagagaccaatctatcaggtttcttctttgattcataatcttcatatttgtataatcaatttgtagattcatagcttattaggttaatggaattgcagaataagaacatttaggtcacagcttataatatatttagctaattggtgttaaaggttttggctaactctctggtggttgttgtgtagtaagactgttttggtggttgatgatttgtggctaagtctatggtgtttttattgtgtgcacagtgtagtaatgggcatctagcttgttcgtcatgctgccaaaaattgaacaagaaatgctcgttctgtagatgtaacatcggggatatacgatgcagagcgatggagaaggttatcgaagcatctatagtcccgtgtccaaatgcgaaacacgggtgtaaagaaaccaccacgtattgtaatcagtcaagccatgagaaggtttgcaagtttgtccgatgttcttgccctgtatcgaactgcaactacgtgagttcatactcgaatctcaaaagccacgcttgtagtactgcacacgtttggggtgaagacgacatccacttccagttagtgattgaccgtcctagaatttttaacatgaaccttggtaggaagaagacggttgtttttaaggaagagaaagagggtgatttgattgttgttcaggctttcaagggattggaaggtgtttatgtgactgtcaaccgtattgcacatatggctccgggaatacgtgacttgtcatgtagtttggctaagctcaacgagtatagcacactaaggagtggatcgttggtgaagaaaattcagaaagtgagagagaaaatgcatcttgaagatgacttgatgtggataccgcctaaaatgttgagcggtgaccactggaagatgcagatttgcattgcctatggatataaatttattcacatctgaagaatcctctcaaagtctcaattcttttgctctgctcttataacttagaagtagacggtcgttggatcataaaccctgcttcatgtgttatgtgaaaattcttttttagagataaaatgttaattgtattggtccgggttcgactgatttagttggtaccgacttgaactcaaacttaatacacttcaatatgtctcattaagtagtggccgagagagagagggagagggagagatgacgaaattgggaagacgcaacgacggaggaggaaaaagccaccgtagctcaacgaagaggcaacggcgtacttctgtttccgtcgacgaccctagtcccggggaagaagaagagaaaacccttgtggtgcttaccgatgatagcgattctgaggaggatgataaaccgctcggagatgttcttcgaacatgcagaaaagggagggtttcatcacccaaatccgtaactctcccgaattcgaatgttcttgaatgtcccaattgcttcgacccattgaaaaaaccaatctttcaggttctgttcttcttcttcttctttccattagggtttagtgaaattgcaaatgagaagtttttcgctcacgtataataaaggtcacaactttatctccaattggttaagccaagttaaaaaggtcataactttatctctaattggttgagcttaagttaaaaggttacagtttctgtatccttatatgaatgaagctacagatattccatggtggtttgttctctagtgttgtttgttcatttgttacaaatgtttttaggtc

SEQ ID NO: 31061 - DNA, 2043 bp, Arabidopsis thaliana landsberg
ttgcgaaaatgaaaacacaaattcataccggaacggaaagtttgtttgtgtggaaatcagcggtggagaaagggttggtccggtgaagggtattttcgtcagagactcctctttttcgttgtactttcaattcagcctcatcctcaaccaaaacgtcgtcgtcttcttcttcttttgagaagtcaagcaagtcgtcgacggagaaatcatcgccattttgagcgccgccggttagggttttgtctttcatgttactgttcttcaacgtcaattcaacactctccattatttcctatcaaaccccaccaacacaaattaggttttcttcttttcttttggcttcctcagaattatcaaaaactctccaaaaattatctttaaaaaaaaaactccccccgaaaaaaaaaacgttcctttatttttccaaattcaaacagaaaaacccaaaagaaaaatcacgaaaacccagaaccacaccttggtgaaacgaaccatgatttgactaagccacagataaaaattcatcttttttcaacaaatgtgacgagtaagtacctttcaaaaaaaactaaaatgggaattacctgagatgagaagagccagagagtgaagagaggagatatgtcggtgaatgagaagaagaagaagagtggtgagaatttagaagaagaggtgagtttggtaaagcattgaatatgatagtgactccagaccaaagccctcttctcctaaaactaaaaaagttgtgagtttctcttctttattctttctcaatctcttattttcccaagaaccaaaaaaaaaagataaaaattgaaatattttgctttggtgggaactatttttttttacctttttactcaaccggcaaaaattcataaaaatgtctactttttgtaaattcaaagcgtacatacgcgctactgtgaaactagagatgactgaaaaaagaacggtctcgttttcgttacccaatcacatatatatttgggctgtattgggctatgttgggctgggctttctgaaattttacgatttgggtatctcattaacaatggcttttctcctcccgtcttcttcaattcaaaactgtttgtgatgattactcagcaatatgcgattaaaagcttcaaatttgcagaaacccatcttcttcagctcctactctgcccatgatgtcagattctcttctttcttaacctctcttttgaattcatatgtgggcttaagattgttggtttcatttcatgtctactttattccttttgtaatttgacttttcgctacctgtcaatagcttatggtgaatttggcttgtggtatcgctaaagcatcataatctcttcttcattactgctatgtttctacttgttggaacaaaatttcatttattggtgtgccttacttttcccagtgaaatgattcatagccttacaagagaatatcataaccatgttaaaaaaagcaatatgaagtaaggaaaacaaaaatgttctaattagtctatatagtttaagaagactaaagctatttcttatactgacaaattcttttggggattatagatatgagtagtgtgttgtattataatgatgcttctgctactttcaaatgcagattctcagagcgtctttcattgagaagtttctggtctccagaatcctttttgtgcacttaagattccttcttggtgtttggagaaagttaagtgaacatcccagtgcagtgacttcaacatgttctcaacttctcttatcacatttgattcgtcacgaactattagtttacctcctggtcttactattctatccacttctgccattactggaacaagattgcacctttcaaaaaaaaaaaaaaaaagagacttattgttgatgaaacgttaccaaaaggtgtggatattatgagttacgcttataccttgttctcaactttgaaaaaagatgatctgcatgtaagagatcatagcttcgagggtatgtgctaaatgattcacaccagtcatgatatattccgaataggcctctctcgtagattatc

SEQ ID NO: 31062 - DNA, 5134 bp, Arabidopsis thaliana landsberg
  unsure (1)..(5134): unsure at all n locations
aacgtgtggatattatgagttacgcttataccttgttctcaactttgagaaaagatgatctgcatgtaagagatcatagcttcgagggtatgtgctaaatgattcacaccagccatgatatattccgaataggcctctctcgtagattatcggtcgtgtatctggtgaatttatgtttactacattcattacccacacctgtgggtccttcagannnnnnnnnnnnnnnnnnnnnnnnnnnnntcgtaaaaaaaggtttagttttggtaagtgagattttagtttgatttgttttcgttgatgctcaccctccgtagacagctcgcatgtccattacattcctcacatttgaccagctgattcctatttcattcatgtatactttgcttacaacatgtttccagtgttcataatctgtagtgaaatctcgaggagctggtttcccatatatccccatttgagagctgtttaaccagtaaggcggtgtttgaagccgacggggccagttcacgggccacttgcttcctctctcgaccacattggtaggaactttatgcatacatgcttgtaggggtacatacctgaaatttccattcaagttttgactttctttgttctgttaaaaccttatggttattcattccttatgcatattgtggaaacaatcataccaggctgcatttgcatcgccgttgtttttgcacagtggaggcttgttgtgctttcttttctcgtaacagtcattggtggcaggtttctggtagattgcagcaccaataccattgagtttatccttgttgattgtcacaagttcccagcacaaggattttgtcaacgcggacatttctacatcactcaaaacatctcaggttcagtgaaacaaacaaaagaaggaggaactctagttaagttcaagcattttactttagtcattacctttccagatttgaacatcttcttcaagcttctggtagactggtgttgctgaccagacaaaataacctccaggcctaagcatccgattaagttccagaagaagcataccaccctcattatgccatgggactctacaacgtgcacagtggataagatcaaacactctgctcgggaatggcagtcgcttagagcccataactgcagagatggctggaatctttctttcaagagcaaactggacttgagcctcgtgttcatcttttggtgcaagagacattgctataacatctctttcaaagaggaaaccgccaaagctcgccactccacatccaacatccaatatgacccgagtacgtttaccccacgcaatgtttttcaaagactgccatagtagaaaaaaggaaccattatattctgcaaaaattttctatcttttacttgttgcagttttaacactatactgaaatcaagaaatgagtgttcacctgctgaagaaaatcgatataatgaagagctccatggatgaactgtgttccaccaccaggaaacgtcaagaactcgccagtgaccttcacccagttctgatgtccttttacctcagctagctttgtgtgtgggacattgtggtaccatatctactagatcacatgtgagttaacttctatccaattttacattatatcacctcaaggaaatctctctttttttggatagaaatttttaccttatctctgctttcaggccacttgatggcctccttataaccttctgggagggggacgagacacgttggtgggtcttctgggcaatgtctctctctgtgctcaaaatgtcttctactccttagtttcattatagcttcttcgttgtctaggcatggtatatagtcagttcctgcagttgcattgcacagcacccatgcatttccatccataatcctctctacggtgtttgattcagatgtctgtctttgtttctcgtccttagactctgttgcctgactcttccatgacttctgtgattctgcagattctttcggtattccagagccaaaaccactggcttctgaaccctgttcgtgttttttctcatccttccgctcttcttgttgctccatgttttcgtcctttgatgtgctctcttcttctttgtttccgctttcttcctctgctgtggtatgttcttcctgttggccattctcatctttcatgctcttctctcccttcccgttttcttcactagctgttgtcttctcctcgttttgttgtccggtttcctcattccctgagttttgttcctctggttgtccgttttcttcattctttgaggtctctgatgtttccccctgccccgtttccataggttgttcttgtttggtcgcatctgtgaatgtcacatccgtattcgaatccggttcttgcccttgtttatttccttgttccacatccggctgttccttcccttgtccctgctcttgcccttgagtccctttgggctgagtcccagcgtcctcgtcccgctgttgtttctgttccttttcaaactccttgacgacttttttcatctgaccctcctcactctcttgcaccgtctggttctccttgccgttatctttctctttttcctcggaaattttgtcatcgttgttttgttgggtctcttgtgtttgagtctttgagctcgtcgtttcactcttctctttcgctgacttccgttgctcgtcttcagactttacggcatcgtctggaagctttcccggattgtcttcaaatgcctgttgctcatcagactcttgtttcgtgggttcgggctcatcattaccgtttgaagaggcagacacatcactcctctctgtctctgcgacagccgctcgagtggagccttgtgtgatctgcggtggaataacggaattggaagaaagcatccacacaccgaagacacacagagccacaaagatgaccattgtaatggtcgacgcataggacgacgtcgaagtgcgtttgttgccacgtcccctcccgaaggccatctttacggtcttgcgtatagtactagttatggagaaagaagaagaagaaaaatgaaggagtaaaatgggagttgaaggaagtaaaaatagaagaaaaagaagagaaagagaggttgtgaagagacaagactggatcaaagatcctatagagtcggatatgggactttcaatttcgtgtctctaaatttagttatggtctctgtgtctcatattttgttgtccatgaaaaattagtgccatgtaatccaatgttaacttgtaacgcctagtcaaggatatattaaacatggcaagcttgtgcttttttggtataatgtattcgaagactgtttaatttgaattttgattgattaagtatgttgatttcaatttgagtgtattttttggttgttatggtattatttataaaaacatgtttgactggaattctctgtttgttctcttgtatttttttatatttgtgtttgtattggattacatatgttccgtttatttgaactaaacaactccaaatggattaagaaaaagttttgattcactaatataagtaataatagtttagtaccttctcaatttttgcatctttcacaaaactatatgttttattttaaagttgctttttacttttgagatactaataaaatgtgtagtgtgagcattagtatgaagtcccttgaagatcaggttctcctacgtttggttcggttctttccctaattaaaactcacataactcaaatgtcaatcattggtataaacatcacacatgtcttctctttattggtctactatatattcagttgtaacattcatcctgcaaatttgcaaaatgtgtattttattatttgcttattgtcatcaatgcaccaaaaggtccaaaagacatccaaatagtataattattttctttgagtggaacctgaagctttggatttataaatgtcggacaatgacaaattttagatttttaggcttcggacttttagccagcatttttatgattttatctcttttggctttcttcttagaatattaaattatccaaataagagacatcaaatttacatagaaactatatgagaacacaacaaatgggatacgacactatacttgtggatctagtaaaaaacatcatataaagattagaaatgaataaattttgtgggatatgacaagctgtgggatacggcagagagtaaaagtcggaacgagtcggccgattggaccgcagcactatttgaatgtaccaaatttaccgattatgtaatgttgtcacgcaatatatctcaattgtataagggatttttagctttttaccaactctacaaaactacaaattcacacgtaagtaacagtatcgattatcatcgaatgtattttgtttttatcaattttaaaggcattcttgcaattgtttttgttcgaacactccaatactttgtcaaagtcatcaaacagcaaagaatgacgtttcaaaattctatcttttcggttccagttttgtttttcccattgtattattgtttcttatatatcctctttcacatcatatattacatatttttgtatgatatattacatactttaagaaagctaaaccaaaattaaatgtgagagtatgaaagaagagaagacgaagatggggttgtttgtatttagtttttttttttggtttaagggttgtttgtatttaaatgagcaaaaccgaaatgattgatgaaaaagagaggaaggaggagtaaatagctttctgtagccaaacatactcgtctgaaattgatggcattgcattccatatttatatatttcttagtatgtaatatatataggtttcacatatatgatatatccactatgagaatctgcaaaatctctatttattaatatatatgtgtgtgtatatcatcgtgtagggtgtaaaaatacatctcatgcaaggatgccttatatatacgtaagcttacatgaaaggtaaactccttatgatcattaattttctttcgaccatgttaccttacaagttatgattgatttagttatacaaataaaaataatatcgcgtccatttgaaattagacatggttttgacactgatcatgcatataagaaaagtttaatatcctattgtattcttacaaaggatgttaacttttaaattatatttagagtc

SEQ ID NO: 31063 - DNA, 3273 bp, Arabidopsis thaliana landsberg
tttgagatccttgaatcttcagactcctcggtgttagtatagtactcattataagaaacatctgtctcagtagctactgattctgattcagggagtcttgtttcgtgtatgattcttgcttatagtaccctaactgcgccattccgtaagtgattgcagctcggtttacattagaatactcaaagagctcaagaagattggacttttccggaggaggaggaggaggaaccttcgcgccttgggctctgctgcgaacagacttgacgacctgtttccgcggctcactagaaatgcttgacctgtcttcatcgtttgagtgatcactaggcgatacagcatggacaattttcgtttcctggtgtattcttggttcttcatcattgagtggataatcatctaccacagggattggtgagcttctatcttcaacctctacagaaacccggttcgtagtttcccccagggcagaagatgagaaaacaagcttcttatcaacaactctgaacgtgataacctcagaacaagcaccacattgcatcttttgttgcctttcctgaccaagaagcttcttcttaggcacatatagcagctcaaagcaactgtgacaagcaataaaaggcgcaccgcctgctagaggatggcaacgacgtgaatcagtatcagacacagcttgttgaacatacccacgagcaaaagcaccacccatttcagaatcaatttcactaggccacctcgtgtgaacaccaccatgtggactaaaaggtccaactttctcaccgtggtgcaaagccgggctaaatgggacatcaccatacctacttggcgtacccggaaagaatctagggtcctgtaactgtgactcaagtatatcagagccaatgtctacatactgtccttgaggatagggtggacgaggcggcatctgattagggtaatgacttggtccttgataaaagttttgaggtatcctatgcactgggaatccataagggtctctataagctggaacatgaggttggttactcgcggtaggatacattccataaggaaatggctcagggtatggattgtaataagaaggaggaggtccatgatgggcatggaaacccattggtggctgatcaacaacagtagcattattacctccaccacggagaagatgatctttaatagaatcaagctttctcaaaagctcggcttgttgtttatcagtgtactgaattgggttgtttctggtggttgtgttcttagaagaagaagaatctgaatcagtctcttcctcctttctcgagctcttgacgaatctctgagaaccaggtcgtgaattcgaatcgtctaggcgatttctcatcgggctagtagcggattcattgagatcctccttaaagcctctgtcttcatcacttcttgaggaaccagtatctgctccataaacgtcaccgcttgtcctcatcggaaaaaaaaaaacaaaaattctccgacgaagaccagcttctagggttttgcttgtttaaactgcaacagaaataataatccttgaattcaaacaaaatccgaaattatcaacaaattctctaatcgaatcttctccaatccgcgaatagtaacatggtagagcaaatcttaaaattttcctagagactagttcaagagtttccatgattgcacagcatccaaaacgggaaagacaagacagagagatataggaaaatcaaacgcacctcgaagaagagtgattccggcgtcagtattatgaatattttttgggcaatttcttcgtctccggtgagaatcaagcttttagtctctttgacgcagccattttttaatattaaaggagttttgtgaaattttcagaggaatttatttaaataatcaaaagacttcgaacaatagctctacttttcttgcttcgttttcccgggaatctaccaactaggaacaattagatcgacaatggagtttaagaattttgacatatctagaaactatgagtcttaccaggtcaagttgaccaagagataacgtgacgaccaaaaataatgcaacaaaataaaaatagtagtaactaatgaattggttggatcgattcgaatttaactgcatttgaaaggtgaaagttaaagtaccaaattaggtctttgatatatttgtgtctcgctgctccaaaaccaacaataccttgaactacacacactattcatcatggccatggtgggtttagtttataacgatgaatgtgtacgtattttatacatgtattgtataatattatcttgtcaaaatagatggtgtgccatgttcccagacgtgctcataacttgaattcttttcatcatcatcatctttaaaaagtttagagatgtattttagttgttggaattgtattttatattagggtgacaatgacaaatgttatagctgtaaagtattttttgtacaaatcagctgcttagtttgtttactccacttgcttataatgttatatttgacaaatctgttggtattaaaatcataataacgtacttatcaccaaaaaaaaaaaaaaatcatagcttcattcatctaaaactagagtggggactttttggtcatatcacaatcaatgacataataaaagcgtcggaggatggatgtgacggagtcggcggtggcggagatattgaaattgacgagagacagagccaaagctccgaaccacgccatgtctctagtccccggcggagtcgctgttccctttttttgttaaggtaattttcaggcagattagtcaaggttccttattttttatgtttttatccaaattcgaagcccaaaatttgattagtgtaatttgatggtgtttgatagattgtagaaatagtggagcaggcctagtttacttcacttcagcgttgagcctctacagtctaggcacataattttgcctcatatgatttgtttcctttaagataatattgtagctagtagctactgaatcaatcagtcactagcctgaacaatatacgagcctagtagtatctgtaggaaactttgaataaagaagaattttatcgttttcgatagatatgtagtggagtgtgtgtcaccacatacgagttagtatgtcttttgacttgtacagcattttgaacttgctattatgaacctattctttttccctgcagactaggaaagctcagagtcagaggcatgtccagagtttgatcgtcgtatccttgggcttatcaatatcagctgactctcagagtttgctctcatgctttgcccacc

SEQ ID NO: 31064 - DNA, 3664 bp, Arabidopsis thaliana landsberg
tttttcagtgagaagcaagcaatctcaggattatgtacagggtaagcctttctcactttttcaaggtaaattccatcaaattctttcccaaactgacaagtctatacatcggtgtacgtgaaacagtcgtttttgatagagctgaacgaagatatgcaaaagctacaaagctctgcagaaatatggttcccatggtctggatccttcccggtaaagattgaatcaacaaaggctctgcattctaaaacgaactgatatgtattattaacagataaactgaatcaaacatcagtataggaagtcatatgagattattgtaatttgacttatgtgcacacatcctacaaagaaaattataagaatgatctgtggagatttaaacgattattgatcatacatctgatagagcagtctctctccccattgttacctcctgcgcaaagtaaaagagatagaataatgaccacaagttgcaaggagaagagtatgtagttgtcaacaaagaagattattggttacctttagcttagaatcgctagagaagacgcagctggatgtgatagcatggcctggctcaaagacccatcctactgaaaatactctttcgcggtctttgccttgttggagtgagcaccacagctcttgcggaagcaataaaagatcattttcttctctcacaatctcaatcaccttctcgccagtaacttgttgtatacaaccctgaacatactcacaaaataaacaaacttacggcaatcatcgaatggaagtacacacttgaatacacagtgtaaggacgccaactcacgaaatcagaggcgtgaaagctagtagtagcaagtagaactctccaagaaccggtaaccactgaagctgcagtggtaggtgtagcagcaaacccggagctacggatggcacagcctccaagctgatcgccatctctgaacggaccgtaccactgctcacagaaaactttgacactctgcaaggacatgttggtggtctctgctaagctgacaaccaggaaaatcctcacacgagactccttgtcctttggattgatcagacaatgctccacctcaagctggttgttccgcaaaggccacacagcgacataggagccagtgacagaatacgaaaaggctaatgcagaggatttgcctcccccgatgatcctctggtcgatgctgtaacgggtggctgcatcagcttcacatccaacggtggggaggagtttgatggacttgtaaagaaaggatagtgagttgggctgggcaagagtgggacactgcgtctgccaatcgaacaccttcacttcccattctctaaaggcttctggaaccactgattcaggtagttctagcggttgcccttcgcatgtaaaatctgctccgaaaccgtcccattcgccagacacattttgagcgaactccgaccaggctagtagaacccattacacaacacaaacagagacgcggtttcaaaaaaaaaatagatgccttaattcaccggaaagcatcatttatataatcttaaaggcagcaatggaggacttacgattgaaatcaggggcaggctggctctgcgccagggcaatctccgaggaactttcagctgaacacgaaagaggggaaattgtggttctgtgaataaaccataaactggaagagaagggaaaggagagagctttaagcggtggcgaagaccgaggcggcggtgcaggcacatgtgtacggctccgccataagagggagcttccggaggacgataacatttgggagcagagcagagagagtcacgaacgaagagataggaggactggttgggtttacattaaatggatttcgtactggatcatgctaatgggcctaatttgtacggcccatcaacgacgaggaaacacaaggagaaaaaagaagaaaaaagaagaagcattgaaaaagcaggaatgaataatacaatttgccaatgccaactgtctcacaacaagaacaagatgtctctgatttaccacaacaaacacaggatggattcagatcttattgattgtacaaatttgcgaaaggaagacttgaatgggctgtgttgagaccctcataactcatctcgtgaaccacttttgctttcatatgatgcataagctttgatgattgaaacatacacctcaatgcctttcaagtactcagctttacccaaatactgcaacacagataaacaacatgaatgatgatcctccaacaatgagcaaagtgagtatcaacatgtatgtacctcattgtggtcatgaagcagactcggggtgtttgatatgggagagaacccaaaggcaggcacgccagccttgcgaaagtagcgagcatccgttgatgcagggaaaatctcaggcttactggtcctacctccggcttccttaacagcattttccaagagcccccaccaaggatttgaatcatctgctgctgtaaggaattgcttccccgtaagcttctgcttgaactgccccagctaacatcttaattagttaaagttgtcgagtagactttgttcataaaaaaaggggactttgtgttgctacttggcttcaagactggacagtttcttcaaattcattgagaaagagatacaggtggccaagaaattacctcaaaggacatgtttcgtgctgctggagcccattcctccactaaacgtctttcgagtgcttcagcatcaacgctgggtggaacacgaatgtcgaaaccagcttctgcctcagatggttgcagattcattacgaaacccttgaggataaagaaagagccagattctcagataaagacatcaactttggaatcatacataatatgaatgaagaaaaaagtagttacagttggagaaggtgtgccagccttgaggaaggccatgttcacagagacaacatcgccttcagctatcccaccagctttgagaagatcgaactgagaagctctgaatctgcgaatactctcaatgcttttgagcagattctccatggcagagttgtcatagagcttggcaccgtggccaggtggacctttagccttaatcaccagccaccagggactcctctctccatagaatactctgtaactctcagtaggcgatggcaggcctgattcactttgttgtataagatgatgcttggctgttataatcaagaatcaaatccagaagagtgtttaccttcgtcgagcacgattgcgatgttcaagctcttgaataattgggattcagcaaacttctctgcgccatcgtggccgccaatctcttcatcggggacgaaggagagatagacggatcggagtggcttgaagccagaagcctggagcttgcgtatggcctcgaggtactgcatcccgacgcacttcatgtcctgggaacccctggcatagatgtcgccatggtggtccatgtgagcttggagcggatggtgagtccacttggagtcctcgaagggaacgacatccgtgtgggagttgaggagaaaggcaggtagggtcgggtcggagccaccccatttgaggaggagaagcggctttccttttacaaattcgatcgcctgagattcgagggacagtggtttcccctgagatattataaaagcaacggctatgtagtattccgggttgggctgaaccgtgttgat

SEQ ID NO: 31065 - DNA, 1535 bp, Arabidopsis thaliana landsberg
gaaccagagggtttgcagcccgtgtggtgccaattctgccatttcagctgcaacagcaaggttggatttgcgagtcacacatatgggaaaaaacaccgacagaacttggaatcacaatcagccaagaacgaaactatgtctactggaccaggcaagctttctaaagattatggagaaaaaacgaagaaagtatcatgcaaaaaccaaaccacatttgattctcaactgaagagtcagaaccattataccatggcgaaggagcttgcagaggtaaatcttactatttaggttttctttcgtgaacttggaatctgcttttagtaatgaatattacaaatcttagtaaaaataatatccttaggtttgattcctatcgaaagtgatgaagtatatattagaccttaactaaaatatcgatgtagcaggcatttgtctccgcatttgagcatgtctccgcattggagcagttcagtattgttgactcaaggacaatccgagaagacaccgaccaagaaaaagaagcaacaaaggagcagacacttgtaaagatggatggtaatgggtttcgaggggcaccagaagataaagtggaattgaaccaagaaaaacatagagaagcactggagcagttcagtattgactcaaggataatccgagaagaaaccgatcaagaaaaagaagcaacagaggagcagacacttgtaaagatggatgatcttgggtttcgaggggcaccagaagataaagtggaactgaaggagagacacaccgtatctgagaacttggtgcaccgtgtcttcactgaacagaatcgagagtctagaatacccaatgaaccgaggtaagagccaacattcatgggagtgtataatatggtctctctctctctctctttctcttgaatctcgatcaatatctgtgtgtctaactggttgcttggattttgggttacagaggatgtttagatgtgattcctgagagagtaaaactgccaccaaacgtgaatgtggccaagaatttggaagatgagcagaagcataaacccgaaccaaaagcacaggaagccgaaaacaagtctggaggacgcaaggatcttcctggagaggctgccaaaagggaagagattaagggccaagctgataactttggactcgcctttggggaaaaaatagtaaaataatgtgaattgttaattcatgttacagttgtcaacaatggatgttttcttccgaatggcagattaacgttttattctggattggcttctgcttatctcttactgttgtgtcttatatataaactttacctcttacaaaagtctcaagaactataaaatttacgcattgtagtatataggttctatcaataaattgggaaataacgaccggtttttccaacagaattttcggcttagtctgtaatgtaatcatcaaaaattgcattatttgctttacgactacagctcaactgggccaccctgattacttatccgacccggcccgacccatccggatcgggatcctctagatcggggg

SEQ ID NO: 31066 - DNA, 6308 bp, Arabidopsis thaliana landsberg
  unsure (1)..(6308): unsure at all n locations
ttcctaaaactcgttgccccttttaattccagttcaaaagctcacgcctcatacacaatctctaaaccctgaccttccatttcagtttctctgtttgagaacacttgatttcttttaaaaatggcggctacagtagcagagtacgcaactgctaaatcattggcgttgctggacacagagaaccgcgaggttctcaatagttttgatgccatttttactcatggcaacaccgatcaagtcgctcctcttgatgagcctctggtctttaaccgctttggactcagtcacatctcggccaaagacacccatcaaccaaaaacggacgtagatgaatcagcgaaggcggatttcgctggtgcaaaaacgtcagtttggtgggacattgagaactgcgaggttccaaagggttgtgaccctcatggggttgctcagagcattagatcagttctgtcgaaaagtaacttctgtggtccgcacacaatataggcctatggtgacgcaaatcaaatcccttcctctgtacaacaagctctctcttccaccggcgtatctctcaatcacgtccctgccggttaatctctcttcttgaaacacctgattagctataaattaaagtatgaatattttggagttagtgagaccagtctttgctttgtagtctctaatggcttaattattctctatgttcttgatgatggtgagcatttaacaggagtaaaagacgggagtgacaagaagctccttgtagatatcatgttgtgggcaatggacaaccaagctcctgctaacataatgctcatctctggtgataaagacttctcttatcttcttcacaaactaggtatgaagaggtataacattcttttggctcgacctgagaaagcttcaacgccactcatcgctgctgcaaagaccgtatggttatggacaagcatttttaatggcgattgtcctaacatacctattgatctcactactagacgtcatcatcatgattctgcctatgaggtatcaagacatttgggtcctaaacaagctcaagggaccaagaggggccggagtttctgtgaattatgcaatgtttcttgctcaaaccatgatttaaccgctcacctctctggtagaaggcacagagctaacgtaagctatacatttctttttcttaatgtgtgcttgaatattgtcctctctttaagcctaatcttgagttcactctacgggcattagatgtgaggcacatatatatatatatatatgttttatgttgattatagtcttgacaattgttgttgtacattttctcaacttgtgtaggttgagctagtagcccgtggacgccctcttgtcagtaattcaaccgaaccaaagtatgcatggtgccgagtttgccgtttgcgtttccgcagccaagcaagttatgaaacacacatcttagggaaaagccaccaagaaaaacttgaagaccaaaacgagcattccaaaaagcgcatctgcaggaccccctaatcgtttcatataagattttggagggaagacataatgcgattagagtttgttaattcccaaacttgtcttttgagtctcatctttagttgttggttgaacaacttttggtttcggttttcatttagtctcgtctgcgtttttggataaaagccgagagctgagcccacgttgataacttttttttttcccttgttgagaagttatagagttgctgttcttgagttttcagaatttgatgtgtaaaatcaaccccaagtttggataaaatcgaaaaatattcgaaattgggaacctagtagatgatgatgtgaagtgataattacttaaacgtgattatatatatatatgtgggaaataatgttttactggaatgttgatataatagttttgacagttttttgtactctttagctgaaaccattttcttaattgatttttgttgtcagtgtgctaatgtcattggtgtaatcaaacccgaagcaaaatcgaaaaccttccgctgtaagctttgccaggtcgattgctcgaacgaagctatgtataatgcaagtcatatttcaggggggaaacacaaaaacaaacttaaaagtcaagctaatctgtttctttaattaaatttagagtaatagatataatgatctttgaggtctatggatttttggtaaggaataatttgagccaaatttgagcaattttgattatcgatcgtacaagttgtagttttgttgctccggaagatttcagattttgatgtaaatttaatcccacaagttataatcatttttgtagtttatggaattgaaattctaaacataattgttctgacaaaacttgtatttttaatacaattttgaaactctgcacatccaattattttctttaacgtgcatacaccgatttatttagtaggcttaattttttcttattaagaaaagatcctttactaattatgacacttattttcgctaattaccgatggggagatacagcccccaaaagttacaacggctattttcaaatgctgattggtgccttttcaaatgctgacgtggcttaaataataattgtcgaaaaagtagaatactgtatttaacttgatcgtactacagaggacaaaataaaaaagcagactttgcgaaaagcgaaaggtttcttcgtcaacatggaaagaacttagtggaaacttcttaaaacttagattgtcagattagcataactcaccttagcaagctccgatcttcgacgagatagtgagaggagtaaagatgtacttttggttcagaaacaagcgtctcttgtctctctagtatctccggtgatgtcaacggcggaggcggattacgtgaaggccacaacatcggagtggtgggatatagagaattgcgaggtacccagaggttgggatgcgcacgtgattgccttgaatgtgagttcgtctttgttgaagatgaattattgtggacctgtctcaatttcagcttatggcgataccaatctcatccctctccatcatcaacaagcactttcttctactggtgttgcgcttaatcacatcccagcaggtgtacttctcacaaaacccattttgtgattcgtcgttgtttagatgcttttgtggtttttgttcttcttggattgggattttgttttgttgattttgtgtgttttttgtttgattttggttaggttattagttatgtattcgtcctggatctgcaattttaggtttttactttctgcatgttgaattgggtttctccattttgattttggatactgtgattataaatctcagtttttaagtagttttcttattgtggaagtatatgattgggtttgtggtgttttggtggttggaacaggagtgaaagatgcgagcgataagaagattctggtggatatgttgttgtgggcaatagacaaccctgcgccagcgaatttattgctaatctctggtgacagagacttctctaacgctctccatcagctaagaatgaggaggtataacattcttttggctcaacctccacgagcctctgtgccgcttgttgctgctgccagagatgtttggctctggacagtcctagcctcgggaggtcctcctcttacaagtgttgaatcctctctactctttaacaatgggggttttcgtgtctctaataaaggtgtgtcgaaacttccagtttctgaacaagctcagcctagccaaccaactggttcaacttctaacgctggagatactaaggatcataaaaccagagaaaagcatgttccaagaggatcacttcaagaaaatagaaaaaatatgcttcagcatagcagtggagccacaggggaatctgctactacctgcagaatatgcaatgttgtatgtgatagctttgaaaagttcaccgctcacctttcagatataaggcatatatctcaggtaaattaatatcttgcttgttggtctatctcttcttgaagatgaaattgtatggtagctagaaggaatagaaaaaaaattgtttgaattctttgtgcaggctgccattgtagaaagtcgcagagctcaggccagcgtttcagccaaacccatacatcaagcagttcttgtcgaacctttgttgtgcaaagtttgccagatcagctttaccaacaatgatacatataaaaatcacacctatggaaaaaaacaccgaaacaatttggaactgcaatcaggtaagtccaaaaacattttggtgggaccagctgagccttccaaagaggttctagagaaacataatatgaataagaaggtgatgattgagagtagagctcaggcaaacgctgaattcgtttgtcttatgtgcaatgtggtgtgccagagtcagattgtctttaattctcatctgcgcggtaagaagcatgccaacatgctgagtcaatcagaggcaagtttctaacttttggttattcgagaacttgttaatttatagcaatagaaaatttgacagcttggtaaaacatatgcctgacttaaaagcattggatcaggcactcattgtttctacaaagcttcaagagaaaggagtcggagaaaaagaacaaccaagtgaaacagttgcagagcttcagttgcagtctcaaaaggctcaagagaagcaggttcccatggtgaatcaattagaggcaagtttctaacttttggctattcgattatatggaatttttattaacatcgataagttggcagtttggtaaaacatatgcctgatattatagctttggattaggtactagttgattctaagaagcttccagagaaaggtgatgaagtaaagggtcaaccaaaagaaatgactgcactgcgtaatgcaagtgctaaatacatttgtcgtatgtgcaatgtggggtgccacagtccaattgtctttgaaactcatctaaggggtcagaagcacgctgccaatctgaatcaatcaaaggcatgtctcttacttttgcatatttgagagcatataaaaaactacagtgtggtagacatatgctttatgtaataccgtaggatcaggcactcattgattctaagaagcttcaagagaaaggtttcggataaaaagaacaaccaagagaaacaattgtagagccacagttgcagtctcaaaacgctcaagagaatagcaagtgtttcgaaaagcatgttgtcatggtgaatcaatcagaggtcagtttcttaatattggtaatttggtattttaatttacaatttccagtgtagcaaaacatatgctgaatatgagagtcttaactgtggtaaaatatataaagaatgaagcttatatagttgcatcaggtactcatcaatgcgagtaagcttgaagagaaagatgcccaagaaaaagctcaaccaatagaatcaatagccgaacctcagtcgcagtctcaaaacgctcaagagcataccaaattctttgagaagcaaaacgaagagttgagaaagatttgtggcactttagaaagcagtgtaaaagaacctcttccaagtactaaggactgggtggagactgttaacaaacagattccaaatggagaatttttctttggtgacctaagatctgattttgaagtacccagggaagcaaggtaatttttgctaacttggatttgcttgcttagtatgtcaaagatgcaattatctaaatgtattctccaacttttgtcatagtgaatgttttgatggcattgtcaagcctgtaaacctttccaaaggagaaactgagcattcatgggaggtaaagaagaagaaaatcgaggtgaccgtacgccatgcaagaccagctgcatctaaactttgtcatctttgcgtagtgatttgtgatagccggggtttgtcaacagttgtttgtgataacaaagctcattggccgaaccaaaaacatactaccgtagtgacacttacttcatgttctacctctttatccttgatcaatatcaaacccttctgacttcttatttttgatgtaggccgcctttgtagccagcaatggttctcagtccagcgtttcaaccaatcctttgaaggaaccagagggtttgcagcccgtgtggtgccaagtctgccagatcannnnnnnnnnnnnnnnnnnntttgcaagtcacacatatgggaaaaaacaccgacagaacttggaatcacaatcagccaagaacgaaactatgtctactggaccaggcaagctttctaaagattatggagaaaaaacgaagaaagtatcatgcaaaaaccaaaccacatttgattctcaacttgagagtcagaaccattataccatggc

SEQ ID NO: 31067 - DNA, 2194 bp, Arabidopsis thaliana landsberg
  unsure (1)..(2194): unsure at all n locations
atttctgatcccattagacaatgtattttatggtttatgatgtatcagacttacttggattgatgacaccttcagggagagtctcaagtaacaccaagaaaaaagcaaagtcgaaatgagtcagcaaattcaacctgaaggaaagccactccattgctgatgcaacatggaaccatggccttgaatggctatctattagaacaaggtttgagctaatgaagcgatctcgttgatcaaaagcacgtattgttgttgcaccagcaagcgattcagcgaaatggtggagaattggagctctttctactcctgacatgcgtgacagttctcttgctgttggtgtgtaatatctctaaagacaacacgagtaaacaaaaaagtaagcaagatttgttgtatcattgtcaagaaattggatttgttttctctcttgcctggtaaaacacgcaggctactgctactggaatgaagatgacacaaacttgccaagcaacttgcgacatgacgaagatggttccaacaatctgaatgatcgaaaaagcacaccaacctagtttgactgccatttccaaatccaggacactttgatctgtggatgcctattacaaaacatgaaaaaaccaaaggtattttcagtcttgattataaaaaacaaaaccatgttttttgttaaattgattctggtacttcaccctgttcaagattcttcctgttggagttgaatcgaaatatgacattggagctctgaaaatgctgcagagcatccttgagaagaacgtctctgctgttgaaagtccacctatcgcgactagaatagtccgtgctaaaacacaaagtgaacttcctgcagcaagaagtgcataaacaagtaaaatccgacccattcctaactttggtatggattcagcagttggaggagcagtccatgccatccagtaattgctagcaatctgtagcatttggaagcaagactgagccaatattatgaatggcacaagcaatccgccttttaccgttgttaaatatgtcaagtaaacttctttgccaattactcctttctctgtttcttcatcttgcactagctttgcttctttctttttattctctgttgaaatgttatgctctgagtcacactgtgtctggagactctctgcaattgatgtggtgtcatcttttcattcctctttgaagtttctgcttgacttttcaattgatagaattgagtctagcgcttcgttatgagctcccacaagaacttcaaaacctatgttttgctttagaagctcttcaaacttgcctgcttgcatcactcttccgttttgcatcacctagtatacaaagtacacacactaatgttaatggaaaaactaacagcctcttttgcatttgcttattatcaacggctgtttctcttaccaggattagatctgctgctggaagaaactcaacttgatgtgtgacgtaaagtacagttttgtctttcagtatccccattaagcaatcctgcaaaacaagtaaaaacaaaacatagtcaagtgtggagtttaaagagagaaaggatcaaacgaacaaattgtcatgaacattattatacttcaaagagttctcttcctgtatgagcatcaacggcgctaaaaggatcatcaagtagatatatatcagcattctgataaaccgctcgagcaatctgtatcctttgcttctgacctccactcatgtttatccctctctctccaatctctgtcaagtctccattcgagaaaagctcaaagtcctttatcaaagcacatgctttaacagttctctcatacttctcactttcatacatacttccaaacaaaatgttatctcttatagtcccgcttagtatccatggtgattgtggaacataagcttgtttaccactgactctgactgttcccttcagcttctgaatctcccctaggattgaagagagtaagcttgattttcctgatcctacagctccacaaaccgccactttcattccgctttttactttcagttcgatgtcattaagagttggtctgcttgactcaggttcccaactaaatgctccattttctatttcaacactaaattctgtatgatcatttgagcaatactcaactgcatctttctgagtctcgctttgttgcangtaagaagctattctatctgcagaaaccttgctctgaac

SEQ ID NO: 31068 - DNA, 5389 bp, Arabidopsis thaliana landsberg
gatgctcatctccatcatcgttcttgtcctcgactggtgaggttgcaggcacgtttccagtgttggcaggttcagctgcaaccactttttatgttagattttaaaactgttaaaatagttttaaaacaaagaccagaaataccatatacatgcttagaacagtagaacggatatgtacacttgaatcaacagtttgatattcctgcctagtctcatttgactacaccaatacagaaccgagtactcataacggcattaagaaatgacggaataatccgactactaaaaagtagtagtcgaattggggaacagagctgtagttttaattggaaatcagacgtctatgtactagcaaccaaaatcaaccaactatatcttaagccaaagagactaacaaataatgaaaactatgatacgtttgcctatgatccaagaatcaaaatccacttctcaaaacaaaaatagcaataagatgggatttaaaatgcataatcatatgaataaatcacttcaataactgctaacctgagttctctggcttcccaatttcgattctttccacctcaacctgcatacattacagaaaatgtaaacttaaaccagtagcagcaacattttataccatcaagcattcaataaatacaaaacctgaacacatcaaattggataaggaaaaagtaaaaggcatttggaaactcacaggcacatcaggaagcaaacttctattgacttgtggagatttagcagcacgaccaacaggagataaccgatgctccacaggcaccgcagattgagaagccgcagcagattcaccaggtgtcctaacatgtcgcagctgcgtaacagcccgatgcaacctctctaaacgaaacttctccccatcgaaaaacaacaccgcatcgctttctttgtaatcctcactactaccttcaaatgtcaccttgggtttacctggttggttattctgaaactcaactgaaactctgttatccttcttcttgtgcattgatcctgacctgttcttatcgattgaagccggcttaaattcatctgcaagtacacaattatcaaacatcttattctatgtattccaatttaggtcgaattaacccaaaattaagaatggtaacataatcagaaactcacatcgcaaagtgcagaatttatgggaggagtcatctttggcagaggaaccaaggacaagatcataccattgatctgtcttcggggcagtactaggctcatctctggagtgattcgacatcttcgaagctcgatcaacgattgctcaaggtgaatccatcgatcaaggagacgaagatcaaatccacgagactttgcgaaacttgagatatctccgattctcaaattgcggaggacccagaactgacgcagctcacgtagggtttttcttttagggcagagaagacgaatccgagatcagaattttggatccggtacccgccgattcatgctttttaatcttcttaaccaattacgtacggacacgagttagtatgtctggttttgggttccacgtggatctgtttggtttgcggcagctattttattcccacgtgcgattactgatcaaatctcaagccaagcgttcccttttgtcgtcttgttctgatttaatattaaaccggaaatgaccgatcattcagccgctagtgtttggtttgtatattttgacgcattaatgggcttataattgggcttcttttttagactcgtgttgtcgctagcccaatggataatctttgacagtatcgttcaaccacagattatctttttcgcacgatgtgataaatacaaaattttcaaatcaagaagaaacttcaagatacaaaattattgcaatcagtagatttggcgtggatgatgcatctgtcatcgcaatcttgtcttcttcttcattgacaagttccatgtgtattgtgtagctccaggtgttgttctctaatcggctttatctctatccaaccatcttcacgactgtggtctaattgatttgttagtgttcttctatttcctggttcagattcttcactgctgtgtatagttcttctcattcaattacttgggttgtggtttaaatcaccaatttggtcatcttcttgtgtttttttctatcgttgacttcgagctttacatagtgagatcgagatgtcaggtttctccagtggaaatgttaattctagggttgtggatatactcagtggtgttgtgcctttgttgaagcttatctgtttaaccgtgattggtctacttcttgctcatcccaagactcaattagtcccaagagccacgtttaggctcttaagcaagcttgtgtttgctttgttcttaccttgtttgattttcactgagcttggagaaagcattactcttgataacattgttcaatggtggtttataccggtcaacgtgttactcagtgcggtcgttgggtccttgataggatacttggtagtcctcatatgcagaccacctcctgagtttaatagattcaccattgttatgactgcttttggaaatactgggaatcttttgttagctattgttagctcggtgtgtcacacgaagacgaacccttttggaccgaattgtaactcgagaggggtttcgtatgtatcgtttgcgcaatgggttgctgtgattcttgtttatactgttgtgtatcatatgatggagccgcctttggagtactatgaggtcgttgaggaagaaggggttgagatagaggagatcaatgtggagaatcatgatgctagtaggcctcttctagtggaagctgagtggccagggattgaggacaaagagacagaacattgcaagacaccttttattgctagagtcttcaacagcatatctagtttctctcagacttcttttcctgaagttgatctcgggggagaatatggaggagagagttccagccctaggtctattcaatgcttggctgagcctagagtaatgaggagaataagagttgtggctgaacagactccagtcaaacacatacttcaacctccaacaatcgcatctctattagcgatcattatcggatcagtgcctcagctgaaaagtgttgtctttgggtatgatgctccactttctttcatcacagatagtttgaatataatgggaagtgcaatggttccctctgtgatgcttgtacttggtggtatgctctctgaaggaccaaatgaatcaactcttgggttacgtactacgattggaataagtgttgcaagactcttggtgcttccgttagtgggaatagggattgtgatgtcagctgataaacttggtctcatttcctcagcagatccaatgttcaagtttgtgcttcttttgcagtattcgactccgagtgccattttacttggagccatcgcgagtctaagaggttacgctgttagagaagcctcggcacttctattctggcaacacatctttgcactgttgtctcttacgttctacattgtcatcttcttcaaactcaccgttgagactactgtccaaggtatgcaataaatctaaagttaaatgtcaactttgtttgtaaagaatgtgatgttatcaaatacattgaacttcaatggtgtgtgttggtgagtgttggtggagtattaccaattcaaagtttaagaagttttgtaccaaaagtggcatgaaccgtgcacttgcttgatcttatttcgtggcgtaaatcatcttttaaatagagcatcatcgtattcacatggttttagatgagatatgtatacacgtaacgtaacagtgacctttgttatagaattttaaacaaaagaaatcaaagatatggaccgtcataatatccaatggtggagaaaggctgctttagagagatgcgattggaatatgcgtggaacttacagaaaaacgtgttaatttcttggaatgtgaatcttttaattatagtttcagagaaaagataaatcattttggcttcgttgaagaatcaagatccgattttatggaaatgagtgaatggaagtaagtttttgctagatagtaaaaatcatgcctctcttctcaccatttagtcatatccaagtggcatggcctctgattatgttgggctcctgattggtaaaatatttaatgtattaaattcatatttcaatacttaaagataatcttttcaaaattcagaaatttccgtatctataaaatttagcctaacctttttaaaatggtctttacttctctaaaaagaaccgtcaaatacgaatacgattctaagttttttagtctttatagtcagtctctcacagattttgtgcattcaaatcacaaagcaagtcgcgtacaatgggttctgcattcgatccccttgtcacggccactgaggatctcgccgccgtcaactcggcgccgccactctcaaacctcacgcaagaagaactcaagaaaatcgccgcttataaagccgtcgaattcgtcgaatctggaatggttatcggtctcggcactggctccaccgcgaaacacgccgtggctcgtatcagcgagcttctccgagaaggaaaactcaaggatataatcggaatccctacttcaaccacaacgcatgagcaagcggtgtctctagggataccattatccgatctagattcgcatccggtggtggatctatcaatcgatggggccgacgaagtcgatccggctcttaatctggtgaaaggacgcggcggatcgttattgagagagaagatgattgaaggagcatctaagaagttcgttgtgattgttgatgaatcgaagcttgtcaagtatatcggaggaagcggactcgctgttccggtggaggttgttccgttctgctgcgatttcacaagggggaaactggaagagctatttagagattcgggatgtgttgcgaagctgaggatgaaaatcggatctaacggcgaagaggcggcgccggctgtgacggataataggaattatgtggtggatttgtatttggagagagatattggagatttagaggtggcgagtgaggcgatattgaggtttcctggagtagtggagcatgggatgtttctgggaatggcgactacgttgatcgtcgccggcaaatttggtgttaccgtcaaggataggtttggataaaagtgtcatttgaaaaccattagggattatggtttgattttgattttcgatggattctctctggttctgtaaaccctttcctcctaagtttaaaactttgacttattttataaaactttgtaaaattttgacttttggaggctgtttactgcattgcccctgaccttatagaattcactcaattgccccgcaacttttttaatctacaaaacgccaggaacttttacgattttcttaaaaa

SEQ ID NO: 31069 - DNA, 2900 bp, Arabidopsis thaliana landsberg
agatttttaccaaattgagtcccacttatgctcaatcgattttccaaaagctctaaatagtcgtttcaaaaaattgtgatattgctctagaacatctttttagtcttaacatgcataaaatgtgaatgattcaagcaatgctagtaacatttaccaattatttaattaatgcatgcaacacaacgttttctaatagaaactagtaaactataaatttgttcaatcatatgtcgtaaattgcattacgaaagttatatttatatttcgtccatagaatagaatgggggaaaaaaaactacaagacatgactataaagatgttctagagcaatatcacaaataatcgtgagatttagagatgattgccatgacggcatgacacataactgacataagtaaggtaaacaaaattaatggaagaattttaggatgtaaattaattagcactactttagattcaccaataattactagctaggttaaagtaaacaattaatcgacaaatactatcgactcttttagtcaaccatttttactttactgtattcaattgagggttgtttatccatttggttataacccattttttcatctaactaatatgttcttatttttaaaaacaagaatttattttttgttgatgtcattatgagaaaagaaaatgtatgaaaaaataagaagtgaaaaaacgtaaaagaaggaaaaatagattcaatccaatcagaaagtgatctaaagagaaaggaaggaggcaaaaggagaaatcgctgacttgcaacagtacagacgcagtcacgctgctaagcatatcaccaacattctccttatgactccaatcatttcttcttcctcaactttttctagtttgctaattttatgtgatcttttttgtctgtaaatggtatatctaaatcaacgaccccttaaaaggatcagcaaatgttcaattataggccgtttaaagaatatctgataatagtttgtgaataaaggataaactgtgatacaatgttgtatttttcgtgtctatttcgatatccacgaagaatcgatcaacttttgtgaaattaagaataaaatcaaactcttgtgaaaattataattctaaattttaatacaaaagtgaaaaaaaaaaaaaaaaaaaagatagctatcaaaatgccaaattagtgtttgtaaagcaccaccaattagggatagatttgtggcgttaatcttttgccaatctatcgctaatcggttgtaccatttttttgggtgcgtagtattttcaaaacgtgacaagtttacaaattcccaccggagaagtgggttttcataatcgatttcccaaatcaaaattcaataacggaatagattctaaaagagagaaaggagcaaaaagaacagaaaaaagttgtaagtaaaatgacgttactttggtagacattcgaaagtgaaaacaagattggtggtggaaagagacaacatgttactatgattgtgttttgttatttgaacttaagacttttctaatttacttttttgtaccatttggtttatctattttgtgtgtggagtggtgagtatgtgcacgtgtatgctctttgtgtcatggacaccattatcaccatcttatcaagcctgcccttctgctttttaccacattttgtaatctcattttctcacaatttctctaaacccaatttgcaattagaaattaacataagatagattaaaaaatactcaaaaatgaaacaaaagttgaaattaactgtccaaattttatgaggattcagattcaatgtagacatgaaacaaatagagagtggagaagaatcttaacataatctaaatgccactaaacatcaaagttcatacgattgtctactgttacagcattttttacaacatattaagcgactctgcctatttttgtcggcgggtgaacaacgcattacgatctgcctttttctttgatctttcacaagaagctggttccgacagagagatcaactaaatccttgagaatcgaatatcgggttgtcccaatctggtgagcaagttcaagctgttcctccaatggaagcatctcgtaactgcaaaatgttttcaaaaccatgaggatatgcatctatgatccttctatcgtgtgattttcgagtttattatcctatgtgctctctctactttgaggtccattttgtcatatgtctgttactaccgtttgaacatatagaatgcggaagaaaacttactggcatagtaactcgcagtcaactatgctgtcaggcccagatcgtcgagccttcccacttgagcggaattgacggaaagcgagtgggttcagacccgcaacatgaggaacagcatccactagctttttctggagagactgtaacctccggaatgtgacctcatcgagtggcgcaatgcaaccaaaactgccgtctagagtaccaaataacaaagcaaatcgatttattttatctgctccagaagaaaccatctgcagacgtaggaactttgacacatgggcaccaacgtgaaattccgcccttgaaagaagtttcagacccttccagctctcaatcatctttggtgcataataaaatacctgttggggatcagtaccaagtcaatttaagagttgaggtattttcacaataatccatcttctaaatataactgtataagtaaggcctgatctcatcacgtaaacactatatgcgataagagaagtgctaagttgctaacttcgacatcctttttgggaatataatataatatctgttggggatcgatacatataagtaaggcctgaccccatcaagtacacactaaaggcgataagaggatgctaacctggatattcttttgttcatcggagacagccaggctaagcgtacttccatcaatcaa

SEQ ID NO: 31070 - DNA, 586 bp, Arabidopsis thaliana landsberg
tatagattattatggaaaatattttcttaattataaaacattattatttagaattttccactttaacaattataagtacacacacaattaggagttctactagctttggatgcaatacatttcccaactccattgtaccccgtatagcagcttaggcgacaatcaacaaggtcacatggagttcttggatcaatgattatagtacaatacttatcagtctgatctcccttacccttcttaaccactgaaaatattaaaaagtaaaataccatatgttatgatgtgaaacaatatagtgtatatgtgtacacgcttagatgtgtaatgtaatgtgaagatgaaaactactttttgatgtttggaagtgggaaacatgaaattacctgagaacacaagcatgagtataagaaaatgagaccatgatatgttggccatgatcaaatatatcacaattcacaacaacagaatactaatgttttgtaaattagagatgaaaaatgaaaagctattttctttgctttattgttatgtaatgcttgtgttaatatatatcgaggtatacatgacttttctttattattcacat

SEQ ID NO: 31071 - DNA, 2405 bp, Arabidopsis thaliana landsberg
ttaacccattatatctgaaatgaaaagggaaaaataaaataactccatcttaaacaaagtcatagaatttattatagggtcttcaatttcacatttaaacttgattattttacttggaagatgttgtcttctcctttctctgtgccaagttaaaaaattgttagaaatttgagtaaagccaaacctaaaagattgatataataataataataacaacgtatcaaattacagatcggacctagctagttgagttcctgcaatgaatcttctagtttacgtttcattgtctcgagctctgcttggaaccgcccgatactagttaacgtatctacaacgctctctttcaccttggccaactgatctgttttgactgagcaaggtttcgtgtgctgcaagtttccttcaataccactagatttgttagatgctcgagagggttctcccgtttcagctattttctcccttatctcaactttcggtctcattgtagatgctcgagagggttctcctttttcagttatctcaagcttcggtcccattgtagatgctctagaagtttctgctcccttatctgtttcctggctcctattttggactcgagctctcttgtgtctcccatcctctgctttgaatgagggttgctccatctgaaaacaagtcgttatttgatttaagcaaaccttaaacgtggattgcaagctatttgacgttcttactgaccttggagcagaacttgagcaaaggacttacacctccttggatcaactccaaagctagtgactcccctgcgcctacttcatttgcggcacagaaacttttccagtcattaccaccaataatatacacagctcctctactatcaaccttaagcatcatcgaccactcagctctgtctttgtccaccagaattatcttccccggattgatgagtccattcactttcgtgaaacttaacggtagatgctgcaaaaatattcagaattataaagacagtcagtgcattgaagaaaccagagacagaggtttccaaaagtcacctgtttaccaagcgcaaggctgcttggtgtaggagttaacttcacaaacttgctttctccagttatgttcatactctccacctttgtgcggctgcagagctgaaacacgggcgttttcgccttttgcaacagtttgaatgtgcaagaatctccaacatctaatttattttcggtgcagaaagttgtccaacctccaactttaataaaccgcaccagacatataactctttacttctgattcccatgactttccttcttcgttcatcaaaactatctcatgccttcctttactaaaaccacttcgcttcacgaaatctctcggcacactctgcatcagtcatcaaattgcattaggactgatataaacatagaaaaaaacaaagaaaccgctaatccgacaaaccactgcatctcttgatatgtttgaatgcgtcacggattggctaaaacaattcagatctgatgaagacttatcagattctttttgcaaattctcttcaacttctttctcggatatttctgaatcagaaattgaaacgtttcaagaatagcctaagataaatgtataaaggttcattgaatgatgattcataccattttcaccactctcttcgccttcttcatggctgatagactgtgggtattggatctcacagcaactaggtcccaaagcagtgacatggaacaccatgtctccttcatgtctaaagacaacgaagtcgcggatacgaagatcatgtgcctcaacgaactctttccaaccttccgtgagtctatgaccctccatcttcacttcccatgttctctccgacgcatctgttctcaacgttacagtcttgccttcgtgttttccctcgatgtgctcagagaagtagttcacaggaattttctgcaacagagaaacagaaccatcatgagactatatgttatgttcagacagattgagagaaagaaagattgcgtacgaggttgctctggaatccgggaagaagaggctggaagaagtgttggttagtcggagacaagggtgatgcattcgccattccgatcactctaacaaagccaaaagcccaaaagttttctcggtgacttaatgtaataaaatacaaaggagattcttgtctacattatatgtacgccatttcacaataaatgaattgacaaaagacaaaatctctttcaaatatcagaattttttagattaataaaaaacaatataaaaaaatgtgacaataccattcacttgacaacaccattcactgacactaaagacttttgaagtttaggaatagagggagtaaaatttgataaaaaacaaaactaaaatctaaatcacaaaagatagcctgcgtgatgtcttattttttt

SEQ ID NO: 31072 - DNA, 2472 bp, Arabidopsis thaliana landsberg
  unsure (1)..(2472): unsure at all n locations
tacttcagtgccccaccatttgaggtcgtgtccagcattctgcagggcgaagaacaagatttccttatgaacgcggtccctgcatcgagcgctgcagagagtacgtaattgtacttctgccaccatctcttgtggtaattgaacacaaagtagttnnnnnnnnnnnnnnnnnnnnaccagctggcaatgttggttggagtggctggaggcatccctgcaaagccgtaggagataactggaatgttgatgagagggatccacttcttgtttgggaagatcttgctcagcgcccacacgggaacaggcaggacagctccaatgaggaagagccagacaaggttacggtacatgcctcctggtccaaagagccgtcttggtcctatcaacccccaaataactgaagcatcgaacgtcactctatacttggggcaagtccaggggctattagggtggtctccttcgatgtcgcatatgtcttgaatgctctccaacatccaccaggccactcccagattcaccacaccagctaccacagtgcccaccagctgagccgtgtacatgcagcgcggtgggattttcatgtaatggccaagcttaaggtctgccaaaaatgagagagcatggactgtgctgattctcccgtaaatcttgaaaatcaggtttgcaatgggttttccaggcaggatataaccgataatgaactgccctattatatcatatcctggttgctgcattttaaaaaacaacacacaaaaagatatgagcatgtgttattggaagaggcattgtcttatatataaactagtatgtaacctgatttgtagttgcttgaatgacaccgatagggagtgtgacaatgaaggccaatgcaaaagcaaagagcattccccaccatggaagctgcactgactccttccacacaaaagacattaggagagacatggctacacttcctgccagcaatatataaaaccaccactcaggcacttttttgtagctttgcatcaattttccatggatgtccagcttcgtggtgttcactgcagaccaagtctgcttccatatgtccctgcacaaacacaccaagtgatgattctcttctcacagtgcccttgctactcaacaaaactgaatgacaaaactaactaacctgccgttgaacaatgccacatgagttagtgttgcagtgaatctcgcaaacccggatccgatagagagtgcgaaaagagggctgaggtaaagtttcccgtagttgttataagcaccaatatccagatcaaactgcggtgtcaagatcttggttgtgtcatacttctggccactagtagtgaatagctggttggagaaaatggggaactttctggcatcgaaagtgttgaacttccagtaacaaacagggacgatgatgtatataaacatgatgaaaccaacaccaacgttgaggatagaggaccatggagccaccaatggactaccatggtaagctgagatgccagcccagtcaagagtgaaggctccaaccccaaggccatggtaccctgaaccaacctgctgagccgtgatgctgtttggccaagcccaacaaacccatgagaagaaagtcaagattgggaatagatagcctggaagtgcatagtaaataaagctagcaccaagagctactagaaagaacttcatcctcgtcaagcctttagacttgttttccttctcgtgcaacgctctgaaacaaaacacaaaaacaaaacaattcaacttcaaaggaatcaacttttctcgcattgcagctaatttacgaatcaagattggattaagaacctgaagagagaaacttgagcgagatttgaaggccaccacatgtcaacaggatcaacaaggtacctcctcagaatcccagcccaaccataacccaaaatctacaaaaattcatttccattctggtcaattaacagattttttgacaaaattgtaaattccaaaagggagaaagatagtaaacctgagtggtcaagacgatgaagagaccacagatgaagctaaggctctgtttatagtaagctttcataacagtgatagccccaatagagtaagcatcaccaccaccgtaagcaacgccacaattagcaaagatggtgataatgacatgctccttgatgttaaaaggaccaggattgaggctaaaactccacccaagaaggttgtgagaagtggtgggaagagtccgagccatgaacttgccgatgggcaaaacagcgatctgcatgaggatggctgagatggtgagtggctgcgtacggtatgtgaagaacgtgttgagaaagatgagcagaacacaagaggtcagacccaagaaccaagctctgaatgtcatcaccggtaggcttggatcatccgtctcaggcacaacaagagccactttcttcaccggacaacgcttatggtccgaggagagatggacattagtcttatcagtag

SEQ ID NO: 31073 - DNA, 740 bp, Arabidopsis thaliana landsberg
  unsure (1)..(740): unsure at all n locations
acaaaattttaccaaattcagaaaccaaaatcaaagattgtatataaagtgtttgtttttaactcactctttgttagcaatgacaccagcggttagtgttgatccattgtttcctccccaaccaacaagcataaccctatccacacaaaaagattcaaaatgtgaattttaacaccgacccagatgaattcaagcggagaaatcaaggaaaacaagtgaaagattcaaactttttggatattcgttaccctaatttggggacacgagtgtctgttttgaaatcgtatttgacagtctttggcttcacgacccactgatatgtaccgttacgattctcatggacgacctccgtcgtctcgtaatcgtacacagagtgaatctcattctctgtgtatttgacatttgggctctcaactttgaagctctcaataaacatttttgcagaggaaaaggaaaatttggttgtctttctcggaatttggatcggttttggggtgtgagttttgtgcttctaatcagcggagacgtgcaagtttatatagacgagacagcaagggagatagagacaccgtggcgtcacttcactggttgatggtccctatntgcccaatgcatgtgagctagtgatgcttctggttcatagtgagccacacgtgtggngtctcacacgtgagggaggagcggaaaattaanaaatagtaattgacacgtcagatatctggtccatacacgtggcgtcg

SEQ ID NO: 31074 - DNA, 2651 bp, Arabidopsis thaliana landsberg
gtgataagatctgtcatctcgtactgaattagttaccgaagatcagtggatagaaggaaatggtgtgaaaaataacccctcaagataatattaaccagatattataacctaacaaatctcattgttggatattgattattggtgttttgtgggatgatccagcgggatcgatcaatatcagcaatatattgactgggaaatgcttagctaaaataacaccaagcagtgggcctccaaaagatgatgagagcagcagcagtaattgtatgggaaagaactcaaagcaaagaagaaacgctgtagctgaagctttggaagacataaccgctcttttctacgacgaagaacgcaatgagatatacacaggaaacagacacggccttgttcatgtgtggtccaattgatttcacatacatcgtcatcgttagctgctactactactactacgaatgtatcatttggtttccttcaattgtgtgtagcgataaatctttttaacttagtgtctttgagcagccatctgtgttgtaaaccatttgtgggcaagtgtgcgcgtcagaatgccagttgtgtacactaataccattgtacgtaacatttgggttttgacaattctatgaaagaccctttattccacctgtaaggtctcactttaattttcaaaattgacttgattcagatagttgagcatcaactttgtatgattacacaaaaacaagcaattgatagaaaatcatctcattgctaccacaccattgtgttttacattcacttgagaatacaagctttaccagtttcttctgaaagactacaaatctctaaaccaaacataagacactaatgtgtcggaaacaaagatagatcaaatgtttaaattcaccaagacgatgacaacagatacagcaatgaacttcagaactgagacttgtcaaggctgtcaaaatatgggtgatcaagtgctgtttttgctgaaattctttcggctggattgtacttgagcattttctgcaattgtacaaacataagctcaatcagaaagatttaaccaagcaattcagcttaggaaaaaaagagggaagcagaagcaagaggtaacaatattagagcaactttgcaacaaagctatggtcatcagggagttatttaccgtgagaagatcaactccttgaggagatagagaaggaacagcaagagttaagtcttgcggctcccactttggatagacatgccagtcacgcaatgccattacacccggccattgctgctcagttggtgttcctagcaacctccatgaacccaaaacaaaaccatacttcagatatattgatactagacagtccccataatccaaatgagttcacgagtactgaacctaatgggctaaagtcctaaactggttcctgtatacatacacattggcatcaaaaacaagaagcaaatacctgaaaatatgaagtagttgctgaaactcagaatcaccagggaaaagagcttgccttcgaatcatctcggctacaaaaaaatgggaaacatcaatacggcaaatagtaggtcaatcaacaaagccacattaaaagagatatacttagcttgattactaaccaaagatgcatccaacagaccaaatatcaacagcagtagagtaatgagtagaaccaagcaaaacttcaggagctctataccaaagagtaacaatctcatgtgtataagccttaagaggcacagtaaaagcacgactaagacccaaatcagcaatcttaagaatccctttatccttatccaatagaagattctgcggtttaagatcacgatgaagcacaccatggctatgacaatgagccactcctttaaaaaagctgaaacattaacctctgcacaagagaagcctcaagcggtctaggattcgagccctttctatgagaatctataaatttcttgagatcagtgtcgagatactcaaaaacgagatagagattggatttgggagagtgagaaacagtcgaatctttcgattgaataacatgttcgacgcagaggagacgaacgatgtagattgattgagaaagcatttggagaagagagatctcacggagagccgttggtggtataccttcttcgtccatttcgagcctagttttcttcagagcgacgagttttccggtggttttctccattgctttgtagactttaccataggttccttcaccgaccttttcgagcttctcgtatttctccattgatggaggattttgaattgagactgatgaatgttttttgtttgggtcttataaaccctaaagccccttttcgattttagatctggtaaataaaggcgcctctttgctttaacgtttaacatttgaatccctcgcacgtttcacacgtaccaataatattttattagtcaaagtctcaaagtcattttaaacagataagtatgtataagatatttgcttgattatgtttatagatttcaattcattatccatggtaaatgtttagttgaatgaatctatgcatgatctttgatgtaaagccggccctgagtacaaaaagctaagctcatgcttgcagccacaacccataataaagatttttcagtcatttattttgctaaactattaatactattacttggagagtcgatcatt

SEQ ID NO: 31075 - DNA, 1790 bp, Arabidopsis thaliana landsberg
gacggtgttcgtcgatggcttgttcagcgaccttcttcttcttcttcttcttcttccaacaataataataataatcacgagcaacccattctcaattcgtcttctttctcttcttcctctaaccccaatcattccgctaactctggagagcttattattgaagaagatctcgatttctctggtctaacgcttattaacgttcctaaacgtaatcatttacctatggatcctcacaagaaggtacctttcttcttctccttctctacccttttatgctatttgctcttagatgttgtcttttgattgagattgaagagacttgttttgttctcttaatgttctgtgttattgcatttgcttccacaaaaggataaagtttcagttttgtgtttcgtttgattgatcttattgtcttgatccatcattttggtcaattttaagtatgaatcatgaataaaattcttcagggtgaaactgaattcttcacggagtatggagaagctaacaggtatcagattcaagaggttgttggcaaaggaagttatggtgttgtggcttctgctgttgactcacacactggagagagagttgcgatcaagaagatcaacgatgtgtttgagcatgtctccgatgctactaggattctcagagagatcaaattgcttcggttgcttcgtcatcctgatgttgtggagattaaacacatcatgttacctccttctcgcagagaattccgcgatatttatgttgtctttgagttgatggaatctgatcttcatcaagttatcaaggcgaacgatgatttgactcctgagcattatcagtttttcttgtaccagcttcttcgtggtctgaaatatgttcacgcaggttattttctggttttacacattggtctctttcgatcctcatggttttttcttttgtatagatttattgaaacatttaagggttctctgttttcagctaatgtgtttcatcgggatttgaaaccgaagaacattctagctaatgctgattgcaaattgaagatctgtgattttgggctggctcgcgggtgtttggacgattccccaaccgccatattttggaccgcgagtcatctaactcaatgtgaaagcaaaactgttcattaggcttcctctttactattttcaatgcttgtgagctcatttcgtttatatggattttgtaggattatgtagctactcggtggtatcgtgcccctgaactctgtggatcgtttttctccaaagtaagattctttttcaccgaacccaactactcttgttatttctctgtacaaggaaaaagctcctagtttgctgttttgtagaatatttttgtgtggttctgtagtgttgataagaccaaccatctcaagctaagtctactcttgttatatttcagtatacccctgcgattgatatctggagtgtcggttgcatttttgcggaaatgcttttgggtaagcctttgtttcccgggaaaaacgttgtacaccaattggatctaatgactgactttcttgttactcctcctcctgagtcaatttcaagggttagtcactcaaaacatctgctcatattttctgtagcaaatttaatgttccatacatcattgagaggaaattaaatccttgtaatgagctttgcaatcttggacttgtacagattaaaaatgaagaggcgaggagatctcttctttccatgaggaaaaaacaaccagaccctttctctcataaatgccctaaagctgatcctttggctctccgacttctggaacgcctg

SEQ ID NO: 31076 - DNA, 1018 bp, Arabidopsis thaliana landsberg
tgctctcagacttgtcatggacccgtcttcctaaatgtggcaataggattaagatcgaacactttcctagccggttatcatggaagagcaggtactatgttgtcatgatgctggaatctacaccttctatgcttcgacttggcgtgttcgattctgagttcggtaactggaactttaattttttggagtatccgccttggtcacaatctgtattgcttctaacgcaatcccaactcccaagccttgactgacgttcaatggagttgtacattggttagccgagaaggggcctatcgtagcttaaaaccgtaactataagcaagatatgacattcatgcatcgtttacaactcatcaactgttcccaagagatgcgtcatgcttattatggtggcaaagctgctgttacagagaccttaaccgtctgcatgggccatctacgcatcattcagctcgtttgctatccctttcccagtgagttactaaaacctagcccattcaaacaaatctagacactaataataataataattaattttctccttttttatgtttctagatgatcatcaccatctttctatttggacactcgtggattacgaacaatccttgtggaaaaaagagcacgattctgtctatttcagagacatggtttctggtattccgtggatacaagattacatgcggcaatataatctggagacaactaaacaaatgtccttcctcatggcagttttcatggataaaagggcacctccagaaacgagaaagcggatcattttcccacaccctttactttgccatccgaacaatcctcttctagtttacttgtatttacctgaaagcatcgtctctcttgatgttgcaacaaaaaagctgcagttaattaccaaagacatcaaaagaggcacgtgtcctaaagttggtagatacgaatcaggatatgacatggtgataacaaaaacacttcacttagagccatctttgctctcggaccatgagcgtgtggtgcggccatg

SEQ ID NO: 31077 - DNA, 2486 bp, Arabidopsis thaliana landsberg
ctctaacattcttttattaggacccattaacaagattcaacaatcttcatttgagatgacaagagttcctatatatttacttaaaagagtcttggttaatgctttggctatcgagtggtatgtactgagacataatggacacgatctctgaatccatgtatgactgcaaagttgtagttttaatgtatatataaaaggatcgttagagtttgatgcaaagggtaagtcataataattagtagcaaagtgacattacctgaagatggtacttgtagaatatataagcacctaaagagatacccgcgatggcggttagaaccacaattgtgaacaaccctctgcttcttgatccacttcttctctctgcacatgtttacattgagattttccttctaataatatctgaaaatagttttacatcgttttcaacataccgatacaagtgtcctcttctttcatgtagatactattgttagaacatttgcattcatatcctccccaattgttcttgcatttgcagccatcacatttacaagctgatttctctttgcattcatcaatgtctagttattaggaagcaataaagattggtcagagacaatgtcaaggaaactctgatgttactatgacaaattgtcgaaacaatttcaccttcacattttagaccatctccaaggaaacctagagggcaacgacatcctgatgtctctgagtcctacatcaaacaaatacaaaaggtaagaaaaagtctcaaacttcagcaaagtggaagaaaaagcagcagtcacttaactgaacaagaagagaaagttagaccctttctggtttcagaccagcagtctccattgttcattgaacatctcgcaggtccataagctgtttcacaaactttgttaagatcattgaacaaaaatgtgcaatgagatatattaaaaagagaagattcaaaaacatacgtttgcaggaggtataaccatctcctttatattgaacaccatcgacaaccgggcactcacatactcttcccctaaatgtgtcctgaaaacaattcatataatctaataaagaagatatgatatagactgataaagttattggtataccgctccttatcacgaaataccttgcaagcagttacattggatcttttgtcttgccaacatcctccattttctataagacattcattggtctctatatctgttttagaatggatcaaaaagaaattaagagtgttcttcacagaatgcgactatctttatctaggaagttacttgacctgaattcaaacatattgacggttctgttctttccttgaatcctgaacatatagccttcagcaccgcggttctctccagtttacctgagcatggaacagattaagattctaaaaccgtcaaactttgtgattatcggtgagaaggacgagcttaccgcgatattgagcattgttgatcattaatgtaggaaagattgtaacaatgccacgattctcttggcctaactgtaacttcaaaatgtcatcaaaggaaaaataacagcttgatggactgtgaatttgaagaaactgcgaacctgaaaagcttcctcggcttttagaacttcattctctacatcagcatcaggatcaccaatgcatttcttgatcttctcaagagacagccctgaggaaaaagaaaaaccctgaaactgttatagaaagagttgctagcagattgtgacatctctaggaaaacaaaaggaccttttttaccgagagattccacaatagtctctgcacattctctgctgtatttcttctccttcatagaacacctgatgttaaaatctgtcacatagtcccaccaaacccaagaagtgttcttctccttagctactttatgaacacataactgcctcagattctcataaacgacgtctttcccattatatccatcttcaaattcttgcttagtatcaagagcacaatacctcccttggtttatacactgagtcctacactgcttgctaagtagaagctctttgggacaaacccaagaaatgtagtgaggtctgaacaaagtataaccgcctttttcaagaatctgagccattcccttaaagttcttaatgaaatctatctgtttatcgcagtgtacaccacattcatcattagtattagcccatagctcatactcaactctctcatcagggtttggtatagactcactccaatccatcttcaagattacctcctcacctcttttaagagctttcttgaggctatcaccgaaagagcgaaggattaaagctgatgggatcttgactttgtctataaagtcaggatcttcatcttggggtgtatccattgttatcaatggctcaacaatgttatctgctaaaagaacagccgctgcgccggattgttgtccgttccatatcttcaaagcaaagttacacactaaaaatgaaaaacattgtagagtcggttaacaaagatacaaacc

SEQ ID NO: 31078 - DNA, 978 bp, Arabidopsis thaliana landsberg
cacaagtgaaagagactgtttagaaactaaccagcatgaacatacttcaaaccacgaagaagctgatacaagaaaaactgatgaagctcaggagttaaatcatcattagctttaataacctgatgaagatcagattccatcaactcaaagacaacatatacatcacgaaactctcttcgagaaggaggaagcatgatatgtttaatctcaacaacatctggatgaagaagcaagcgtaacaacttaatctccctaagaatcctagttgcatcagagatatgatcaaacacatcgttaatctttttgatagcaactctttcatccagtgtgagtatctatagcagaaccaacaactccatagcttcctttaccaactacttcttgaatctgatacctatttgcttctccatactccgtgaagaattcagcattaggtattccctgagaaattaccagatttcattcgtcggaattaatcaaatctaatctagatttcaaaattggaaacaaaatctaccttcttctccataggtaagtgatttcgttgctgaaccttaatctgtcttagctttgacggatcggtaaacttctgtaaatcttcgtcgtcgtcgggattagaaacggtgggaggattttgaatcggatcgtgattattggaagcagaagaagaaggacgacgttgaaagaaaagccaacgacgaacaccgtcgacgagattgccaccaccacccattgatttagaggccaataataataaattacagattttgtttttccgattttactctcagccaagcgtttcttcgtcaaatcatttccaccttattcgccgtttctcttgctgaattattttttttgctcccgaggagttgaaaacatgttcttcttctctactgttattttttctcctttaatttattgatattaaagtttcgaacttgctccagttgaatctgaaagagacagacagggacgtgc

SEQ ID NO: 31079 - DNA, 4426 bp, Arabidopsis thaliana landsberg
tgtgccctaaaacttgcagacggaggcctcgtgtggaatgagaagggtaggtccagcagtcccagtactccagtaacagatgaccattcaccaagtacccaaaattttatggatgcagatgagaatatttcatattgggttcctttgctcacaggtaatctatttttaataatacttctgtttaaatgcgtcaacaaattatgagcatcttacattttccgaattcacatatgccattgctaatgtgtccaacttggttgaatttgcattctaatcaaaattctgttatattcattaattacaggattgtctaagctaacttctgattccagatcagcaatccgtaaaagctccttggaagtgctctttaatattttgaaggatcatggccatattttttcacgaacattctggatcggcgtttttagttctgttatatatcctatatttaacagcgtctggggcgagaatgatctgctttctaaagatgaacatagttcatttccatctacattttcttcacatcctagtgaagtttcttgggatgctgagacttcagctatggcggcacagtatctggtagacctatttgtcagtttttttactgtgataaggtctcaactttcaagtgtagtatccttacttgctggtcttataagaagtccagctcagggtcctacagtagctggggttggcgcgttgctgcggttggcagacgaattgggtgacaggttctcggaaaatgagtggaaggagatttttttggctgtgaacgaagctgcttcattgacattgtctagtttcatgaaaacactgagaaccatggatgacattccagatgaggatacattgtctgatcaggactttagtaatgaagatgacatcgacgaggacagcctgcaaactatgtcttatgttgtggcaagaacaaaaagtcacataaccgtccagctgcaagttgttcaggtatgtacaaaatgttatacgatgcattgagatgccaagttgtctaatagcaacaaatgtgaagtatgaaaatgttaaaaataacatattgaaaaagccatacaaaattgaatctagcaatgttatagtctctaattttgccttgctccagaataatgatctaactccgtctctcactactgtattttctcctgttttcaggtagtgacggatctctaccgaatccatcagcagtcattgttggcatcgcacgttactgttatactggagatactctcatcaatctcatcacatgcccaccagttaaattctgatttgatattgcagaagaaagtgaggagagcgtgctctatcctggagctctctgaacctcccatgcttcatttcgaaaatgacacgtttcagaactacctggacattcttcaagccatagtgacaaataatccaggagtgtcgttggagctaaacgtagagtctcagctgatgacagtgtgtatgcaaatactgaagatgtacctgaaatgcactttgtttcagggtgatgagttggaagaaaccaggcagcccaaaaactggattctacccatgggagcagcctcgaaggaagaagcagcagcgagatctcccctagtggttgcagtgctgaaggctctgagggaactgaaaagagattcattcaagaggtatgcaccgaatttcttcccattgttggtggagcttgtgcggagcgagcacagctcttcacaagtcccacaagtcttaagcacagtgttccatacatgtatgggtgcaatgatggatgaataatagggtggttataagtgggttttgacattcgagcacctgaaggatattgattaacaagcagacacaaatcactcttttcttcttttgttttttcttctcgacggagatgcgagatttacaggttttgtgctgttgattgatagtgctgatataaagtaattgattactgtttgtagaaactaagaaaagaatggtgagattaggagggtcattgcattttgtctgcaatgcctattttcttccttccagtcgtgatcaatgtgcataatatactctcacacagctaaatgcggtccaagtaaggattgtgaaggatatattatataaaaagaaaaaagaaaagagaagacaaagatgagccactcgtggaaagtcatttatacctccttgaaatgaagtgatgatatctaatgactccaaagtcataataaagtcaccgaaagtgaatcatgatttgaagaagataaaggagtcaggagtggaactgctttccttggtatgtcattccgaagcgccaatacggaggagccacatcataagaggcaatggttttgccgcctttgagagtaacctcgaaagagagagactgtccgatgagatcgagagaggagtgccagttctgtccccagtttctggccattgggatccaagccgttgtgtggcccttcactttcacaccaaccacttccccgtcgaggcccacattgcttatcaacacctggaaaaagtgggagctcccgctcaagctgaatctcaacccgcctctccgcccacacttgaccctcctatactgtataggtatcatctcagctctggtttctgcgatccctgtgaaggcggcatgagatagttccaagtgttcctttgggaagttgcaccaacctccgtaatcggaggagagtcccgaattgggaggacagaaatcggtggcggtgaccaccacggaggggctgccttgaagacaccaacggatgtagttcacgcaccgcacttctagacaagctccgcagctgcttcccctgttgaacagcttcccgctcaggcctgcgctgtagccggcaaagctgctctgcctcagatctccatacccacaagcgcctcctatcagaaccaattagtctagttagtcctgatgaaagaagaaagaaaaataggggggagagagagaaaagagaaccagtagcgacggaggaggagccgtccctgtctctagaaagcgtggctgtggctatcttccagtcatcttcggcagtggcttgaaagaggcggcagagaatgaagaagaggcacaatgcgagttgctgaagcccagaatccatgaacaagaagtgttgttgggatcctcacagtcagtcacaggtggcagacaaaagtgatgcgtttgagagagttttgggggttccttttgatcatcaggctccgcttttcaagacttgtggggatgcgacaaaagattgctctgacatgttttgactttgacagtccgtttcagaccaattataataaaaaaaacaaaaaagggaacaactatacgttttccaggcccatctcattcggaggcccactttcaatacgacacagaatcaagacaagagacgcaagacgaacttcttgagcccttttgttaattcaatgggccctcactaagaagcccataataaaataaaataagttctattttcaaacattgtactattactttttgtaccggccgtgtttattcaattctcgtatttgtaagaatttataaacaaaaagcaatgattaaaacatttacaatgacattatgacaatgaattcgaatgtacttttcaagtcactcgtaaaagaatataaattttttaagagataacataagacttttaaatcgataagtgaataacatagagtttgtcattttaatacaaatcactgccgataattagacggagacaatgatgtccttaaggggaagaagagtgaaatgaggtagcggtttgaggtggatgagaacatgtgtatacgatgatgactcttgtttgatgggacaaccgtgagtcgacttatccagcgtcccatctctatagacaaacacattttcgtcctcttccatgcgacgccactttctgttgttatctttggcacgttgcagcggcattcccctgcatcatcaacattcattatccatctagatgtaaatgagaaagtgggcatatatccacgtgtgtacctgacatggaagagatcagagacatcaagaaagaaggtcagtgcgtcaataaaagcctggtaggtggtgatatggaggccgtcgatgtggggatagggcagcctgggcctggtggtggtggtggtgggagaagagaggaaaacgtactctttgaatcctcctcctgctccggtggcctgagcgacgaagcccatggtggacatgattggttcaagctcctcgtgcgtcataacaggcttgaaggttctcgtgtgccacaaggccagtttcctcatactgcactcctccatcatctctctcgagatccacaagtgagtgagtgtagggattatggttacaattagtttggtttttctttcttttgcccttgttatttcatttattcaccaaactgccattcctttctgccacgtggccttcttcatcccttttgtgagcaattca

SEQ ID NO: 31080 - DNA, 1079 bp, Arabidopsis thaliana landsberg
gctctttcttttccgattcgtcattcgatgaatcttcctttcttatacaattttggataatcttttctaatgtaaaaattcgagatttttttttataatgttaaatctataaataagagcaacctaaaacgaacaacttctcccactttccttattttcgatcttatccttatcttcttccttgttctatttctcttctaactaatctcttctcttctcttctcttaaaatcaaacgtaatcataaataaagatcttcttgtttaatttctcttgatcctcgcaaaatcacagattcttgaaattcttttttcttgtcttgaaattcttgagttcttgagttatgaaaagacaatggacagagttatgaaatgataaatctcaaccaattccttgtttatcattctatatcagttgtgattcttcattggttttacgttatctcttgaacaaaaaaacatggcaaacgcagagaagacgagttcaggttccgacatagatgagaagaaaagaaaacgcaagttatcaaaccgcgaatctgcaaggaggtcgcgtttgaagaaacagaagttaatggaagacacgattcatgagatctccagtcttgaacgacgaatcaaagagaacagtgagagatgtcgagctgtaaaacagaggcttgactcggtcgaaacggagaacgcgggtcttagatcggagaagatttggctctcgagttacgttagcgatttagagaatatgattgctacgacgagtttaacgctgacgcagagtggtggtggcgattgtgtcgacgatcagaacgcaaacgcgggaatagcggttggagattgtagacgtacaccgtggaaattgagttgtggttctctacaaccaatggcgtcctttaagacatgagatttgtgtattagtgtgtgttttactttggtcattttatagtttttgtaatctttttatatcgaattgtttcttctcattactttctgaattctgatacaattgcatatcttattggtttcaacatttcattaacgttatatgattttcgtggttaacccgaaagaaaaaaaaagttttttt

SEQ ID NO: 31081 - DNA, 4704 bp, Arabidopsis thaliana landsberg
  unsure (1)..(4704): unsure at all n locations
ttccaacagagtgctaggaccattcatcacaagactcaactaatgtttttacattctttatgcgtgtgaagtgacaaaaaagcggcagaagaaaaacaacacgacacgtataatttttataccaacctgaaggtatgcctttatctggccattgctgttactcaactgaccaattttatttgatattcttgtgatatgcccgacatacccgacacgaggtttttttttcccggaggcagctacagtgggctacctcgcacaaaagaaaaagaaaatgccagagaatatttgtttagctaatgaacgctggagcaatgagtcaatggagctaacttggagctgtattaagatgactctttcatatgctgatgatcagttaaacctttgtgaacatagcaaatggtaatacctggctatcacctaagaggtttgagtccctgtccgacaagaggaatttgccaatcagatcgcagtctcgaagaatatggttaaccatcaaatcgctcttgttttccaaacaagaaagtattatactctccacttgatgatgcagagcattattgtacgggtaccttcatatgtcgagagtatttgattttttaagatctcgtagaaatagcacacggtaatcacaaaattttaagtttagcaaaacctactcgaaaaacagatcaagggtccttttgattgttcctgaactgactaattccttttgtgcagcttcacttccagttttcaacaaaactgcaatgaactccacaatctgaaacaaagaaaataagataagtgagtctaattaagtatagagactttacatacaatatattaagagcactgttggtgtcctaaaaacgacaatgtcttccataaaatgctccatgtttggacctgacctttagacgatgctttccgagaggaggcctcagttcaccatatgttgtaggcaatactgtgctatcagatgctacagtgagaagcataagcaagtcatctgcagaaaaaaaaaaaaatattacttaaggtcattgaatgcataaaacctgatttgaaaaacttgtatgagacagtatcatacatatccaagatgtgctacgtaagcattccagaattatgtaaaaccagtttccatttatcaatataaaccaaaatagaagagaccaaatagagagcagggaagatcaaacagaacgtccagatagatgctaaatactctaggtatcctcgcaaatggaaagtaatatcacataagaaaaggattgactattgtccaagtgcacaataagattatgtgcatgcaacaaataaaaaagccagaaaattagtaatcttgtggtcatgtgacgatggtgcatcataggatccaacttactgagtttgggcagcatggcaccaatagtttctggggaaactgggacaggagactcgaacatatgttgacctctgtaagaattgaacatagaagatgaaacagcagatctcctcggatccagaagagaggtgcatactgaaagtgaatgaactagaccggattttgaatgcgagtcttcaagagcatgaccaaatatctttgcaacgtagctgcaaaaacagggaaaaagttgtgctgccatgtgaaacacttttgtatcatctatcaaagcattaggaatcatcatggaagaaagattacaaacccagggctagagagctgcgtagctaaagctgacggtgcattccgagaaattgcacataatgtttctgctgcatttgcctgaacctccggaggactctgattcaagttgtaatgcaagaaacatatcagaatgaagatgatagaagaaattagtaatatcatcagatatcctagatttacaccacctacaagtatcaaagagaaaaccaagagcctcttgtctctgggatgattatagaaaagcttaaccacttacagatggtttaagtttgtccacgatcatttcaagtaaattgctatcagccaaccattgcatcacatccagaaagttgggatagacttggtcatcagccccaaccaagcgaaccaaaacctagaaaaagtcgcgtaaatatcatagcaaaaaagacctctgaaccacaccaagttgcactgagtctaagtcaaaccaattacctccatgatggatgttatcccaatcaaatcaactaactggcagaaaacattttgatgcccctgtgatcatcaaaagttactttgagtactgaatactaaacaaataacaaaaaaattcccctaaattgtctgtcacatcaatataattgccagcaattgaagaatagagtcatgtcaatctcatctactaaacaatttagtaaatagacggacatctggcttgcgagattacaatggaaggtaatatccattctgaatagaagagttaccagaaaataagacgtattctacagtactcctggataatcctagaaatcagttcaaatagtttccataatatatttctcacatagtttaccatccgtttaactatgtgttattacttgcttttacataattcataagcgttgcagtttttctgatcataaggcaaatgacaacctacaccaaacagagagaagtaagaatcacttctcggagccttgaaatgaagtcatatgtatcggtacaaacaaaacaaaagaaaattacaggaacttggctaatacgtaaacttatgtatcgtaagagagaataccttgctgaaatagcctgccagcaatgcactatgaggacgatttggttccagaaaggaaaaaagcaagttcatcagctgcaagataaaattattcgaacaaatgagaatctaggataacaataaacataatccagatgcacagaaaagtgaaaagtatgaactgctatttgaggaaaaggtagtaggatgaatgaaaaatacctcttcatcctcgaccaaagtttttagaataacatcaatttcacatgtaaatatttcacaagagatgaatggaaacctaaaagagaagaaactattattagttagagagaaaagaaatccagaaccattcaaaagaaaagtggataaaaggcaaaaggagaggatggtaagacaaggtaatttccagttagaatcaaggaagcatattaccttgaaagcacgtttactatcagcatcctgtggaggttcttcaacaatgtaccgcaataattgctccacttgagctttatcccttagactgcagacattaatacccaatcaataaagtcatccaagaaaatacgaaggaaatatgggactccttaactaaaactccgcagatagaggagacataggattcaacatacaccatagggtttatctggttctatgaaacagataatgaggaatataagccaattataaatgattaaaaaaagcttacaagttaatgagcctgctattcaaagccttgcattcttgaataatctcttcctcatcaagaagctcttccaacgtgaaattttctttgtctaatattatctccacctgcgctcataacaaaaggaaagaacatcaatacatgaacaattcacgactcagagacaataattcaaaaaattgaaatctagcaaatccaaaaattcgacataaattatatgaaaaagcaaagcaacggatagaaactccaataatctaattctaaagcatatcagtatgtgtagacaagatgaacgctaacatacaacacgacatctaaaaattcaactcacaggagatgatgcagagagagatgtgagcttccaaaacatggtggcgagggaggagtggagctagagaaagcttcgccgtagctgaagagaataaggagaacttggcgagatccgccagaaacctagaagaaaaatctaggtaatcgcttcttcgcggtggaggagtatcgatttcagctcgaaaaccctaatcgatcagtgaagaaagagattgagagatcctaaagatgatggaagcggagatgggagatcggaggtcgaaaattttgaaaattaagaggccgaattttgcataaagaaggggaaaagtaaaaaatggtcttattattatttgttattttattcctttgattgattaagaaaaagttgagcgaattattattaactaaatcgccattttcacagatttgtgtgtctaataaaagtagacttatgattttttcgtagtcgttgtctgatgatcatgattcatgacgatggtggtggtggtggtgatagtaacatacatcatctttatggatacaattgaatgatcgtgagatattgtaacagagagggggatacttgcgtcaccagcagcaggtgacttgtgaatttgttgtgataaagatcacattaatttaaataaaatcagctgttcaatttgcggaataaatagttggcgaaaattgtgcttataaattttacaacgggatgatgaagtacaataagcaaatcaattttgtggataaagaaatgcatatgattgtcttaagtttgatttaatggtgtagaataaaaacatataaagacaaaagttggttgaagtgtcaaacagagtgaactccgtaaacagcctctttttcttcacaccttaagaaaccatagacgaanaaaagtttacatatttttagaaacatttcgatctttaanacaattatgaggagatttgttaaccttacataatacttgacaagagaatgatgaacatttttagacaaaaaaaa

SEQ ID NO: 31082 - DNA, 1077 bp, Arabidopsis thaliana landsberg
gattactcaacggctgacgcgatgttgcgattcttcaagcagcatggggttgctgtacgtggccacaatgttttatgggatgatcctaagtatcaacctggatgggtgaattctctgtctggtaacgacctctacaacgctgtaaaacgaagggttttctcggtggtctcgcgatataaaggccagcttgcgggttgggatgttgtgaatgagaatctccatttctccttctttgagaacaagatgggtactaaagcttcttatgacatctacgagataacgcatgccatcgatccaagggcaacactgtttataaatgaattaaatacattagaggaacctagggatccagtttctactccagcaaggtatttacaaatgcttagggagcttcaatctattcggatttccggatatattcggttagcgattggtcttgagtctcatttcaagactcctaacattccgtacatgagatcagctcttgatattcttgctgccaccggtttgcctatttggctaactgagattgacgttgaagctcctcccagtgtccaggtaattcatatcctcttatacaagtagggcaaaagtcacaattttcgaattcccgtttatccaaccctattgatttggagttttgagcatttgtaacttgtctaatgtttgagtttcttgtaggccaagtacttcgagcaagttctaagggaaggccatgcgcatccgcaggtgaaaggaatggttgtgtggggaggttattcaccatcaggttgctaccgaatgtgcctcaccgatggaaacttcagaaacctacccactggagatgttgtggacatgctgctacgtgaatggggaggacttcgcagccaaacaacaggtgtaactgatgctaatgggttctatgaagcttcactttttcatggtgactatgatctcaatatttctcatcctctcactaattcaagcgtttctcaatgccttaagttgatttctgatgactcctcctcacagacccaaccatctctttttgtctttcgtgtttgagacgataagtttataactactttgtatttgagt

SEQ ID NO: 31083 - DNA, 4766 bp, Arabidopsis thaliana landsberg
ggcaacacccaataaatgatactgaaattcaaacgtcacattattccacaacgattgggtcacaagttacaacccaagtcaatcttcaaccttgggcccaatggggcggcctaaaagtatcgagcgatagagtttcggatattctgacctcaaaccacgtgcgcaaaccacgatctgctcttttgcatacaaaccaaaagaaatttagctgactcttaagtctgactctgacttatttggttgtacttacgacgaatataccaaaatatagtgaaaactaaactaatcaaaccgagtgtaaaagaaaaagagttgaaccaagtattttattcaacaactaaagaacctatgtcgttagaaaaaaccccacaacacttacagtctgatatggtctacttcacgagcactagatgtaaaacagaatttttgtgtgaataaattttacattcgttcaaagtccacaatctcttgatactccaaaaagaaaagaaaaatgggatgaatattctcttgtacataataataattcaaaatttgcggccaccggatttgccaagtgattaaatgatcccttgaatgttctcttgtattttggtctctatttttttgaaattaggttcgtccattgaaatgcgggccctaaaacctgaaaccaatgcaggacttttgtggtagtcatgttatttacctaccttatcttatcactatttattactacgaaaatcgttttttttttttgtaacagaccgtcataggaatagaactataggagtggtagccaataatttctgagtttctgacacagacatatggagtctaatgtagtcgtatctgtattgtcatcattcttcttatatatcagcaaccaataattcctttcttcccaaacgattttacaatacagatcagagtaacacaaaacagtatatacaaagctttgcatcatgggtttgtcataactctaatgctcacattaccataaataatcagatctattcacatgcattttactcttctgaaactctattatttcactcgctgattaaattactaatacatgtgtgagagatttgaaaattcaaacaagcggtttgaagcaaagcatcaaatctgagggattttttggcttttcattttcagcttcttgtgttagtgtctggtcagcttcaattatcacatcactttcttctcaaaaagtgcactcttttcacttttgcttcaagtagataatctgaaaacacaaagcaaacttttagaaccatgtttttataagctaaaggaaacagagattttttttctttactaaaaagatggttttacctggtggttggtttctgtagtgttgtatgcatacagtcttggaactggtctcttcgtgatctcttttgaaaaactgaacctcctctttgaccgttgttcgtatctgttgattctcgcatcccctggtcgtacgcagccatttcattagctgtgtttctgttccgtggtctctcctcggtttttctccagaacttgggacttaagaactctgtaccaggtagtttggaacaactgtctcctgcgcagccactactattcctaggaactctcccgtttgaaaccgccagatcgcacgatatttcatccaacgccatctctagaccgcttacacgagactccagagactgaattccactctgtgaggttcccatgaatttctacatccaaaatgaaaaaaaaaatcagtgaggattgagctatctacaacattcataaccaaacaatttatctacataaagggacactatgcttattaaagaccaagtgtatacctgtagtaagtctaagagactagactgttggttctcaatcagagcaagctgttcccgtatcaaagacagttcctcactatctttcttgctctcttcaacatcatctttacaattcttgactacagaatcaccatcgtcactacaaggtgcaacccttgagccagacctcaaaccaccaaagctcgatactttactatcttccctgcttttctcagagatagtatgtttgattatatctggtccccctgagttagccttctcttctgtttcttccgaagatttctttaccggtgtaaaatgtggtcccttgttatccacactagaggcttcttctactaacatggtcatattcccttgatttctttttggaagattttctttttgtctagttgctgcatatgatctattcacaggcaaagatggggacctcttcattataggcgttactttctttggcctagcggattttaaaccaacgtcaatggtggaacttctcgtgacagaggaaaagcatccaatgttaccatcatctgagaaatcaaattgaagcaagtccctagtttaatttgcattctcactgtattgagacaactaagtaatgactactagtacatacctgttgaagatcttgatggagataaagaagcttcatcatcagttgaaacttccttccacagattcaatgctctattcatagtttccctaacacttttcacctacattgtgaatccactaagtctcaaaatctgattaaagattgaacacaaaaacaaaactttaagtctctattttttttaccttatcaaatcttctactctcaagagccgtcgtgcaagtcttcttatactgcgacgccaaatcttccgccgtcgcaactttacccaacgcctcagccgcagacttcctcgccgcccaatcctcactgctcaaaaactcaatcaaaaccggaactaaccaatccaaaaccggtttagttcccgcaccaccggcggtaattatactcccgacggcactcaacaacgcagctttagccttaaaaccatcactcttaagcaatttcccaatcttaggcaacgattttctcaattgctccgattccggatccgtcgccgcatcaacagacgccgctaaacacaacgccgctccgatctgcagattcgaatcaccttcctgaatcaaagtctcaatcaacggcttcgcgacggaagcaaaaggctgcctcgtaacatgagccgacatatcagccgtcgcgacggcgcaagcagagcgaacggaggaatccggatctcggagacggcgaataacagttgaaaccatcttagcaaggtgaggtgttagagaatctccgtggtaacgagaaagaaccgacaaaagagcaacgcactgtttcctcaccggagatttaacggaagagtcagtgttgtggatacagttaagaaacggagagaaggaatcgtgagtaaggtttctagcgattgagtcaagctcagcggaagcgagagctaaagtgtcacgatcagcgagcttgttgagacaagcgatgactcgttgctttagatcaggtggtgttgacggtgactgtgaagacggagatgtggaagaagacgacggagataatgaaatcggtggactcgccggaaatcgtccgtgaatcgacatttttttttccgatttgagtttttttttgttggtagtgagaaaacgtgttcacattaaatgtgtggaaactgctttgaatatggcggcagagagatttctccgattatgcgtagagacggtttgggctatttgggtttttaaatgcttacaaagaagagggactttgtgtaaataaattaaataatgttactattttcataatcttgcttttgttaatgtcttttagatattgcaataaataaatacactacttgacgaaataaaaaatgtaatgttctagcattatagtaatatatgtgaaaaatactttgatgattgttcgttagtgtctactttgggaaaaaattaaagggaaaataatgttgaaagtattcatatttttggtcttaaagagaacattattgcaatattttcttcaacaataaaagtagataaactctaactagtttgttcaaatattctctttcatttatttactctatttcttttacaatcgaaataattcgaaatctgtatatttcatttaatttgcttttttttgcagattttatttaagttgctgaattaaatgtgtgtgtttttactacattttttgcgttcattattcgtcccattggaaatttaatttggttagatgaaagttattttttaataacccaaatatttttagctatttcgataatgatagcaaaaatctaaattggatttgaagaaatagtcatagtcattggtgagttttcttagtgtaggtcagaaagattcggtccttttttttggatgtcgtgttaaatctcacagaagaaagatataacatatgattttgaaagttcaaataaaatcttgtatcatcatcaccattaccaaatgatacgacaaaaaaaggaaattgaaacaaaataaaaaaaactgacaggcaatggaatatatcccaactggcgaaccttagaacagttccaaatttacagttatatatattaataaagtgattaagacaaaagaaatgaaataatatgttgtgtttttggtaatgatgctgttttaataatctctttgacatttgacttgttcagagtatcaatgatgctaatcagatttaatcttgaatatattagtttctggggccaaaatgatttgacttaagtttacatgatgtaagaaatgacaaccaccatatttaatttcgtattaattaaacagtggatggagatagtacatttgttaattgatgaatatatgatctgattacgtgattatatgatttttgtataatagagttttagagaaaaaaaaaaacca

SEQ ID NO: 31084 - DNA, 5634 bp, Arabidopsis thaliana landsberg
  unsure (1)..(5634): unsure at all n locations
gcacagagagaaatcaatcaaggacgcaccaagtaacgcaggtgatctttcactaagtcactggtagtgagattgacagttttgagttgagaagattccattctcttctgtagtgctttgagctctccagctgtgtgaactccgacactatacaacaatttacaaaattttgcagattagaggatgaataaactactcgggaaggaaggaatttttcaggaatggccttacctgtatagtacaacagcctccttttccgagctacatctatatttgaactcgcttatgttcattggtccaacctgcacccattaatgttttgtcttacatacactctgtaatgtgattaactactatatgctataataccaaacacacaccagctcacaaaattgcttaaagcttccaggtttttccggcatgagagtagcaagaacagcttcctgttgcctaccgacattggcgagttctgtcacaatccttagcttgtcaaagttcatgttagcgccactggttatggctacgacattcacgtcctttaggccataatatttacagtatgcctcagctccagcgagtgcaagagcccctgctggttccaatatgttccgtttctcctcaaacatatcctgtagagacaagtatctgattatctacaattcagtatgcatatgccaaacaccgtctgacaagggataacgtatcaaggatagtaccatacctttattgatgcacaaatagcatcacgagtgacaagaacaacaccatccattagatttctgcttatacgaaaagtctcttcaccaacttctttaactgctacaccatctgcaaatcccccaacctggtccaatatcaccctctcaccgtgatgcagcgacaaagccattgcatttgcgtcagctggttctacaccaatgatcttcacctgcataacccaaaagtcacaataagaaacagaagctgaaggaactcatttcttaattaaaattctggattttgtcacaagtagctgttattaacaacaacagaacagaaggtgacattgccaaagcagtcacagcaaaaagagtacctcgggagaaaccctcttcacataagcagcaataccagctattaaaccaccaccaccaactggcacaaatatagcatgcaatggacccttagcctgacgagtgatctccatcccaacagtcccttgtccagcaataacatcagggtgatcaaaaggaggtataaacgtcagaccctcttcttcagctcgtatcttagcatgtgcttgtgcttgatcatacgaatctccgaaaagaacaaccgttgcacccaaattctctacagcttgccactgttttcaatcccagaacaccatcagatactaacttcaagacatgagaaagcttaaaaatggaaaatacctttatctcaggagttgtaacaggcataacaatcacagcagtgcagccgagtttactagcagataaagcaactccttgagcatggtttccagctgaagagcagataactccttttgccaattgatctgctggaagtttcaccatcatattgtaagctccacgaagcttaaacgagaatacctaaaacaattccagtcaccactcagtacaacaacacataaaacctcagatgtagtctcaattccatacataattcacctaaaaaatcaaccaaaatgtataaagggagaagcttcattacttacaggttgcaagtcttctcttttaagatacatacgaacacctaatctcttagatagcttcttagccaattggagtggtgactcaatggcgatgtcgtaaaccttagtggacagtatattcgtcaaatactccatagcttccgcgatgcttccgttctcagcctcgttcgtacgttctggtacagcaccgaggtaaccggcagggtattgcaacgaattcggagagaccttaagacgtggtaaaggaagctttggaggcggtggagtcatagatgtttcatctcgggacagaaccgccactgcgatccgagaacgggaggagaagtgagtgaatccgaccactggttttgatggacggtgaatgtggctacggagagaggattgcgccgtcggaagctgaacggaattcatgggtttagagagagttaaacagagaggaagaagctggtggcggctcttaataaacacaacaaacaaaactacgtgacccgtttggttttttaaaccttttattaccgattctcaccaaacactaaccagcactttttttgtctgtatttaggtttcaccggacacataaattacaaacccaacacaaaaaactattattccgtggatagccctaatgtattgcagattaattaataaccgattatggacgcacttggtgttggtggatcattcatcatcatgtatattggaaaataaaaactgatcttttctaagttttagcaaaacaaatattttttatttatatggtctacgacaagaagtttggtggtgacttgagagaatcatgaaatctacaacttgtggatgagaattccagttttatcacttactctcttcttcgtctcacacacaattaagggcacactctgaaggaaggcaaacaagaactaggcagtttctttgttttagacaacaagaatctgtgaactaacacaaaaacattgaaagaatgatcttaacaatgaaacttgttcaccctctccatcactctttgtcttcctccattccctttccctcaagtacacacatctgttatctctctctgtcaattacttgtatgttttgaaccaatatcgagacatcgattaagcaaaaattgttttttttttggatttgttataatttgcaggaaaaaggcaatccaaaccgtaccggtgctcgttaccttctcccggctgcgaaaaggtcatcagaacagagactgtcctgcctccggcgccggtgagttgtgaagggagaagggtcttacttggatgtcttctcgctacaggttagatcattctctattagttcttcacatctccacttaagctcagtgtatcaaaatccttagaaaatgttgttatctgattcaaaacagcttctgggattttgtcaactggttcagccgaggcagtaagcaccagtagaagagctgtaagcaatatatatatctatgcatacattgtgttcttgactcaaaactcaatctcttacatacaattctctgcagctacgtgcatccaagttaccggaaagcgatttcacgactctccccaatggtctcaagtccgtaatccaatgcatcatcttttgtttgaattcgatacagtactcataccgcaaaacaggattgaaaaatcaagtctttctcgcaataatcacaagtttggtttctgtttatattgttgcaggtactatgatataaaggttggcaatggagcagaggctgtgaaaggatctcgggtcgcagtacggttgtgaatacgtttcctggtttactttggacatgtaaatgctaacagttttaacaagcgttgatgcttaacccaaatgttgtgtcgtaggttccctatgttgcaaaatggaaagggataacgttcatgacaagtcgacaaggacttggtgttggaggtggaacggtataaggcaatcttacagagtccattactgtacttgaatatgcaaggatcctttactgataataatgagtttttgcagccttatgggtttgacgttggtcaatcagagagaggcaatgttctgaaaggacttgatcttggtgttgaagggatgcgtgtaggcggtcaggttagtttttgaaaccgaaaggcttcacaaagtcaggccactcaaagtcttgttttgatgaccctatgaggtttatatacagagattggtgattgttcctcccgagctggcttacgggaagaaaggagtgcaagagattcctccaaacgctacgatagaggtaaccaagttgaatggattgaaatttttgttggcttctaaagtggtgttcatttatgttatctttcttttgcagcttgacattgagctgttatcaatcaagcagagtcctttcgggtatgtgaaatcaatcaactaatacactgggtaaatttgatcgaaaaaagtgccctgaaagctttcttttcggttttattctgcaggacgccagtgaagatagttgaaggctaaaaggactaatgaagccaacattgtaccaagattttctgtgtacattcagtaaaaaactataaaattgatcaaagctatggaagattcaactgtatgagaagaatctgtttaatggattataccggctagtccggttttgtaaccgctttataactgtgtctcatcactcaattcatacacttttggccgttttgcaaaacattgaatcaattcaatcccatgaggtggtaagatactttactaatggttaaaattaagatctagcctagcctccatgcctgtagttatcttggactgtgagatctagatagggtacaaaatgggtgatacaaatttcgtacctttttaatggaaaattcctaccaaacacgattggagggttgatctaatacatcagtgattgaaagttgtagagcccatgggatagaaggtgtctttgcctgaccgcctcttgcattagcagtcccatgcccaaactgattcctggcgtttgctgcttctgttgccgtgaccgacttctttatcttcaaaatccacaatgtatatacaaaatcaacaagaaaatcttcaatatataagtttctcttctactcagaaccataatctatactattaggatgtttaaaatcatgtgttaaaacttacagccgcaagtcgctctttgtgaatatctgttgtcaactgcaaaacattatccaaggaaacaaccaaagatgttaggaactattttgtaaataagacgaattgataaaatgcagatctctaattcttactggcttccgaaatgtcttgaactcatcactgctaaaaccaggaggcctaatattccagtttctttctacatttaaggagaagataccaaaaagaaattactcattgtaattggaatgagaaattgaaagaaaacgggcaggtagataatattgatcagaacgaaccaacatggagcaagatgtccttagcctctagaatatctgactttctatgcttggctaaagaacagccaaaagttgtgatctgggttaaaggaaacacaacgagcaggagttagaaaaaaaaaactcatcacaggacagaaatgtttgactcttaaccaatgtggtgtgggctacttactgactccacaaaatcttcagcaatatcagaaaggatgtcttcaacctctggatccaatttctctgacgggtcaatctgtggatagacaaggcattttaaatttagagaaaaaaatcaatggatatcatgcagagagttcagtgttgaacaccatcaaagtagccctaaaactatcgatatatgttattactgaatctgtcaatagtcatcatacatgctttttggctttctatgggaggtattattagcaaataactcaatatctcttctatcttatttttatcaaatacattcccctttatctgtaagagacntatccaagtagaaga

SEQ ID NO: 31085 - DNA, 4390 bp, Arabidopsis thaliana landsberg
gtaacatatattctttccatgctagacttggtcatttcgaaagaaaaaaagtgtagcagaaaaagtaaatattaactgatatctattaatgcataaaaacctataatattagctgtcttaaacttttttaataaaaaaattgttatactatatatagtgctctattttcaaaaattgaatatgtatgttttaagttgaacaacaataacttctgaagaagtaacgaagtcaaccttagctaagaaactgagatacataaatatatgattttagattggataactatttaggtttttaacctttggggggttcatcttcaaaataggtgttattcgctaagtatatattttagtatatactaaaataaattctgaagcaggtcatggcaagaccagtctagaatcaggatcatttgtgatatactttagtcatgtataactttaagagattcatcatttgagtgagccgttgcactctaaagatttcgagcaaaaaagaatgggaagttttatattttattgatcactgtttgggtgtgggaaacatcttacttttcgccaagcctccaaattaaacttctttaactcaaacattacaacatgagaacgtgttaaagcttttaaaaacatttttcaggtggtatatacataaaaatcaaaaacaaatacagagagcatggttttggtatacagtaccggtttttctcatagtagaggttcagcgagttccatctcgttcgcactttcttgtcccgactcaattcttcgacctcccacaaaatcaatcccgagaagttgccatggccaacacgcatatctagctctgtttgaagtattcatatctcgatgggtttctaattcttcaactttacggtttagttcttggattctttccctcaacttagtcgccctattgtctgcgagtctcagagatctctctgctgcatcccttgcacccattgctgctgctgccgtctcttccttaaactttagtttcttttctgattctattattgcttgctttgcctcttcaagttcttcttttagcacatacagctgaacaaacaaagccaataagagttaagactatcattccttagttcccaggaaatgtgtacataaaaacagaacagagcgcattgataggatccagtaccggagaacaaaaaaccatcatatagaactaccctcagtgcaattcccaatcccagaacctaatactcctaactcattctcctaaaagtctcttagcttgttagctttagctaactgactcaacactagttgctgagcttgtcaacatagctataagccattacaaaccacctagggtaattacaatgctcctggcctcctgcactagactaacccaaggacttataacgcacctgtgacgtgaagtcttgttcaacagctccaccagcagcagcctcctgctcggctgctactttccatcttgttatttcttcttcagcagcagcaatgtcagtcataagcccttcaacctaccatcccaaggaaccaaactttaaacaaacacttgcaacagagtgttacatactttgtcatataaagacaaatgatgcacgagaaaatcagctttcacacattggcaaagcaaaaattcactcacgttttcgtttgctatcctctccttttctttaagttcttctatttggcgcattctctggttaagctcctttgtctgagtgtccaattgttttctaagagaactagtctcttccctgttagatatacacaaaaacaaaatgtcagcataagttgcggcaacaaaagcaagaaaatgatcactatggacggcaaactacactggacagctagaagtatcacatataagaaaaatatgcattacacaagatgtcacataaatgcatttaagacagttactttcatggagattcatgatacatcaagtaccatgttgcaagcacatgtggaagttaagttcccaatagaacgctctttggaatcatattcctactatttggatttgattgaataataatgacattgccttatggttcccaggccaccccatcctatgaggtaaaactaagcatttactttcctagtgaaacaaagtgaatgtcgtctaccaaaggtataagatatagagacggagttctgcattagagagcttgccttgatgcttccaacaagtgctgcagttcgacgatctcgagctgagatgccttgacaatattctccaatgtgctggcctgcattccaatgtggagacattataaggtacccgaatgaatgaagttcataaaacataataagaactaaaggaacacataccagggagtatatttcattgtcttctttactatggtcatgagtattatcactacgagagtcctgaaccttcccatcctttaagagtttagcaaatttagaatcagtaccaccatccctcaaaccattctctgcagcttgaaacaattctcttttttgagatggctgctctcctatcacccttttggacaaagcgctcctcagtaaagtaccaatatgttctttttccttaactaatagacccacagtttcattcaaattcttcagttcatggctcttctcttccaccaaactctgtgctttcccagaaaccactttggtcagttcgaagatggattccatacctgctaaagaagctcgaatgttctcctccatctctgtctcttgaggcataaagaaagactcagacaaatctgactgttctgaactattcccgtcaactatccttacaacctcgtaaagctggtcatggatccttgacacaagattaagctgatccatcaacaaaggacgttgagctaccatcttcagttccatagtcttcaacttcccatcatactcatcaaccaactgtttcagctccacaacttcaccttccagcaaactgaccttctctaaattacctttctcaagttcagcaatcctcttctctttctcactcacacccctctctaaatcatcaacaatcgaagccttttccgcaacctctaatcttaaattactgatcgcagattccaactgagaaacctcaatagctatctcataattccgttggtccatctgctccctagcttcattcctcgactttgcagtcgtatcaatctgcctaacaagctcttccacgatttcattagtacgcttaataactccataagctacagaagccaaacctgtatatttctgagacttgggaagaccaccatttgaaaaattcttaaagctgctaactttaccagatatcttctcaatcccagaaaccaacatatgcgaggaattctcaatctctgcttttaaaccatctctagatctcaaagcctcatcaagtttcttcgacatctcatccttacctttattaacattctcaagctcatttgttagattctccttctccttcaatgcttcatcacgttctcgcttagactcgtcgcgcttcttgattgcctctacagcaagagcttttaaccgattgaacgaaacctgaagctccgatttcgaactctcagccgcttctcgagctttcttctctcgatcaagctccgctattagctccgttatcctctcatccgatgcttcttcccgcggcgaatcctttaaaacaacaggcgctggttcatcggactcgacatcgctgaggacagcatcctcatcggctccgttagccatctcaccgtgcgatcagtgaagataatttagtcttctctccgatctagattttcgtagtcgtaatagtggcgtgcaaggaattgacgcaattgcttcgccaaggaggaggcaaaattagaaaatttgagaatataactttctaccaacagccttctctgctcggaggatggagaattcagagaggggctatatcggagtaggtgaaacaagagacgatcttctacgacggaggaacttcaaattctacggcgaagaagacagaagaaagcaatctcgtcgggttagtttactatgtctctcttaattaatttatttcaattaaaatatttgggctttggtaggctaactgtttatttgttaggcccaactgtggcaaaagttaagcccgttttatttgttaggcccaactgtggcaactgtggcaattaaatcaaaagttttagaagttttatttatgtatgttaagcaattgtgtttaaagttggaaggtttttaaagtaatgttttggtgggtttggttttgaatttaggagcgagatcattcaacaggcaaagcttgcattacattggaacaagtccaaacccgtaccagcaagcgatatctatcattggaaagactttatatgctttcgatgaagataatttgattccatgttatggatttggagatggtaatgactgcagacaca

SEQ ID NO: 31086 - DNA, 3686 bp, Arabidopsis thaliana landsberg
  unsure (1)..(3686): unsure at all n locations
aataaacgaattgaatgcacgtaaaaaagatgatattagcctgaacgcctgatactacataagatttcataaaattaaaataaacgaaaaatataccttaagtatactttaagcctaattaattattactttaatatacatctgatcaatgtggtcaaagtcagtggtcacatagaagtcaaaatctacaaaacgtacaatgatcaaaccatagaggcgcgtcaacgactgcgctgaccaatgaacacgccacgtaatcttaaaaaaactgaaaaatctaagccacgtggcaatatcttctcataatgaatattctatctgtttttattcatgactaaaacgtgtgacacgcatatcatcaatgatacaatgaaatcacatcttttagttaattaaatcacttaacctcctgaatgttaactttcatactaatgaatataacttccgatcattttatgcagatgagttgggtaatgaacgaggttctccggctatatccaccggcaccgaacgcacaacgacaagcccgaaatgacattgaagtgaacggacgagtgattccaaacggaacaaacatttggattgatgtggtggcgatgcaccacgacgttgagttgtggggagatgacgttaacgagtttaagcctgagagattcgacggtaatttgcacggtggttgtaagaataaaatgggttacatgccgtttggattcggagggagaatgtgtatcggtcggaatttgaccaccatggagtacaagattgtcttgtcgttggttttgtcccggttcgaaatctcggtttcgcccggttatcgccattctccgacgtatatgctttctcttagaccgggttacggtttgcctctaattatacgaccactttagattacattaccgcacaaatataaagtttttattttcaagtttaattaggaggatcaattcttttcttctttttttttttttggtcggcagatcaaaatttaactatttaagtcctcgacttttagtatatttgtaaacgtctcttctttttccggataacggaatacatcatcttttatttcttgtaatttcactgattaatgcaatatacgattttgagactaagattcaagattgtgtgtgtgtgataaaatatgtgttaatatgtaagataaaagatggatgggttacacctaataaataaattaaggtgggtaaattttgaaagtagtagataaatgtaagggcctttaccgtaattatacgaaaggttcgtatcacgtttcttgtctcgtctatgaagcaacggaccaaagtaaagcgtaaatggaaaaatcagtttcatgcgaattttcgaatcgtttgctaaattatggcgtctacaatggcgacatggacaccaagctctctccagctcagaattgccctaaatcacggtatcttcaaagctccggagagagcgaagatgaccaagctcagtcgtcgtctccgtatatcatgcgtcgcgcagaacgcagagccgggtcgcgattcgggtgagagtaacgggtcggatcgttttcgtgggtgggctgattcgggagacgatgagaacaattctcgcggtggcgattggtttaaaggtacggactttggttaacttggtagatttgtattcgaatttggttataatattctgcaattttgtacctttttcatggtttgttgaaggaatttgatttttgttcaggaaccttgttatctggagttactggaatggttttgttcgttgggctaacttacgcagctttatcttccaaacgcaatgtcttaagtatgtgtttcaatcttcatttagtgatacaatgtagttgattttaataatgaagttatcaaattttggtgaatgtttaggnnnnnnnnnnnnnnnnnnnnnnnnnnnnnnnnnnnnnnnntcaattgatcaaatcagcacggatgagaatgaaggaaatattgtgactagtcaagataaccaggaaagctatagaggtataaacccgaaccgtataggttaagttctttggtgcttattttatctctcaatgtggttacctgtttaacaagcgttcccttttctggatgttagtttagattcacaagttttatctccggatgaaatagatgttgcgtcaaaatccacgtctactaggaaagacaatgaggaggcggagaaagcatcggtaagctcagcggagagatacacatcatctacagagctggatggagtagatacacatacctctcaaatcccaaacgaaaagcagaaagcccgccgttatacaggaatacctgctccttctacagttccacaagtagattctttaaaacctatctttccaacggttgtggatccagttcaaagtcaaatgtttgcagctttacaagctttaaaggttactgctttcagattattttgaccaatcttttgatgtgtgaagatactgattgcatatttataaaaccctatttaattttcaggttattgaatccgatgctctgccttacgatttatgtacacgccgtgaattcgctcgttgggtggtttctgcaagcaatactctatcgaggtaactatcaaaaaatctctttcctactcttgaaacattgtgaaatatttcactgccttacaacgtgaaagtatcttcattggttataggaactcagcatcaaaagtatatcctgccatgtatatagaaaatgttactgaacttgcatttgatgatattacacctgaagatcctgattttccattcattcaaggtgatcatcgaattttttgtacattcactctgaagtctgaatcagtgaagttatgtttaatctgctttcttcatttttcattggatagtataggtttggcagaggcaggacttatctcaagcaaactctctaacaacaatatgccttcttctgagagcagtcgggttacgttctccccagaaaggtagacgtgctatttatttcacccagccatatacattatacgctattaaaaagtagctattgttatgtgatatccactcttttcatctctttttctccctctgcagtcctctaacacgtcaagatctattgagctggaagatggctttggaatttcgacagcttccagaagctgatagcaaggttctttgtctattcctttctttttcgcttgccacatctagtcattgtagcgtcgtaaaccttacacaactcacttttcttatttcagaaattataccaactttctggttttcttgacattgataaaataaacccagaagcatggcctgcccttatagctgacctatctgctggagaacnnnnnnnnnnnnnnnnnnnnnnnnnnnnnngagattcttgcttcttaagtaatcatatcattagagtttcacaaccaaaattcgtttttaaaagtcttgtgtccatcatctagggcgtaccagattgtttcaaccgtccaaagcagttacataagcccaaacagctgtgtctcttgcaattggggatgcttttgaagtagatggtgaggagctagctcgtatagaagcagaggctatggtcgaacatggggttcgtgcacataacgaattggttgctcacgttgagaaggatattaaagctagcttctagaaagagcttttaatgagaaaaagaaatagtagatgcagtggacaaattggctgagaagcaaag

SEQ ID NO: 31087 - DNA, 2915 bp, Arabidopsis thaliana landsberg
acctatgaagctcgtcaagcaatcagaacaaggcagagtgttttatatggcttgatcgttcataaacaagtcaactttccagtagcttgatggaattacgttcttgacttgtttttggttaactttttgtgtgtgagtgtcttaaattggaaatgttgtgtataagaatgcatataacatgttgctgcaattggcctgttgttgtatttgtatgtttatatgctccgaacatttcttattgctaataaaataatggttttgttcctcatctaacaacggagtaaacgtgaatcaaagatatgatcggagcaaatagcacaaaaagattaccataaaatcaggctacgtctgtctccacttcaacgactcatcctgagacaattttcataggagtaaaagacacaggtgaaactcagaccgagctttaagatgaaattttgcatgatcaaacgtgggagagagtgtatgactatgagttaatcatgatatactctcttctcttcttcttctcttctacttggtttgttctagagagagtatatatatcgcacatgcctacatgagtcaaacctatgaagatagtccagcaatcataacaatgtgttgttattggtctgtttttgtatttgtatgttaatatatctataaatgaagagattgaatcggtgaatgtaaatacgaggtaacatcaacattttcccattgctaatagaattatagttaaaacttttgttcctcctctaattacggagtaaacatgaactcaagattactcgtcttaaatttgtagataactacgacaaaacacaaaaataagaccttagaggacttatatgttcggagcaaatggcacaaagaggttcccatgacttcatgctgcatctgcctccatcttcgaagactcatcctgagacaattttccagaggaacaaagacatgtgaagctcagaccgagtttaaagatgagatcttgcatgatcaatgtggaagagtgtgggcaaatggttatccagaaacagaaaagcatcatcttagcaaaaaaaactatagaaagcaaagcaggaaggagcatcaaaccacacaccttaatacagacgtagatgtaatggacatcagggtttttgcctatcgcagattccactgaacttccatcagcatctagaggaagaggttttgtcagttcccattttggggtgtctaacggttgatcggttaaacttttgtctgcattaaaaagacagctagtctaagtttagtagagaacagtgaacttttatccacaactaagtacaagatacaaatttaacgatggtttctgagtgaaagctgacctataacatggagtttggttgtccaagagcatgattctttaaacaggcgaagacggtaaatcggagcaccatatgtaatctacagagaaccatctaaatatcactttgcattcaacaaacatagacacataagaataaaaagtgatacgaaaatattaccaggatatagactcctttatccttgaggaccctataggtttcatcaactgctttcattataggtgaaagaatcaagaaagaaatagaaaaagaagaagctagaacagataaacagaaaccattcaacatttcatgccaagtacctccaaacctcttcaagcatttgtgttgagtattgcctcgaattactcccacactaatacatgtaaaaagtataagacttagtgagaaatcgagcatctagagataacataagtaaagagaaagtagacctcactcaccaaaatggagtctaaggttcctgaaaacacacacacaaaaatccaaaatgttatacaaatgaaacataatgcattttaggctagtaatgatattcaaacaagtagtaagaacacctttatcgataacagcatcaaaagaagcatcttcaaatgctttcatatcacgcacatccatcttcaaatctgttttatttttcacgttatccaaaaatacacaagttcatgctaaatctagtaatatacccgattaaggcagacacagatatgtctcttcccaaattgcaacattaagtagaagaatcaacaaatgtaaaaaaaaaaccaaaaaaaaaacgttacatttgagctgaggacgatcagagtatttcttaatcatggtatcaatcaccactgatgatatatcaatactgactacatcttcgtatccatcatccaccattccttcgctaaacgctacattaaaagttcgaaacaactaatgaccaaaacggatccataatacacacaaaactgtgaaatcaaaagagttgttttcttctatatacctgagtttccacagccaatgacgaggactcgttgattacgttgaggaacatagagattgatgagaggagctaaaggtgaatacttctggtaccaatcaaacggttcagattcattcttgtaacgatcgtcccaataccattgctcgctgtaagattgcgttggtgcctctgtagccatctccgtcgttaacttttccgatttcgcttcactctctgatcaaaaggaagaaggagacagaagaaagatacacgagcgaccacggtggtccaaatcttccacgtggcatatttatttaataaccgaccggttcaccggtttgattaaacatttaagattaaacccgttaaaaatcgaaataaccggaatacaaaccacttttcagcagtcacccctaaaagcaaacacaccaaaatcaatcagagggttacattgtttgataccatgctactcttctgcagtagcattgccactgcctttcttagttccttcgtactgcataactgtggcaaaatctcacgcaccgttatcgaactagaatacacacctaaagagaacatctcctggaaaatgtctaaggcggtattacactccccggctt

SEQ ID NO: 31088 - DNA, 1246 bp, Arabidopsis thaliana landsberg
gatatcgtattgagttttaagtgaatacctcaatagtgcattcttgatttcatctgcattgttgaatgtcttatgcaatgctaatagatcatcacaactctctctaaaagtgaatggtctttcaactttctcttcttcatcatctgataatgataatggatctggtatcttcttgtcgtcccaaatatcatccccgttgctgtcagagtcaatactagttgcatctacactagcatcaagcccaaaatctttctttttcagctggatctatctctacctctatatatcctctgttatcttcaacaataactgggcaatcatcttcgtttacacaagaatcgtgagatgattcatctccttcgtcttcaatttcagtttccaatctctcatcttcaacaatggctttcgtttggatttcagattgccttcgaattggaagcttgagtcattttctgttcatggaggctatgtgaaattaatttctctttgttttgattttgttagaaaatcacctaggggtttgtgttcaatttgggacatagaccgagatccagcgatgtattatgttagtttgatactccctccgtttcacaatataagttgttttagctaaaaacatgcaaattaagaatatttacttttaaaaagttcagtcaataaagaaactggataatagaaataatcgtaaaatattaaaataatatataatttacatagaaatttgaaaacaacttataatgaaacggagggagtatgtatcacccttagcatttaatatcctgtaaaataaagtttttgtaaacttacttcggaattcggataaatcagtagatcaaaattcggtaatcttaaaaacagaaaaatgtttgaagaagaaaattgaaccttgtgactttaagtttacattggaatataattgtgaagagctttaccatttgtccatgtaagtaaacaaaatttattgttgtaataacacattgtcactcaaatgtttagcaattgttgagtcgagacaacatctaaattctaatataaaacaataggatcaaagtatcactaaagtgagttttgatatagtggtgttctctaaattcttgcaaaagttacattctctagtttgattttcatttaggagactattgagataggaaaatgtatggacctccaaaactattcaatgaaccacataatatgtaattaaagtaaaagacataactaagtttaaaaccttgagcaaagttcccac

SEQ ID NO: 31089 - DNA, 4904 bp, Arabidopsis thaliana landsberg
attaggcgtgcatttaagttggcaagttgtaatgattcgaagagaaattgttcatgttttaataatggggggttccattatgtaattaaaaaatggaaaacaaggggcaggtgattaaggaagtaatcatttggtttatctttcatgagcaaacaaaatctgaatcactcatttgacggtgatactttttggacttgattgacatgtgtatgttttcggtagtttgatactacatagctggatttcttttgtaatggaatatgaggatggaagtgtcgggcgcattagccgtttttcaacgagagagggttgttgctgtcacaccgagtcgctgactcgctatttttgtacagacggtgagagcctggactggaccagtaatgggccctactgagtcacggcctttctttttactttttttaccgcaaaacgcgagtaaggtgacgtggaaaggccggccctatccaggcaagttgatgaggcattaaattacataaaactcatatgattacagaaaaaaaagaaaggaggaaaaagtcaaaaaggcacagagaaggcatccccttgtgactctgttacgtccgttaatttcggctccccaaccaaaaaaaaaaaaaaagaaacaaaaactacatatacaacggtaccatgtcacccaccatgtgactagacttataatgtaaggttgtgtggggttgttagaacacgcgccgtcaacaacaacacaaaagagaccaaaattgttccagctaatccacactgggcccaaaacagggcctgtctgctggctcccataggaactcctctttcccatttcagaatgtttcttctcacttttaatttaaggcgccatctcttccagctgttgcttccagtacttgggatctaactccgcctgttcccacatcatttacatttccatatgtcagactccttcgctctaagattttcatttgtaatcataaaaagctacaccaaccttttgcagctatttagtgtagtaagtagtaatctacatatacttgtatatatattcacctgaagggtattgtctttccagaggaacgcacaaccacgagcttccaagtggtggattagagaaagaggaagcagtgatcttagggacgcatgtagtttcgctttccttaatcctccacaccccagcaatgctgctgctactccgctcggtcttaaaccactcgagttcacaaccgctatgttctgtaaacaccctatgttggctagggagagaagtcccacttcagtcacagctgtgtctgacacgtttatctgcaacatggggatcgcaatcagataacagattcaaccagtatattgtagttttttcagctgtcagtgaaggattcaacggtttattacctgtttgagattctgagagaagtgagccagagcgagcaaccccgcatcattgatggatgggcacttcttcaagtcaaccttggcgagtcgcttgcaccgaacagcaatggctgcaagtccttgggacgtgatgttaggacatcccctgctctcgaatgtttgtaacaacgagcatttggacaatgaaaccagggacttgtctgttatgtcttggcagtatgaaatgtttattgtttccagatgaatgcagccttgggcaattgtggagatgcctacgtctgttattcccactgacctggagtagataaagactagattgagaacggagaattttattattgacccgactgaaaaataaatttctacgcgagatacctatagagatcaagttcacggagatttgaacagcccatcccgatgtacgagagccctttgtctgttatgttaagacaaattcccagctttaacgaggaaagactcagacaactagatatggatttcagtcctgcatcatacgaggaaagactaacaagataaggtataatccaaaaaccacggttctaagaattgatctgaagaaaataaagaaccttcatcatcaatctcgttgtcagttaagtcaagctcttcaagtagccgacacttttgtccgatcaaccaaaaggcttctctggaaacaagagaacaagactccatcttcaaagagactagtaaaggacacgaattggcgatttgggtgattgaaactctacttagtttccggcaacatgtgatgtcaagttttctgaggtctttcagtttcattactagagaagaaagaccttcatcagttacgctcacgcatttgcttaggctaacctctttcagggaattgcacaatgtgcctatcgccttcaaaccatcaggcgtaacagaacaaccatccaacctgatcgactgtaatgctgaaaccttctttaagctactcgcaaaatccaatgatatcacctaaatcagtaaataaacctcatataagaaggcatcatagaacttggtgggtctgtgtactgctatcgatccatgacacaaatggtctattcggtggtatgtgcaattactggttttgctactactaaagagttttagtgccaaactaagttgactcagccatttagcaaatacttacatacaggccataaccagagaacaaagcaaggaaagcatgtgttctgatgataatgagaaaacggagaacttacagaagaacagtgtgatagatcaagtcgctgaagatatcctgccccgcttaaaagtgaggttaaacctctatgagttaaattctggcagctggatgcatcaagcttctgcagaacacaggttttggtaagtaaaatctcaaatgtctatggataagatgatgatgaaaacaatcaactatatagtcttccagcattagactttcaatgataaatagctttctgagtctaagaaaacatgaaacctgtttatacatcttctctcataaaagttaaatgtttccagaataaatgcagcgagcaagaagaagcgtaacatcttctccaagccatattctgagaataccaagttttctgttctaaaatatcaactaaaaagtttgtctgtcaagtcgattccaaaactattatgtgatctcatgtataagaatcaaacaaatttcttggaatagaggttaccttcaatgacttgcaatcatgtctgagtgatttaagactgtcatcatctactccaaagcacccttctagaagaagttcttcaaggtgttgaagtttcagaatgtcatgtaaacactttcctgtgatctgtagaatacggaacaaaagaataggtttgaatttccagctcctctgaagatataatccaaacatatggcacttaaagtgtcgaattcagatagataatgatccacagatgttgaaagaccaaaagttcaaccaaaacttgttgttaacttgaaaaatcaaccaacaggtctcaggaagagcaaatttagaaataattccaattcgacaaacttaccatattaatcgaaatttggctctgcggattaagaaaatgtgaagagagaagttaattaccggcaagtaggagaggtctaaggtgcgaatgtccttgcatttgacggcaagcaagccaacccctaaatctccgacgccaacacaccatttcaagctaaccgtattgagcttcttacatccaactgctatacatccgattcccatgtccgtcagcatcttgcatctgcccagcttcagcctctccagactcctcgcctccgccaccaccgcagcatcggcgtctctcatctccgtcgcattggacaggtcaatctcgactaaattgacacatttgagggccaatcgcagtagtcccgcggcggagaaggagccagagcgcgagaggtcgagggagcgaagcgtaggtccggagagacagccaacgacgctaagcgcgtagtcagtgacgcgcgggcagaaggtaagatcgagatcggtggtgttccggtaacgagtcaagatgcgagggagatagtcggagcggagaggttttaaggatctgcggtgcttggactcgagctggtagaaagatttgcaagtaagagagaaggatttgagatcggaagggttgggagagatgaggtcaaggatgatgaagacgagctcttccgagagaagatcgaaaggctttaagacacgaatctgtttaaccttcttcatctgctgctgctgctggtgggttggagaaattttgaaatcaggaaggatccgagagaagtagagtctctctttgaggattttggaaaaaacccacagttattaacaacaaacagtttgttttctgtgggagagagagagtcttgaaggagaaggatattgtcaaattacttaattgcccttgctcttccatctcttattgaagaaaaataggggtagaagtgtaactttggtaaaaggtaaataaaataaagaaagagaaccgtacggggaaggacgggaggggcaaaaaggtaaaagaaagagagaagtcgcaatcaacaagttaggccattggtagtagaagtatatggtggagtaagcatgcgaggaaggacagattcgagtgcggacagtacgatagattgaaagaacctctcttatctttcttacctccctctcattaaatatccttttttatcttttcctccattctactttaattattatattcttaacctttaataatcggctaaattatttgacttattttccaacaccatctaatctttacaaatactcttttgacgtcttcacaaaacatatacttgatatcatgtaaaaaaaaaaaaaaaaaattagacaagccgaccaagaaaatattcgggagatatatgttctttttcatcaaatgtgtaatcttattcttgtctcccaacttttttaaaaaaaaaaactagtgattctccattgccaatgatatattccatatctaaaacttttctttttcacgttttattagttttctgtgtg

SEQ ID NO: 31090 - DNA, 2775 bp, Arabidopsis thaliana landsberg
cgcccattaaggagtagacgttttgttctagatcagagagtctggtttggttttgtttaggctgagaaaaacttaccaaaactcaaaccaagcaactctgtttcggctgggtgtaatgagtgttactttagttcggttcgggctctcataaaaacttcagctcttacttggtggcttactgatgatgcaggacaagtggtcttggcaaacatacactcacctcatctgttcataacgtttactgcaaatggagattagaaattacattgcttgctttatttggtaatgacaatgttggtcagtacgtagtattatagtggcctagtggataatgggctatttaatagcttgtaatctggaacaaacgttacagttctatatgatctcttctccacagattcttaaaatcatggttaatatattctttacagtaaataaatccattataaactcgtaagaagccaacttacaaacactcaatacaaaagtgataatgttttcctatgtaaacgccataagaaataaaaaagaaagcagaagaggctgcagtaaaagccactgagcgagatagacaacacagttcgtttttctcttcaggacattttgtggacagaacactccgcaacgcaaaaattgtggtgttcgcgtttcaaaagaattaaaaaatgagggatctccttgtgtcacaacagaatctccttgaggattaagagtaccagcatgatgaagcagagaatgacaagagcagacgcacacatcaccatacctccttgtctctgtgtacgttccgcctgtggagattcacaagcaattccgcttaaaaatttaggcatgaaatggtgtgagagagtatacacactgattgtaaagagaaatttaccttttgcagctgtttgagaccatcgtcgactgtactagcaacgttctggatattatagtcaatccgatcaactattgtaccctgtcacgacaagttttgctttcaagttatagaatttctagaatcagtggctcagaagctagacaacagttacagtgttgtacctggtctatcacaagcgctgacagatccttcatgatctgagcaagctcgcttacggattcaacaacctgcagatgaagcagaacaagaagaaagtgacaagattatgattgtgtatgaaataggtaacaattaagagcggtaagatctgcaaacattaacctgttgaatctctttctccctctctattgatatttcctcactcttttttatcttgctcatttgatgctcactaaatacctgtagtgtcatatattgcattattacagaaatacataagatgaatcatgggtataagattgggacaaaggagtcataccatatcatcaaagtcatcatcttctgctttatatctgcttccgttcagattcatctctaaatccgctccatcctgatgatcatcacagctagaagtcaaaacttcttgggaataaacaaaatgtaattgtcctcaaaatcatagaaataactaacaatagaatgtatgaaactcatgaaaccaaaattttattagagtacagctgcataacagatccaaaaactcgagagcaactcagtattacaaatagtgaagtcttggacataggaaatgtatagtgcgtcattgcatacctctttttgtagtctcaaacgtttcaaatatgtagactgtttcttgcgtaactccatagaaaggttttggagatccgtagcaagagatcgctgttataaaacacatgagattttaaagttgagatgttgatgggaaatgaaaggacatgcgtttaagagacacatcaagtcaagtacaccaacctggacgtttttcctgacatttgaatcttcagaaggtccagctgcagaaagcctctgaagttgcttctcagatttcttcaataggaaggtaacctcttgtgtcaaagtctcgatttgatgttgatcttctttaccatccccaaacgaaggcatcaacgctttcgcatgagcctttcccaattcagccattttggttcttgcacgttgaatgtaaactgaaatctcctcagatacatcaacccaatctggtggtaagtcccactgttattgtacctctactaggacattggaaaacaagaagcaaaactttcaacttcaacaaattgggccacagaaatatattcaagtactattctcttaatactcaatcagtagctgaaacaacaaggctgaacatctagctaccaattccaaatccataagagacattattgctcaggataataccaaattttctgctaaatcaacaacttacttcaaaaattcataatccaactcacactagcagctacatgaagtgattaatttctaatgcaatcaccaaatttctaacatttcaatggcagtgagagatagagaggatgagaagtacctcgaattcccaggatcctcggtactgactggagcataagaccgatttggattcaatagagacgtgctcgccatctcgatcaccgggcctaatccggatttagctccggtcaacgaattgtgctccgtcaatgtcgacgacgaagacgaccccattggagcacgaacgctcctgagagagtttctgtacttcctaaacaacagcgtacgattcctagtcgccataacagctcaaatataaaccctataagaatctcagtgatagctaaccaagatctcggcgtctagatggattttagcttcccttccgatcgaaagctatagatctaaacaggatcgcggtttca

SEQ ID NO: 31091 - DNA, 3258 bp, Arabidopsis thaliana landsberg
tgttaaagtgtgtatgtataggtatgtgtgtgtctatacgagaatcagagggttcggtgaagagtgaagactctaaagaaggaggaggagaagaaagaagataagtagatgcaaggttttgtctcttttctagttaataagagtaaacagtcttctagagtacagttttattaattgtttattaacttagaaagcttgtagttgtaattatgtgttaaagctaatctttttataaagtagccgtaaattactactgtttttacattgtgattttattttgttataatacttaatgtaataatataagataaagaagtactttcgaaagactccaaatctcggtgcaaccgttcacgtgacggatctgatgagtgatgaattttttaaaaatgaaaaatccaatgtaacgtgtatacatatggctatacataatcaaatactttgttgtcaatgattgacttatttggtgacaactatggtttcgtgcaacgtgataactatcactttttggccgtgttaatttttaaaaaaattagaatgaaatttatcaggttacggcctgtcaaagttagcaataacctaatatctgtttgcatgccacaatacggttatgtagaaagaaaattaaattatcatatttcacaattctttatcaactgtataaagcaattaataataaattaattaggtaccacatgtgtcatatttgttctaatgtttagaaaataaaagtacaagtcttttatgtccacatctccaacaatacttctgaccaaattccatatattattagtaagcttccaaaataaataataatcacatttaagaagaatctgttatttaatcacactaactgagataccgcaccaccgacactgtagtcaccgacaatgctgtggatgctacctgggcctcaattataagcccattataaaattgggcctacactaaaactattgtgtacagagagatatttgataatttgctgactgatacaagtctcacttccaacggccgatttattaaaaaaaaactccgacaaatgattcgccggccgatctacgacttcgccgccgtttttcgccacttaacttctccgttatcgacatcctcgcgttttctgttctattcttcatctgaacatgaagctcgaaaaccgattgtctcgaaccctaaatccccaatcgggtctccgactcgggttcaaaagctcatagcttcgcaatcggatcctctcctcgccaaggagattttcgattatgcttctcaacagcccaatttccgccattctcgatcttctcatctaatcctcattctcaaactcggccgtggtagatatttcaatcttatcgacgacgttctggccaaacacagatcaagtggttatccattaaccggagaaattttcacttatctgatcaaagtctacgcagaagcaaagttaccggagaaagtcttaagtacgttttacaaaatgctggagttcaatttcacgccgcagccaaaacatctgaatcgaattctagaagttctcgtaagccatagaggttatctccagaaagcttttgagcttttcaagagttcacggcttcatggagtaatgcctaacacgagaagttacaatttattgatgcaagctttttgtttgaatgatgatttgagtattgcataccaactgtttggtaaaatgcttgagagagatgttgtccctgatgtggattcttataagattctgatacaagggttttgtaggaaaggtcaagtgaatggtgctatggaattacttgatgatatgttgaataaaggattcgtgcctgataggttaagttacacgacattgttgaacagtttgtgtaggaagacacagcttagagaggcttataagcttctatgtaggatgaagttaaaaggttgtaatcctgatcttgttcattacaacacgatgattctcgggttttgtagagaagatcgtgcgatggatgctaggaaagttcttgatgatatgttgtgtaacggttgctcgcctaattcggtctcgtataggactttgattggagggttgtgtgatcaaggaatgtttgatgaagggaagaagtatctggaagagatgatatccaaagggttttctcctcatttctcggtgtctaattgtttggtaaaagggttttgtagctttgggaaagtcgaagaagcttgtgatgttgtagaggttgtgatgaagaacggagaaacattgcattcagacacttgggagatggtaattccattaatctgtaatgaagatgagtcggagaagatcaaactgtttcttgaagatgctgtaaaggaagaaataaccggtgataccagaatcgttgatgtcggtatcggtttaggatcttacctttctagtaagctacagatgaaacgtaaaaatgctagagagaggaggagacatttataggttcctcctgatcctgaaaagctgtagaaagaagaaggaaaccttgagtttgtttactgagaaagtggtgggccttatttgggctttattattagtttaagcccatttggcttcaaaattagattctgatcaattagaagcgagagtggcaacgaatcagatctgaatttgccgattactcagaaaataaaaaaatgccggagattgaacaagacgatgcagcggcggagacggtggattcctccaccgttaaattcggtacaccggaagcactggagtatgtacggtcgctcacggacgttggcgcgatgacacgtcttcttcacgaatgtatcgcttaccagcgaagcttagactcagatctcgacacgcttctatcgcagcggacggagcttgatcggaatctcgttcagcttcagagatcggcggagattctcgatatcgtgaaagcagatgcagatcacatgctcggaaatgttcgatcgacttgtgatctcgcggatcaagtcagtggcaaggtacgagagctcgatcttgctcaatctcgtgttaatgttactctctcccgcattgacgcgattgttgagcgagggaattgcatcgaaggcgtgaagactgctttggaatccgaggattacgaatctgctgcgaaatttgtacagagatttctccagattgatttgcagtacaaggattctggttccgatcagagcgaacagcttcacgcgtcgaaggagcagcttgaaggtattgcgaagaagaagctcttggcagcaatagaccagagagatcatcctacaattttgagattcgtg

SEQ ID NO: 31092 - DNA, 1066 bp, Arabidopsis thaliana landsberg
catcttaatacagcaatagtaagccagcctttaggccccacctcatccattccaagaatgtatctaggccaatacttaggtagctttttaatccctgttagctcgttaaatggttgagtacactttctttttggttatgtccttgagtttcacttcatcattatctccatcccagtttcatctaggttaaagaaatttgtctctattaaacggtatagacaagctcttctataccatattcaatttcatcattcatctccatctccatgtgtttatctgcatttacccaaaaatcacaactttcaacagataataaaaatgggcaacaccagcaattaaatccaaatcaagctcactaagaaaaaataaactagggaaataaaggagttgcacaaaccgtatagataagttcttctctttcttcgttttgttcattcatcttctacggatttcgttcagctgaaaagtgaaatggatcaatcaatttcaacaaataactgattcattagcctagacacaaaacacatagtaaaatcacacatatcctaattctgtaatcaattcaaaatcaagggttttaggaaagggtcgcttagaaattaaccttaaaatcacaaaatcaaggatttttctccaaacccttaatcattaatcgaccatctttcagaatatcagagtttttcgaagaagaaagcaaagaagaagagattgaaaaaatgagtgtttgggagaaagaaaaggaagaaaaaatactctcgtgttttgttgtttacaagaagacgatgtcgtttagagtaaaagaagaagaaataatttttttcctataataggggtagccctgttttagccgatagtattaaacaaaaccctatatatacaagaaaacaagccatttgcgactccaataaacgtacccagatggtcgtaaacaccttaataaacactactttgggactactttaattggtccctaaaaaatggtcgcaaaatctttttggttcctaatataatcgccaaatttgtgaccaatttcctgacacttaaaataacagtagtttaaataccg

SEQ ID NO: 31093 - DNA, 3495 bp, Arabidopsis thaliana landsberg
aggaatgaacctctttactggctacctcgtcacaggttactctgcatggatggccaaatgcaaagaactgagtaggatccaatgcttgatcacggatgtagacctgggaagacgcacaagttaatattatacaaaactaaacaataaaattaatacgtttttgtctgcctctatctaaaaagctttgtttttgaaaacatgtcattgagactgtattaattgtatggaggcaaagggtctgacggcgcttctgcacatgataagtatttgcgttgtgtgcagcaatcacagctaaaaccagatttaaattgtaccagcaatcaaagcatttataggaaacatgagaacctgcagatttttttttattgcaagcctgcacaagttggaattgttaacaacgttagagcgtctccaagtcaactctccttcatcaagactatcatggtgtagaaaaaggtgtcggctaacagcaaacttgaggaatgcatcaccaagcacctcaagcctttcaagagaaaggcgctcatgacatttctctgttgtgagcgcctcgagtacctataccaattcactcggtcagtaaagtatcaaacatcaacaaattttaggaaaatcaagtaaatgggttatcaagtgaaatgagatcatactctgtgaccagaaacttcagctatctcagggatcgaagcacacagcacatgtttcagttcaatagccacgagtaaattttccatacgatgcatgattgatggtaacaaggataatgagcttccgatgtctttagataatccttttatctttaagtgagaaagttcgggaggaatctctatgaagtattcgtcaagttcttgtggttctgttcttggcaatgtgagaatgttattaacatttgaaccaaaacatgagaattaacaattacagtatacggtcaaaaggtgtgctgtgtgtacatgtacatgcacaagaaaattgtgatatgcaaaaatcagataagaaaatctacccaaattcgtctgcattcggttgtgaagcaagttccgaacatgacaaagtggtttcacacgcaagagtggctgtgcaggatgcttgagttccacgccatacctagtttgtgcataaaaataagaaggttcttaactcagaaaatcatataatcctcaaatctagagtctcaaccaattttataatggattgtagaaaaagaaaaagaacattaacaagaaagaaaagacagaatacatgcccctgagaaaagtcgcaatcaaacaattactgaataatagaagtttagtagcttacaacttatatatgctctccacatggcttttggtgctagattccttaacaggactgaaaccatttcttccatggcagatatcagcaacaaagtaaaattgtttactgtaggttgtaaaaaccaagctgttcttcacatcatcaatattccagcagccatttgctagctttaaatgagagcccgaaggaggaaatatatcttccactaaaacagatggagtcttaaagattggtgatgacaagcagtttctgatagtcacccaatctacagatataacactttctccatcatgcagacagagtggaagaagaaggtagaaggtggatttgcttgttctagaagagtcttgcagttccaagggaacaaagtccgggatcagctccccccgttcaaaaagaaccttcagggcaatctcctggaaaagctcagctagtcttatctgcataaacattatcaaataagaggagttcattctagtttattatttatctaattaaaatctcagtacctcatcgttgtcgaattctgtgacccctgatggaaaaatctttacacttacagatctttgatgagcaaggtgaagatcgatatccatagtctcagcctcaacgggaagaggtgacttcatgaagaaaccaaactttttgtagatcctatcagcgggatgaggcacaaacattatatagtaagaatgaagattgacacaacttgtagatggatcccacttttgtttaaacaagactggtacacgcatctcatacaggtcacctcgtgaacagccttcacctagaaggaagtaaaatagatggcgttatacaacaaacgaatagcataaaaaagcttagattttataactgaaccacgcatgcacctttgatgttatcaaaatcaaattcatcatctgacaattcgtcctcaatttcatccttggaatctggcaacagaaaatcgttaagtacacccaagttgtgcaactcatgcacagcctttagacaagcatcctttttagcagcttctgtcgaaggtagtagtgaactttcgatttcacttataggagcattagcaggtaaagttatgcgacagatagttccaccaaattcgtcaacaggcttgaattgaaactctggcttgggctgaaaaaatctgagggaatcaaaatgtggcaaagggagattcagttatgacacgaacaagctcccatttactatggaaggtgactctttttaaaaagaacacaacagaaaatttaaagccttactcatcatgtggaagcctagaacaatatttatagagaagggagatgctgcttccaccactgatacaagctcctgtctcatgaactttgtataactcctcatcaagtctaggacaagtttcctctgagcttctgtaagtaatttctagattcattcgatcttcatttactttaaaattttcaataagatccatctctttctcgtttccgctgaatcataaaagaaaacattgttaatcgcgtaaggactcatacttatgggcttatcattttctcattcgtgcaaacctgtccactagaaacgcatattcagactgaggcattcgagcacgacctctggactgtatgaagctggtaacagtctctggtaaatcataacggatcacaagacagcatgtctgaatatcaaggccttcttcaccaactttagtggcaaccagtaaattgagctggaacagtaaaaggaacctctagaagttaaatggaagtggcttgactattgatcctagacaatacatgtttatcgaaatgggtgtttaaatatcatgggtgtaggaatattaagtgcagatatctccgaatactaactataggaataaagatggctaaattatcacctctttagattggaaccgtttaagtattgtttccatactccttcttgacatgctcttcagtccagaactaagtccaacaaggaaatcagacttccaagaccgtagcagttccaagttatttagtatgcatgacaatgttcttgcagtcacaatccgattgacaaatattatacatttcatgtgtggctctagcctgaaagaaaaagaaaaatggaagtttcctgcaagaaataccattggtttctgttccataaagcatgacaagtgaatcaagcacaatgtggtgaaaagcaattaagatttcacaagacccagaagacaataac

SEQ ID NO: 31094 - DNA, 1481 bp, Arabidopsis thaliana landsberg
cgggaggacatacaacagcgggtggtcttaaagtgtgacataaatgtgttgactcactggtcctcgatatatgcgctgatatttcttcctgatatgaacagagcttggccacacttaagctgctgatggatgcccatcaaacacagaccctcctaagtatgaaaaggctcctcaagagaactcatgataatctcatatatactctggtgaatcttggcctctggggagcaatacaggtagaaatttcatactgaaccaatttatagatttgatatcaggttttcagtttttgctttcagatgtattgattaccttgtatttcctggtttcttcaatgttttaccaagcagctgatgcatgttttagggtacagttattaccataattgccaactatattaaacttttgcattagtagtgtactagatcgaagtcaaagactacaatgactggcaagattcacaatagctgtacaatagggaaaaagtggaaaacaaataagggtttctgttagatgcttgctgaattgtataaaaattcctagagattttttttggtaaatttatgtgcatgtttctataatttgttacaaccatctaacctcgatatgtaaacttacctctttgccaaattaaaattatgtatgttgtttcttgttggtgtcatatgtgtcttaatgcatgttgtagcgtgctaatgtttattgtcttcgttttttggaggctgctaaaatccaattgaatagtgaccataatgtacaagacgagcctgtgggaaagaatcctaagtcaaagatatgtgatacatatctttctatggctgctgaggccctctcttctggtgttgctaaaggtaagatgacatagtaccatagtgagtgttttttttcttctgaaccttaaattttcttccaatacggccatggcagaaactggaaacgtttttcattacatatatttttctggagttccaacttttaaaatatttaacaaattctgcactggatttgtttttttcatgtgaatgccctattaaactagccattgattgcctaattattttttctcatcttttctgtggttgtagatgagaatgcatctgacctcctcagcttagcggcgttgaaggaaccattattctctagaaagctagttcaattgattaagatcctttcggtattcaggttggtacttgatagaggtgacagagtcttagaatgcttttataccgaatagtccataaagcatgtgtgaagtaaataaatgattgaactgtccttagctttattgagtggctacgtaaccaaaacccgatgcgttttctcaaagttaccatttgcccgaaaaatgacaaacttactttatgtatgaaagtctagtcctacttacctttttttcctctctactttttttattttttttattcgtaagataggactgagaacctagaaatgaagctttattagatacacaagaaaatttg

SEQ ID NO: 31095 - DNA, 2462 bp, Arabidopsis thaliana landsberg
  unsure (1)..(2462): unsure at all n locations
ctacgacactgttttcggttacggatcagcgttgatcaagtcattactcttcaaaacctcttatggaagaacctctccaatccttggtcacacgacattactagggaatccagctgggaaagaattcatgctcgagtccaaatatggaggaaagcttcttggtttccatggacgttctggtgaagctcttgatgccattggacctcacttctttgctgtgaactcttctcttaagcactttaaaccgcaagggtggtgaatggagggaatgcttgggacgatggtgcttttgatggtgttagaaaagtgcttgttggacgaaatggtaagtttgtgagttatatcaggtttgagtatgcgaaaggagaaagaacggtaccacatgctcatgggaagagacaagaagctccacaagaggtatcttcatagaaatatttgtgttgtttcttgtttactaagatatttttattattgttctcttttgactggataaagttttaaatttggttgcagtttgtagtggattatcctaatgaacatattacatcggtcgagggaacaatcgatggttacctttcgtcgctgaagtttaagacatcaaaaggaagaacctcccctgtttttgggaatgtggtcggtagtaaatttgtgttcgaagaaacaagttttaaacttgttgggttttgtggtcgatccggtgatgctattgatgctcttggtgcacattttgcccctcttcctgctcccactccagctcccgcgcccgctcccgctccagttcccgtgcccgctcccgctccagttcccgctccctcgcccgctccagctccctcgcccgctcccgctcctgcgcctgctccagctcccgcacccacgccagctccagctccagctcctcctaacaaagtggaagctctaggaggaaatggtggaacaatatttgacgatggtgctttcgatcatgtaagaaaggtttatattggtcaaggtgattctggtgtagcttatgtaaagtttgaatacgaaaaagatgggaaaagagagacaggggagcatggaaaaatgacagtgttaggaacagaggagtttgaggttgagtctgatgattacatcacatcagctgaagtttctgtcgacaatgtctttggttttaagagtgaaatcgtcacttctcttgttttcaagacctttaagggaatannnnnnnnnnnnnnnnnnnnnnnnnnnnnnnnnaaattggaacttaaagacggtaaaggaggaaaacttgtgggattccatgggaaagctagtgatgttctttacgctcttggcgcttatttcgctccaacaacaaattcaattacaccatcgactccttctactgctaagaaactacacgcaagaggtggaaatggaggagcttcttgggatgatggtgtttttgatggtgttagaaagatacttgtaggtcaaggaaacgatggtgtagctttcgttacgtttgagtacaacaaaggctctcaagcaatcctcggtgatggtcatgggaagcaaacattacttggaactgaaacggttctttcttctctccagtctgtttctagtttcacccaaaatttgatttcttgacctaatgttcctcctcttcttttcttttgtagtttgagcttgattatccaagtgagtacatcacttcggtagaaggttactatgacaaaattttcggagttgaagctgaagtggtgacgagtctaacgttcaagactaacaagagaacgtctcagccgtttggaatgactgctggggaacatttcgagcttaaagaggacggttacaagatcgttgggttccatggtaaagctggtgatttggttcatcagatcggagtccatgccgtgcccattttcaccaattacagatgtgttttctagtttctttctctgatgattccgttaaataacgtccatggaccatggttatggatttgtgtgtgtttcactgttttagtgtcagtgctttatgcgatcatgtgatgttatgccttcatggtatttgatcactaataaaggatgtttcttgtcaatctccttttagattttgttaaaattttcacatatgaaaataaaattaaataataacccatgtttttcaaaaaaaatatttctaaaattttaattaaatattgcaactcattttgtttgcattgacaactccaaacctctttgaacaagcgtggccactagatctcgcttcatgatgtgttttttttttgctcttctcaatgatagaagccatagcaaaaaatccaatttccttattatggagataaaagcaatgaatgtcaccatggttcttctaaaagctacatcataaatgatgtttttaataaacaatggatttcatcccccagatagaacattccgagcaacatggtaaaaaaaaagccaaaaatgatatatttaatcgagattaacaatctt

SEQ ID NO: 31096 - DNA, 5625 bp, Arabidopsis thaliana landsberg
  unsure (1)..(5625): unsure at all n locations
taacacaaatataaagtcttccacgacacgtatacaaaactttgaagaccccagagctcatgtgatcagatatcattgcagaaatagaacttttctattcacacgtttaatcacttttacagacactccctatcacacaagcttaatctaagtaagttgcacatgcttcatcaaaaccaaatctatgcatgacttaaataccagcgttttgggaagtttgactcagttgagctccacgctttctcatcttcgacaagaagtaagccaacgcgacctttgcccctaaggcggagtgaccacgagacaggcagattgcaccaccaacggcaccgcccacaagtaacataccatttgctatcagtttctttgaaggctttctcaacagtttcttccgtttggctccttcacctgtgtgcataccactagtggtagttcccgaggagtttgtaatgtcgtctgtctgactttctaactccgatggaatctgtgggataagacaagggtgggtcaaacaaggcatattcattgagatttcacaaacagatatttgcagggaacaatctatccagcacttgaccagagaactgaactcagagcaggtaaaaaaaaacactaacatctcacctttttcattaagcttactgcagataatgtgggcccttggggtcgatgactggttgcaatgtacttgcgaagtgcattttccatcttacaaacgtaactccatatgcctcttgagaaagcaagctttgccatctcaacatttaatccagcatcctcctggtgaaccatgtgtatctcacaagcgttcctaccaggaactgcagcaagtttaagttatgcatagacagtatggaggaatgaaaaaccttattcaccactcatacatattacagagatttgtggtatatgttactgatgagatatcaagagaagatttagttgaaatatggatgataaccctgacagaaacacttgcctttcctaattcgccaaccagatctgaaataacttacacgtacatacttcctctgttgcggcaccatattgtgatcacattcctgataataaccaaagagcaaaacaataagtaaagaggcaaagcgaataacagataatatatgacatggtccaggtctgtgtatctagcatatacgagaaatacttagcaaatttaaagaggaatgcataggtgcaaatgaataatgtaatttagaaataatagcattaaaaataatgccctccaagttaagataagtgcatcattaccttgatgaaacagtaaaacttatccttcccctcccacaatttccacgctaatacatactcccttggagtcaacaagggaaacttttttatagtgcgaccaatctcaatcccactattactgtcaacctgcaattgctcatgctcaaccacagtcttgtcccattgtttcctgtattcattgtccatgtaaaagtccctcaaaacctctggggagcaatcctcaaacacagttgtactcagatacttcatgggactaccatcctacaagaaaccaaagaagaaactcagttaccagagaaaaaaacaatcttactagacacttggaaaagtaaaaagctctacacaaagataaaactttgagattactgttggtttgcagcatttagcagtgtaggagatacgagggttgcttttcttaataacatcttcccatatctcagcatcctcacttctttcccccaatttttgaatcagaccctttagatcttcatcagaaacaagtgtagtagatattctgcaaagcgtatagtcaatagatgaagtctcagagataatcaaagagtagaataataagatcataaagtagacgattataactaaaaatcatacgaggcacaagcatgaacacacaaaagggaaagaggctaaaggttatagatttacgcagcaaacaaattcggcaaaaagatactaaattgaaagtttaacactttaccctgattgggagctgagagattgagaaaccgagacgacaggggaagaagaagaagcatgactgaagaatcggaatttccgggaaaggaagaattggtagagaagaatgaagacaagtgcgagcacggtggcccagcaataacaaaagactacatcaccgtcagctcgccggaaaaatctctcggaagaggagataaattgagctaacgtcgataaggtatcaccactattcatcgaattccaaaatctctctctgtgttttttctgagcaaaacccttggaaatcggttctatcaaatggctttaagacgtttgtatattcgcgcgtggactaggactaggactaggattagtctggttcttgttggctgagtcataaaggcaacaacgaatcctcaagctcggtcctgtccgggactcttcttattttctctcttttttctttgtggccctttttgtttttttgttgttacagtttggccccttttttattaatgttacgatttggccctcctttcttccctttatttttgtggaccaacaatggttagtacttttaaaccatttttttatacattaaggtttcaaaaaaaaaaatcatcagtaagtagatcatatctatctacgtaataatgcaacccgattagatctagaaatatggcaaaatagactaaggactgacatagacagtccttagatttatatgaaactattttatttgtttctcacaaatggataatatcaattacaactgatcccttagccacattattgttagtgaatcataacatctcacaaatctgaatctgtcttgcttgtaaaaagggtcacgaatatattgacatgctatgagtatgaaccacacaattcagtgtcccttttgatgacaattcattcatatggataagtcattgattgactttcttgtcacgttcacaatcggactctcaaaaactaagatatgtgtagaaaaaacacacaaagaaacaaactttggatatgtggaaagctgagagctttgaatttgattgatgtgtgtaatctgcatttttattttgaaaaactgcctgcaaagataaatgaggccaactttacaagagaaacattatattgtctttcatacattatcttcttcatcttcttcttctatcaactcagaagagtgagggtattatagaacattgaaaagagggaaatgaatcaaattttggctaaatacccctgaagcagaaaagggcggaggaaagaggcttactttacacaaaaaccagacccggtcagacgtaaaatttcatttgaaataccttcttagaacaaacaaaagatcatattatggaatttgaaaacatagtctttgctaattgatgtcttttacttactagttggattgaccagaagagactgctgctgttgtaattgcatctggagatgaactggccttgactgcttctttgctgccttcgtccaagcggacaacttgcgcaaaactcttggacatgttcttcatgaagtctgtgggtaatgcagcagaagcaggtttatgttcattttctcctgctactactcctgcagatggcaagcttggctgtcttcttgccttccggtcttgtataattttctcccgctcttcataaaacccgaaatcatccaagattgacgtgtcagcgtcgtagttcttgaagatcttcagcatctcgatgccctgttccagttttacctgtagtttttggttgtggttatggtgtggcttaaaagaggtatcttatggacaagaaagcttgataggcacaaattgctacttacttcttgggtgtctcgactattagtcacaggcttattgtcattgttttccaatataatgtggcggaactggctgtttggaacatctttgataatgtgccacttcactgggaactgtccactccatttatcttgttgccagtaatcaacgctcttctcaaaatcaacaggtccaaccatctctgctacaccacagaattgagagctcgcatttacctgaatttacaaacccgtaagcaatctgcaaaaagaagaaaaactaattttttttcacttgatcaaggattagactcgtaccgagaacagaagaaaaagtggacacggttctttctcatccttggcctcacgataagcagcgtcaagctttttgttgccattaggggtgctagcccatacattgtatttgatgcttttgtgaacattgtcttcactgtaagacttgatgatgaacaacttggcgttagtgtagtcggtgacaaagtctgcgttgttggattcctcgtgctcctttgcactgcctttgttatttttcttagaatcagcagcagaatcaagctcctctaagacctgagtcttgggctttgaagcccttggtcctcgattttgctcattgaggatatcaaaagtaccattataagcaccacccaaagatggatcactaacccttccacgccctcgactgttgtcaaccccaatccagccttggtttcccatacccacattagaaattagtctacttccatagttagaaccctggccacgaccaccactatgcatataacctctgttataagagttcgaaccagatccaaaaccgtaaaatgatctctgtcgctgtgacccctgacaaattaaagaacaatctacttttaacatataatccaatatgtaaccatgaatagaagaaagctatccatatgtcggataagagtagataagaaaagtgaaccaaccatgggtatgttctggccatatgatccatatgagccgagtggctgaggagataaagccggagaaatagaagaagaatgcctgtgcatatcagaaggcttggaccaatccgaccatattcccccgtcaaaaccttgctgccattcaggaaaaccaaggtttggctggtttccattaaacggtccaatgggatgaggatggtaggattggcgtggtccgatgttatcaccttgttggtcaacaccgacaaggctggtgagctcgggctgagttggagaagtaatatattgcatgctaggaggaactacctgctggtaatacggtgatgcccctgaaaacggaaactgttgtggagaatacaactgtccctcagaaggcaagggacttgctgcaggggaatatggcccatatggcatttgagggttgtatccatatcccgtttggtagaccagagaagcattctcattgaagccaacctgatttgatcagagaagaatatgaacaatttggaatgttttaaagaagagatcccagaagagatggtaaggtgtacacacaggagatgtgatgtccaatccttcaacattgacatacgaggaatactcgtcccattcgcctgtggggttttcataacctggctccccaacatagaaagtaattcagattagcttctaacagctcatatgcaattcaagaactagagaagtcaatcatggatagaggaaggcttatacttgccctttcgatggccactagtattacacttacacatnccacaagaatatgaaacatgtaaactccatgagctcagagatctgatcagagaagccaaacaaaacatacatgaatcacaaacccaacctctatagtaaaagccttgtgcttgaggag

SEQ ID NO: 31097 - DNA, 726 bp, Arabidopsis thaliana landsberg
gaaaacaaagaaaaaagcaaagtaattcgttaacaaattttttttttttctacttgtaagttgtgagcttctatctctgttttattatttatcatgttatgtttttaaacttattaatacatgagttaaagttttgggagtagaatgatcttaatagagttgatgatgttagtgatcatgaattatctcctaagctaagaaagactttttgtagcattttagttaaaataaaaagtttctatatcataaatatacaataaaacctttattaaagaagataaaacttgaccaaactgtattttataatgtttctttatgtattagttattaacaaaacaaaaaacgtaaattacttttgaagtgtacgaaaaaataaaagaggaatcaatttttcatatatagccaaagtcacatagtgattcttctccaatcaaatctctatcaacaatgacaagcttgcacaaaaccctcttcacacaaaatcccactactttagatcaacgtaagttctttttttctttcccttaattgattacgttaatcggtcaaattaatagtggatgtgtgattttgttagtcatgatgtgccacacgggaagagacaattcatggaaaaaactagaaaacatagacgaagaaggtccatcgacggtggcacgtgaagtgaggacggcgttaccaccggagacgccaacggagatgatggaggtcttggggagaccaccg

SEQ ID NO: 31098 - DNA, 3561 bp, Arabidopsis thaliana landsberg
  unsure (1)..(3561): unsure at all n locations
ctatttaagtgataagagagctccactttctctctcttctcctttctccaacagtctctctctacaagccatagaaaaaaaaaaaagtccccctttctctctccctcccctttcgtcttagggtttctcgaaaattcgcagtcaaattctactcatctcccgacgaatccatcctccaagctcatctaatcttcttctccgtagctttctcaatctaccgatatagtttttatcccttgccgcttaagatcgagctcgaatctcgcaaccccttttaatccctaatttctggtcggattaacccaggtgcgttgtttccgacatgaatctcagatgtgtttcgatttaaggtttgagctaaggtttgatcttgttgggttgagatttggtctgacttgtagctgacttcgtgtcttttaagcttcactgttcatttatacgtctatcttcctcggaaactcttgatgttcttactttttttttttttttttttnnnnggggtttcgtcttcacggactattcacgtgcggatagatctgacccgtattaattggtgggtcttggttaatctttgttaatcacatacggttaatttaagtggtttattatcttttaattttgttctaattttgattttaaaccctaaattacgctgattaataatttgacctttcttgggttttgtaattccgaaattatattgaatctggtccgatcttcttttttcttttgctggtcatgtagataaggttacagctttggggtttctcgtctgtctgaaaaaccctaattttaggtcgtctaagtttaggtttacttacatgttaattgttaaatgtataaaattcacttgcacgattaattttttgttatattagcgtaattgaattgagatgctagtatagaatttcattcttgattttatgtagaccttagggtttaatttttttttatttgccgtgtaattgtgaagtttgatgttggttatgaatgttattttatgtgggatattcatgtgaaatgctttaacactatgttatagattagttatatttattgcttgaataaatttagagttatatttggtgtcgtatatatggaaagttaagatttatgtcttgatatacaacaataatgtgatcattaagcacaattatacgatgtgttatataacttgttttgatgtgttgcttttgtagctctagttgcggagagagtataatggtgtatgaaagttaatcatcactgaggcatagtatctatctccttcaagcaaatcaatgggatcttccattaagatcaactcaatatccatagatctcgcaggtgctgccaacgagattgatatggtgaaatgtgatcatttttccatgcggtgagtatagtttgttgaccttatatcatcaacctctcttgctagagtatgtttatatagtagcaagctacaagatgaaatgacatgaataaccagtttttcttctctgcagtggattcgtagctgaaactcgtgagagagaccttagaaaatgttggccgttttcagaagagagtgttagtttagtagaccaacaaagctatactcttcctactttatctgttccaaagtttagatggtggcattgtatgagctgcatcaaagatatagatgctcatgggccaaaaggtatatcacatttccaatattgttttttatgtgtctaaagacgtgtctacttgaacttatgcattttgagttgcttgcagattgtggactgcatccaaactcaaaagttattggaaactcttctgttatcgaaagtaaaagcaagttcaattcgctaactatcattgatcacgagaaagaaaagaaaactgatattgcaggtatgcatctgctgagtcttggttcagtttcataatccatagcaaaatcttaatcattttgtattatcatgtttttcagataatgctattgaggagaaagtgggtgtaaactgtgagaatgatgatcagacaggtaaagttttctctggtcaagcaaattatgttttctctgatgatctcatgatgcggaatactaatttcttaaagcttcaacaactgcagctactacgtttctcaagaaagcacgtggtcgacctatgggtgcttctaatgttaggagcaagagcagaaagcttgtgagtccggagcaggtaggaaacaacatatctaaagaaaaactaaacaaaccatcgatggatattagcagctggaaagagaaacaaaatgtggatcaggctgtgacaacgttcggctcatctgaaattgctggtgtggttgaggatacaccacctaaggcaaccaagaatcataaaggcattcgcggtctgatggaatgcgataacgggtcatcagaaagtataaatcttgctatgagtgggttgcagcgtaggaaatctcgcaaggttcgtctactcagtgagttgcttggtaatacaaaaaccagtggtggtagtaacatcagaaaagaagagtctgctttgaagaaggaatcagttagaggtcgaaaaagaaagttgttacctgaaaacaattatgtcagccggatattgagtacaatgggtgcaacctctgaaaatgcttccaaaagttgtgactctgatcaaggtaatagtgaatcaactgatagtgggtttgacagaactccatttaagggtaagcagagaaacagaagatttcaggttgttgacgagtttgtaccatcacttccttgtgaaacttcacaagaaggtatcaaggagcatgatgcagatcctagtaagagatcaactcctgcgcactctttattcactggaaacgattctgttccttgtcctccgggtactcagagaacagagaggaagctcagtttacccaagaagaagacaaagaagcctgtaatagataatgggaagagcactgtgatcagttttagtaacggcattgatggaagtcaagttaactcgcatactggtccttccatgaacacagtatcccaaactcgagacttattgaatgggaaaagggtgggcggtttatttgacaaccgtttggcttcagatggatatttcagaaaatatctctctcaggttaatgataagccgataacatctttgcatttgcaagacaatgattatgtgaggtcaagagacgcggaaccaaactgtcttcgagattttagttcctcttctaaatccagctcaggtggatggttgagaactggagtagatattgttgacttcagaaacaacaaccacaatacaaacagatcgtctttctcgaacttgaagctaagataccccccttcttctactgaagttgcggatttatctcgggtgctgcaaaaggtacaagctttgcatctatttttcttcaatcgccatgctttctcattctgttttccaacttgcacctattcttgtatattccaaactggtgtgcttcagtgattggatcaggatgataacgggattgatttacttggcaggatgcttctggtgcagacagaaaggggaagactgttatggtccaagaacatcatggagcaccaagaagccaaag

SEQ ID NO: 31099 - DNA, 3479 bp, Arabidopsis thaliana landsberg
  unsure (1)..(3479): unsure at all n locations
gttggtttcgagtaactcacagactacgggagatacttcgagtttggaagctgctgatgtatatgttgttgattcggaaatacagacaaacccggttactcataagcagagatctgtttctccttcgcctcagatggctgttcccgatgtgtttaaggaagcgaggtctgagcgtaagagattttctactccacatccaagaagagtggaatcggaaaagggaatgaagcctaagttatctcataaaaactcctttgacaagagatcatttaacttgcggtctccttcaggtcctatcagagatcttggcacnnnnnnnnnnnnnnnnnnnnnnnnnnnnnnnnaggacactggatggtctaagctttttgataatactggtcgtagagtgagtgctgtggaagcttctgaagagttccgtgttgatatgtcaaagctgttctttgggcttaagtttgctcatggtttatacagccggctatatcatggtaagtatgaagataaagctgttgccgtgaagcttatcactgtacctgatgatgacgataatggatgcttgggagctcgtttagagaaacagtttaccaaggaagtgacccttttgtctcgattgacccatccaaatgttataaaggtgatttctcctctctcgttatgttctcttggttaatcgttatgtcagtctagatggaatgatttacggtttttgttaacttctcttctcttatttatgtgctaaaaacagtttgttggagcgtacaaagatccgcctgtatattgtgtcctcacgcagtatttacctgaaggatctttaagatcttttctgcacaagcctgagaataggtctcttcctttgaaaaagcttatagagtttgctatagatattgctagagggatggaatatattcactcacgacgcataattcatcgggatcttaagccagaaaatgtattgatcgacgaagaattccatttgaagatcgctgactttggcatagcgtgcgaggaggagtactgtgacatgttggctgatgaccccggaacatataggtggatggcacctgaaatgataaaacggaaaccacatggacgtaaggccgatgtatacagctttggactcgttttatgggaaatggtagctggagcaatcccatatgaggacatgaatcctattcaagctgctttcgcagtcgtacataaggtaaaatattctgtgcgtctccttactatttcattattgtaatcttccgtagagtttatgccacaagaactgtctaatggttacggttaaagccttagaatttaacagacaaaaatcttccggcacaagtatattttaggtcttttattgttcagttgattcaaccatttgagatatgaaaaatgttgatctttggttcagaacattaggccagctatcccgggagattgtccagtagccatgaaagctctgatagagcagtgttggtcggttgcaccagataagagacccgagttctggcagatagtgaaagtgcttgaacagtttgcgatatcactggaacgtgaagggaacctgaatctgtcttcgagcaagatctgtaaggacccaaggaaaggtctgaaacactggatccagaagcttggaccagtccacgcaggaggaggcggtggcagcagcagcagcggccttggtggctcagccttgccgaagcctaaattcgcttgagagacaggaaagagtctcttttgtaaatttatatataatacaaaaagaagggttttgtgtttgtgttgtatcctttttttttgtggattgttgttgttagtgatctttcatcgtcaatgtcatcttctctggatttgatgtgtaatgactgccaactggggaatggttgtgatttgatgtttatgggattcaaatatcgtttctactttggccttctacattacatatgttaagactactatccatcttttctcatttgaagaatattctctgaaactcaacagaagtaatttgtatttgtatttatacaagaacaaaagaaatttaagtgacatgtatttgtattcatctaagtaaaaaaaattcttcaaatgagaagcagcagcatgtttcacagattgatatcatcaaggagagagttactcaatgctattctcgttatcttcaatcctcggcaatgcatatctgtctgaatcacgaccaatgaagctatgtgttgttgaagaacaagaagaattagatgcagatgaacatatcatcgtctccttcatctctctccttatagcccatagcttttccgcaatgcctttcatagctggacgtgtagctctcgttggggtaacacattcgctcgcaagtctcagcatcttctcagccacttcaatggcggctcggtttctcttgagaaatgggtccattatgagaacagcttcatcgtctttgagtctcctcaatgcctgcccaagatgaaacgagtttctcctgatttagtcgttgagataatctcgagcttctggtgaaagggaaaagagaaagtaacttacccatttaaccgtgagtctgtcttttcgtggtctctttaactcaatgggacgtcttccagtgagaatctctacgagcaaaacaccaaaagagtaaacgtcgctcttgtcagttagttgaaacgtcctgaggtaatctggatccacatagcctgcagatcctttgacctgagtcgatatatgagtagccccaagatcttccgacactaaacgagcaaagccaaagtccgccactttggctctaagcttattcgtgatgaggatatttgatgctttaatgtctctgtgtattattggactatctgcattataaaatccctaatgcattaaatcttggcacaataagctataatgcaacaccgacaacaatatgacaagattaccagtatatgtgtgcaaataggtcaatgcatgagccacatcaattgcaatctcaagacgttctgccatttcaaggcggttaccccttaaacctgtgtttttatatagaggatcaatagttgagaattcatttagatattttattttttgggaaagttctctatgctctaaaattagagactggatttttctctatatacacgtaaaagaagaaggaagtacctcttgcaacttaccatctagatgttctcgtaggtttccattggcaacatattcaacaacaataaccttttcatctccatgttcaagaaatccatacagctttaccaaattcatatgcttaatctttgacaatgtgtatatttcattcttgaactctagcaaccagcttttgccatagttgttctgccacagaattttgagttatcgataatgtcttctccgaataattcttaagaaactagttcaatctgttttccacatattttccaagaaaaggatttcaactactacctttctcgcacgcttgatagcaacaatagttccatcatcaagttttcccttaaaag

SEQ ID NO: 31100 - DNA, 834 bp, Arabidopsis thaliana landsberg
tgcttctggttgcttttggttgtgatttgttgtaagacgtttctggaatgtttcagacgcaaggagagtctctcctgagtttaattgttattagattcaatttgttaaagtgagtgcgtgaccatgagcttatcttagtgattgggttgtgtgatttgttttgtgtgatgatatgtaggtgtcgtaaatatgttttgggtgaattgttcaatgactggtttgtttgtattgtatttgtgattatacccttttatttgcttgtgtgtatagctcgtagatgggaggatcgcctcactaagtatttatgataatacttacgcatctcattttgttattgatgcaggtaaagataaagtgtgatcgtggaatcatgacaaggaagagaggatgatctaggaactcgtttgttttattttgtgtttttggttattggaacccggttaggatttgttagttattcttagttttgttggtcgaattatttatttattcataaaatagtatttttgacttgcggtttaattgttattttattggttggtttaattagatatgtatgggtatatttaattatgtttaaaaaaaaaaatgggtcgggttgtttcatcagatatattagatctcagattgttgatcctcccattaagatttgtgtagagagaatctaatttgccattaaactcaaccacaagctttgtttggcttgcaagaatttacgcaagcatggagtcgagtcggctatgtaaggagggtggatggggggcttggataggagaagtgataggtggagaagcaatgcatgtagatccttgttcctctctgcaaatgtcggaa

SEQ ID NO: 31101 - DNA, 4892 bp, Arabidopsis thaliana landsberg
tcacagtgcctgaggatagtgacgacatattcttgggagctcgtttagaaaaagagtttatcgtggaagccactcttttatctcgactaagccatccaaatgtcgttaaggtgagtttatatcatgttatattatgttggttaggttgtatcaaatatgaatgatgcctttgaaaattaacattacatctttcaactctgtttgaaaattatgattatggtttgtttgacttttttcctctgattgatgtgtcctgaaacagtttgttggagtgaatactggaaactgtatcatcacagagtatgtacctcgagggtctttaagatcatatctgcacaagctcgagcagaaatcccttcctttggaacagctaatcgattttggtctggatattgctaaaggaatggaatatattcactcaagagagatagttcatcaggatctgaagccagaaaacgtgttgatcgacaatgactttcacttgaagattgctgactttggcatagcgtgcgaggaggagtactgtgatgttttgggggataacataggaacttataggtggatggcacctgaagttttaaaacggataccacatggacggaagtgcgatgtttatagttttggacttcttttatgggaaatggtagctggagcacttccatatgaggagatgaaatttgctgaacaaattgcctacgcagttatatacaaggtaaatcattctgcatctcctccttatttcatgattgtgatctagttatatacaaggtaaatcattctgcatctcctccttatttcatgattgtgatcttgcatagatctgactgagttagatcattattgttcagttgttattaaacatttcattgtttcgatattggccagaaaattaggccagttataccgacggattgtccagcggccatgaaagagctgatcgagcgatgttggtcatcgcaaacagacaagagaccggaattctggcagattgtcaaagtgttggaacatttcaagaagtctctaacaagcgaaggaaaacttaatcttttacctagccagatctgtccagaactaaagaaatgtcctaaattctggattcatatattcggatcattccaccaccacagcagcggtggcggcagcagcagcaacaactcagccttacctaagcctaaattcgcttgagacgtctagagtcactcatttttgtgcatagagaaaaagagccagtggtttatgttttagttataatcaactgtctctatttgctttgatttatttgctctctccattaaagagacctcttctttctgttttggcttggtttttgtgtaagtcatctcttctttcttttcttgtaattgattcattttgtagcccaacaaagaaaaaaaacagtgagagtttgtttgaatagtctaaagatgaagcaaagagatagtacaataataatgcccacaaactgttcgacgaaattaaaaaccaaaacacattcataaacgaagaagatgattatcacttagacaccagtagaaccaaaaccaccatcaccacgaacagtctcatccaaatcatcaacctcaacaacatcaggagtcacaatcttctcgataatcaactgcgcgattcgatcgccgaacttaacctcaaaatcagcatcagaatgattaaacaaaatcacaccaacaggtcctctataatcagcatcaatcacaccagcaccaacatcaatcgaatgtttccaagccaaaccagatctcggcgcaatcctcgcgtaagttccttcgggaacagcgatacttagatccgttgggataagagctttacctctcgctggaacttttgaattcaccgcacttgagagatcgtatccagcggagagtggtgagccacgtgttggtataacagctatcttggagagtttcttcattttgaagaatggtgattgtgatgaattgccatggattccgtttccgtcgagcttttggagtttaggtgatggttcgtttacgcaagccattgttgaaattgggaatcgaagttttgttaagagtctgtttgtggagttgcagagaaaccctaatttcaattgaggtcgaattgttgttgttgtgatgacgaagaagcgtcgtagttccgccattaaatggagtgtgtgtgagtgagtggcgccaatatttccctccaccctaaaaaaaacttctaaaattctaagttgggctttttaactatttcatgtagttctcggcccattagacccaaaattttattatagaagaataaatatggacatttaaattcttcactgatacaatttggcattttttgattctttgggatttgtattgtcttgttttctctgctaatttatgattctaaattctaaaaaatattcatccattctaaaactcgcaaattctgagcatatttaaatgggcttagccaattcatttaatcggcccattagcccaattcaagttcttcctcaatagcagaagaaaatggaatctttattgatcttagggtttatatgaatttatgattcttcctcttaaaccctaatttcgtattcttactccttcctcgccaatcttcatcttcctcatgttttctctaattctccatggaagaaagtctgtggaattacagaaatggcgtaatttaagagttacagtgagcattgtgcaaaatgcatttccttttaccaccaaatcgttctcttctacaatagctaaagattcgagtccaaagggaagtactttcacagtctcttatctcgttgaatcattgggtttgactaaaaaacttgcagaaacaatctcaaagaaagtcaccttcgaagacaaggtaaatccagattctgttctgaatcttcttagaagtaatgggtttaaagattctcagatatctaggatcataagggcttacccacgattgcttgtaacagatgctgagaaatctcttcgtccaaagcttcagtttttaaagtctagaggagcttcaagctctgaggtcatagagattgtttcgaatgttccaacaatcttggataagaaaggtgaagaaactgttagtttatactatgatttcgttaaggacattatgcaagatggtaaaagtttgtgtatttcttgtccagagggaaagaaaggtaacagaattcgaaatatatcggttttgagagaattgggagtacctcagaagttgttgttttcattgcttatatctagatatcaacctgtttgtggtaaagagaagtttgaagaaagtttaaagaaagttgttgatatgggttttgatccggctaaatccaagtttgtggaagctttgcatgtagtttacgaaatgagcgagaaaacgatagaagagaaagtgaatgtgtataacaggctaggctttagtgaagccgagatatgggcgattttcaagaagtggccttactttttaaaattctctgagaagaagataatcctgatgtttgaaacactgaacaagtgtggtttggcagaggaagagatcatttcggcgttgaagagtcgtccacaatgcatacgatcttctgagcagaagatattagactctattgaaatgttcttaggcttaggattcagcagagatgtgtttatgatgatggttaagcggccccctccgtgtattggatattctacagaggcggtgaagaagaagactgagtttttggtcaaggagatgaattggccagtaaaggctgtggtcatgatccctcaggtacttggatacagcctagagaagaggactgtcccaaggtgtcatgttatcaaagttctcatgtcaaaaggattgcttgaaagtgaactccctccaatgtcttctgttttgacaagtactagtgagtcgtttttaaatttgtctgttagcaaacatgatgacaagcagcttgtggctgagctgatggcaatcttcaccggaaatcgtgtttcactcaccgatcagaaggcacgcctagaacaatgagcaacgttaaggattgttttttgttttctgttaggtttagattcattagtgagtcttgttgcttgacttttggaagtagagaatagattttgtgtatgagtgtctaagcctttgaccctgaaggatgatgaatcagtcttgtatgaaaaaaatctttacaattatctttgtttgtcttgttgatatgaattatggttaagatctttgtgatgtgctttgttctgttttggaaattaaacagagcatatgatatatttcattttactagtttcgtggcagaaatctttcctgtttcgcaggatttggtagacaactctgaggagtaagatccactcgcaaacgatggaacggtttattcaaattcctagtttgctttttctacttgagtccttaagtttgtattagagtcttcactatacttcataccttcttgttcaacccaattccaactcttcagtctctgctacatcttcaaactccatcaagcctcaaactaataatctttcaagtgagattataaatcttcaagcttcttggattggatatatcaatagactataaaagctagtagaaaagagtagaaaagctagttgaggatttataataaggtaaataagtagaaaagacttttatagtctattgatatatccaatccatttacttgatccatctctgtatgcaatctgactgacaaattgtaattgttaaactcttttttactagctttttttaaatcttcaacattaaaagtctagaaacagaagacaactatttactacatgatatttttggttattggttaacaagaagcactgtggtaaagcagcccgaggatgaataatttagtgtttggttgatgagtgttaatcttcatggaatccataaccacaaagatttgg

SEQ ID NO: 31102 - DNA, 4383 bp, Arabidopsis thaliana landsberg
gtagtagaaatgctgttaataccagaaaaagccctggctcgtcctgagatcttgaatgattggcgcagagaggataggtttgcgggtagaaaacatcagaagagggctcccagtcacctgagcaagtaaaagacttgggttcagctagccctcctgtagctcgacctgttaggtaaattttgggtgacagtgttattcctcttcgtgtgggagagcctccaaaaccccctgtcagtagaaataccgatgcttcagcacatgcaaaggttttggcttcatctctttcagagtgcatgaaggatgtaaagtatataagaaccattgatgctctgcttatataatgttgttgtagcacatgcattcgttggtaataccatctaaattcttagggaggtaagtaaatgttgatgttttctgttgtgtgttatttcagtcaggtacatcattgagtagtttaatgtccacaaatgagaagccaccagaagtgaagctggagactgctttaagcctgattgattttgatactgattttgaaactcctgctccatctgttgcaattcaagcaccactatcgaccacatctcagcctgctccacagccaacaacttcatctaatgataactgggcatctttcgatgctgcacccagtgcccctagtttaaatgtatcgcaaccaccacccagtggaaacacactggattcacttctctcccagttggcagtgacttcttctgtgccaggtcaggcgtctacaccatctaacggacctgtgaatcttggtcattccacgtcacaaatctttgcaccctttcagaatgagcattcgagtgaacaggtgggcacttcattacattatctatgaaaacaattgcataaaattctgcgtcaaaattgttatatggttatccttctcggatttttgttacagccatggaacacagcacttgcatctaatgtacagaggtcaatgagtgcaccgtcattgcaacctcttcaaggagtcccttctggtggcctgcagtcttctgaagttaaaccttcgggaagatcagaattacctgcggtattcaatttattttagccatttggtctctcccatcactatatcttaccatgtgtgggattgtgatgacatgctaacctgtatgcaggatttattcgctgtaaactacccatcataccatgcaccagtgcctggatggcaagctggtccacctcatgctatgcactatggcatgcagcagtataataaccccgtggtatggtttctctgatagatttctgaatccttaatgaatttgagcatcaattacatcacagccggttactttcttgtgaatgattatctatttcctgcaacagccgtatcagaatgttccgcagccaggcaagtcaatgaacccttttgacttcagccctgggccgccatcacaaacacaaacggtatgtcctctagctcatttgacttagccagaatcaaaactttgtgtgaaagcaagcatgttttggaaattagctttgagcgaaatagctacttggcagctgagaatatgttggctttaggtcttaatgaaatacgtacgaaaacttagcttatgtgttaattggtgaaaccctttcacattacttggtcaacatctgcaattgaacaacttgacttaccaaagtatttataaaatgttcgactggtggattatgtgttaagtgatgtgaaaaccatacaggaaaatatgttcccttccatggctcctctgcaaggtgcattacctccttcaggcatgatgccttctcaaggagtacacaatcaattcaatataccttctcaaggctcagcccatccatctgcaatgccaccaagtaaagcatgccattactttttactttgttattatctgctatagaatgatctgtttactcttatcttatgagtgtttgataaactatttgctcccatttttcagggtacatgccttctcaaataccaggaagcatgccacctaggtatggccttttgattcctttaattcattagtactgattactgattgctataaacgtgatctacctttggtctctcaatgatagttggtagcgaaacctctgcttcttattttacctttccagaaccatttctaaagttatagtcgttttttttttttttttgcagcaatgtaaacccaattggcgacataaacacgtcatatgacactcaacaaacatatcaaaagtttggaagctcgtttgctgctgcagttcctttgaacccaccttctttccaatcaggaggaaacccatttgggtaagaaagagcgagaatattagctcacgagagctatgaaatgcatgaggattgcgtttgtgttctaaggtgtagtataagactataaggaggtattaaatcgaatacaaacatgggttaaataggaacgaggaaaggtacgagccatgaacttgaagaagaattggggtttgtgagagtgttagattattttttataagcatcaaaatgttttgaaatagggtttgatatttattctttggtgtttctatattccatttccattttgttgtttgtccttaagaaaatcttcaggctcctcctgtgttgtatgattttgtataacagtttacacattgaccataaagtcttgtcaaaattgaataaggtaatttaaaattgcttttatgagactaaggtttgctgaagtttctcttcctctctcaactctcaacgctcgtttctgtatgaatgaaattttcagtgttttgcacccaattgctttatattaaaactatgtattacagagatgtatgtgttataatgtgtacacgcttcatgattagagaactctttagggacagtattactagtgtatagctatatttgtatccatctttctttgatcctaaacaatctaagtacaaatatatattgatttcacacagttcctcaatcttaaatcttctattctatttttcgacaagatccacaatgcggagatgaattgagaggtgacaaaaatctctctgtggtgatctctcatgttgtttgtctacttttcagtaccattggagccaccaacatccaaactgcagcaacatttattcaaacattacaaactgtatcaaaaacaggtaatagagagtttttattgttaacttactgtaaatgccaaccgcgagccattcgtttactattctaacccaagtacttgtccacccgacgtcaattgtccacctaacacaaaaacctagcttagttgtttcttttaggtatatgaattgtagtatttgttcatcaagaacttactttttcatggaatggtgaatgttccaaccaacaagtagcattgcaaagtacattgctccagtagcaaacacaaaatgaaagaatccgtatccgtaaggaattgcatcttcctcatgattctcatcttttctaaactgtaaagggacatttgctattgtcattagtcaagtttctcttttgaagttttgcagaaaagttggcagagctcatagataacaaacctgaaaacattgtgaatctactccagtagagaatgtcgcgattaccattgcaagcagtgcaacaacaaagctctgcacaatatacaacatacatagaatatcctttttagtactttctttacaatctcaaaatatccgaaaggtcatgaaaatattcttggaaaggtttgagatttgtactatgatggtaagccagtctgttctactagaaccttctgcttttctgttgcaagtttctcctacaggctcactgcaaaacaaaatgttgtagagttgaaaactattacttcttgaacatataaatagagactactactctcaagttgctcgatattcagatgaaacttgccttcgaatggcgcaccagcagataaacacaacgtaaagccccataagcgctggagtcaagaatccagcatttatctattgaaatgaaacaagaagagcatttttcaaaaatcactattcacatgtgagggaagaatactatttaaatgaacatctaaattttttgactcactttggggtggagagagatacttgtcatgagttggatgaggaacaaagtccatgtgatgaaaaatatgttgagaaggcatgatggttcaggcacataccatatgtacatcaaaatgacccctaatatgcacacggtgtaagcagtagtcgctagtaacatcacatggacatggctgcaacatataaataaaactttatgagaaaacacaaagcgttttgtatgttttcccaattacgtaaggaacagtctcatggggtcccaccatctttctgcatctttttgtgcttgagaaacattcaatgagccatgtaatgaaactaatgatactaatg

SEQ ID NO: 31103 - DNA, 1395 bp, Arabidopsis thaliana landsberg
  unsure (1)..(1395): unsure at all n locations
acaggagggctagctgaaccgagggcttttacttgctcaggtgactgggagccctcttctgatgtttttctacccccaaacctatcctctctgcgccaatcattcaggatctcaggacgagcagggctttttctgttattaacagcattcctactacccgtctcgaacnnnnnnnnnnnnnnnnnnnnnnnnnnnnnnnnnccgtaacgacggtcatatccatcttcataaggtggactccgagaaccactagaactacgtgtctcacttggagacttatcatcattcttctcattcgtataccttttatttacatacacatgtctgatgaagtcccttaaccgctcaacattactgacagattaaaaaaacacaatcaatcaatgtaacacatccatctccacaacaagaagacagatttgtaactgtaataccttccgtcaggcactgattgccgctgttgatccaatcctttaaaataaatatccttagcatgctgttacaaaaacaaaagatactaaatcacaaatgccaagagaaaaaactcaacaaaagaagagagataaagcgtgtttacctgatttccaccttctttcaaagcagtaacttcttgtgaggtaaatttcgccattgatatcgatttaacacgatgtgtaaactcacgactgttcaaaaatacatatgcatatctcaaacaacatttccaatgaacaccatctacacaagaatatgagaagataaagtacactcactgtattccactgcagttggtacaaacaaaagtccagaaagtagtgcaaacatattgtggtccctaagtaaatgatatcgaagaagaaacgttaacgttaagttctctcaaaatttttatcggaaatgatcaaatgaagagcaaaaaaaaacttacaaggctgttacagtttatacacctcttattctcaggaagtttaagaagactcctaataatcttctcgttcttctcgtcttctttaactcgacccgccatttttgattccaaaacactaagctagaaactacacaaactttagaactcaggatcagttttctgaatcaataatggcgaaatcaagttctgaacaatacgaattacagatttgttcgcttagtctaacgtaaacacgagatttgacaacaaattctagttcggttcacagagttgagatcgatcatgactaataacatacagatccagaaactataggagatttagaagagaaacggagcaaagtagacgaacctgagacgaatcttcaacgacgatcgaatttctggagattttgattcttttttgatgaaacagagtttgcaaagagagagagagagagactttgtacagctaacaatggtctgtggggttaaaagagtagagagaga

SEQ ID NO: 31104 - DNA, 1524 bp, Arabidopsis thaliana landsberg
atgacgaggagagagtcttggtaagtttaaggagtaatggagaccggtacaagcgtaagcaacatcaaccaaagcatcagaaacgatagctatgaagcaatcaagaatggatcatggtttaatcagttccgcaacggctgcaatccctggatggctagatatgtatacggtctgatattcctgatcgcgaatctactagcttgggctgctcgtgattatgctcggggtgccttaagaaaagtgacaagtatgtgccattagaatcatgttttaagtataactaagtaattcgttgtcttataagtttgatcatattgcaggattcaagaactgtaaaggtggcgaaaactgtttggggaccgacggtgtcttaagagttagcttgggatgttttgtatcctttcttgattcagttgttattacaactttatatgattttttgagtcactaaatcagaaaatgttttgagcttaaccgttatatcctcagttgttctactttgttatgtttctttcaacacttggtacgtcgaagacgcattcatcaagagatagatggcattctggatggtggtttgttaagctcatcatgtggcctgccttaaccatcattcccttcttgcttccttcttccattattcacctttacggttagtcttccatgaaagtagtcttcctctaataatcatgtggcctgctttaaccatacgtcttttttctttggtttgattttgcaggagagattgcccattttggtgcagggtaagactttgattgactagtccaacttcacaatgtatatatgatgtgaaaaatcccaaatcttatattgttgtttttttctctatagggtatttctcttaatacagctaattagtgtgatcagtttcattcaatggctcaacgaatgctatcagtcccaaaaagatgcagaaagatggttagattctttcaaattcgaatcataatatatttttagtttttatttcagtttatactaagtaagcaatactctattctgttttgtagccgtgtctatgtgatgttactatcaactacttcatacacagtttgcatagtaggagtgattttgatgtacatttggtacgcgcctgattcttcatgtcttctcaatatattctttataacatggactttgttcctcatccaactcatgacaagcatcgctctccatcctaaagtaagtctttattgtttccattactattcatgttcatgacttcatgtcatgtgtgttttggatgtttgagcttattaaggtttgtttgtgcttttgccaacaccaacaggttaatgctggatacttgactccagctcttatgggactctatgttgtgtttatatgctggtgtgccattcgaaggtatgtttatgtttccttcaatcttgatctctgttttttttttcaatgtcttaaaaagttcaaaagcgataatccggtccggttagatcttaaaaatctaaattatttgacccggttaaatcagattaaaacagaattaac

SEQ ID NO: 31105 - DNA, 1235 bp, Arabidopsis thaliana landsberg
tcgattagatatgcttggatacaaaaagtagttgtactgtaaacattctcatgaaacacctgtttattgttttcgttaatgtttctttcccttttgattctttatgatgacagtcacaggtaaggtcagtaaaagttggcaatctctcttcaggagcaactgagcatgatattaaagagtttttctctttctctggtgaagttgaaagcatcgatatccaaaggttagtgatattgtttccttgttctttgatttcaaaattttgacatttaaagctttttttgatcaattaacttccgaagctttttctcagcaaatttagatacagttctcttaaacttactgactctgagctttgtttttgttttctttttctaactagcagtaacgagcatagtgcttatgtcacatttaaagaaactcaaggagcagagactgctgtgctcttatctgtgggttcactcttatctcaatattattgtagtagcattcaactcttacataacactgttaatttagtaatcaatccatgtctataaaccttcgtttaatatggttatacttctctagtccagacaaagtatctctgagtatttataagtaaaattagtttgcttacaactaatatttgggaccatttgcaatttgcattactaacaaggggtgttatttcagggagcgagtattgccgatcaatcagtcatcattgagttggctcccaactacagtccaccagcagcccctcatgctgtaatgtcttcttcatactgtttttcttctttttgattagtgaaaagtattcatctcaacactcaatagagcagtaatttcgtagaggtgttaatttgtgttaattttctcaggaaacacagagcagcggtgcagaatctgttgtccagaaggcagaagatgttgtgagcagcatgttagcaaagggtttcattcttgggaaagatgctgtcggcaaagcaaaagcttttgatgagaaacatggtttcacctcaaccgccaccgcaggagttgcttcactagaccaaaaaatcggtcttagccagaaacttacagctggaacaagcttggtgaacgaaaaaatcaaggcggtggaccaaaactttcaggtaacagagaggaccaagtctgtgtatgcagctgcggagcagactgtgagcagtgcaggaagcgctgtgatgaagaaccgttacgtgttaactggtgtgagctgggccgcaggagca

SEQ ID NO: 31106 - DNA, 3053 bp, Arabidopsis thaliana landsberg
  unsure (1)..(3053): unsure at all n locations
aaagaatgatgtgttgcaagaaatcacaatggttatcaaggaaaaattagtcttagatcttttacttgaaggtcatacataattgaacctcattgtcttataaattactagtatcatgtttcaatgattgaaatgcaatttgtgtgtattgcttatccatatatgctatcgtctttgttcacatttgataacggtcggtcttctcaatttcccttattagttaccttcccgtcttttgtgatttaataacaacaatggttgtaagtacttccctagcctgatcattgcagtaaaagattaccgaagatttatacaaagatgaacaacatataaaaatgttaaaaatcacactgttactctaaaattctaattggaagtttatgttgtattgtacgaactacaagctactaaattctatgatgctgtttctttttgcgtggaacacaattttcaattctagttctatttcaatatttgtagatcaagggtagattgaaattgatcatggtcgtaaaacatgtttagtgttccattgaattggtctaatcttatttcttcctcacaacgtcacgtaacaaccatcaactaaaatgtctattttaagctaaatgttaatcataaagtattaaattaaaaataaaaagacagaaaaacgtggtaagaaagaaggaagagcgccaaagtctgagctaaatctatggtggtttcaagcattcctaaaatggcaatcttctcacaaaaaaatattatctcaccactgaaccattcttacaattcctcatatcattattccaaactgaaaaacttcccaagattttttgtgtgtagatatgttttgatagattgaagataagtttaaatgattttggatgagacttgaagcggatcaagctagagaaaggaatcgacgacaaatgaatctatgaagacaggtgaattacaacacttgatgcttcttgagtttatccgacgttcttctctcgggtttctcagatggaatggcagatcctgctagttgttatatctatcacgagcgtgacgtcgaccaagtttgttttccttctatcttagtactatattggagatccttttcagccataagaaatgaaataagagaacaaattttatgttttttattttattttattttattttattttatgttcaatgatattactttcacatttaccacatattataattcacttttttcattttgttgtaggcacttgtcgtattgaaaaagggaactcaattactcaagtatagtcggaaagggaaacctaaattccgcgcattcaggctttctccggtatgcgatgtttttcgatgtctcgtttatatatgttatacaaactatacatatgttttgtgctagtatgttctccatatatcgtgcttactattacattgcgctcatagtatatgatgacactccatgtttattaatataggatgaaaaaacgttgatttggttctcgcgtggagaagaaaaaggtttgaagttatttgaagtttctcgtattgtcccgggacaaagaactgtgagtttaaccgaatcttttacttaaaagcaagttctttttttcggtttctaaccatttttcatgaataggctgtttttaagagatttctacgtccagagaaagatcacttatcattttcacttctatataacaacagagaaaggtcacttgatctggttagtaaagagaacatttcaacttagattgtaaaattgaacattcacttattacatatgttctttttttcttttctttttgaacagatttgtaaggacaaagctgagacagaggtgtggtttgctgcccttaaatttttgattgaaaaaagtcgtaatcgacgcgccagaagtgaaatccctgaggtatgttttcttcataatttctatacattatgttatatatcttatatgtagtcaaatttataatgcattgattcatttttgttattcagatacatgatagtgacactttctctgttggtcgtcaatctatagactttgtcccaagcaatattccacgaggtagaacatcaattgacttaggctatcagaacaattcagatgtgggatatgaacgtggaaacatgttaagaccaagtacagatggttttcggatcagtgtctcaagcacaccaagttgttcaagtggaggatctggtccggatgatattgaatcattaggtgatgtttacgtttggggtgaagtttggactgaagggatattaccagacggaactgctagcaatgaaactgtgaaaacagatgtactaactccaagacctttggaatcaaatgttgttctcgatgttcaccagattgtttgcggtgtaaggcacgttgcgcttgtgacaagacaaggagaggtttttacttggggagaagaagttggaggaaggcttggacatggtatacaagtagatattagtcgtccaaaactcgttgagtttcttgctctaaccaacatagactttgttgcatgtggagaatatcatacttgtgttgtatctacctgtggtgacttgttttcatggggagatggaatccataatgttgggctattaggacatggtagtgatataagccattggatacctaaaagagtctctggtcctttagaaggtcttcaagtactctcagttgcttgtggaacatggcattcagctttagctactgcgaacgggaagctattcacgtttggtgatggagcgtttggcgttttaggtcatggaaacagagaaagtgtttcatatcctaaggaagtacaatcattaaacggtttgaaaacggtgaaagtagcttgtagtatttggcataccgcggcgattgtcgaggttatgggtcaaaccgctacgagtatgtcatctaggaagttgtttacttggggtgatggtgacaaaaacaggttgggacacggaaacaaagagacttacttgcttccaacttgtgtatcttctcttattgactacaactttcataagattgcttgtgggcatacatttaccgtcgcactcacaacttncnggacatg

SEQ ID NO: 31107 - DNA, 2477 bp, Arabidopsis thaliana landsberg
  unsure (1)..(2477): unsure at all n locations
agttctagtgggatcactgtagtgaaaaagtttttgggaagcggtatgagtatctatctgatgttgactcattatatcttcacaattaagtggttgtctccatgtctggctgtgtgtgacgcaggacttgaatgaagatgattttcaggaagcagacgatcttgaattggattcatatgacccagatacatatgattttgaggaagcagacgatgctgaatcagacgataatgaagttgaagatggtggagatgactctgcttccgattcagccgatggtgaaccaggggattatcagatagatggtatgttaattctatgtttgaatatactttcgtatagataatgtcatgagagttatgggacatctatgagaaggttttagattttcttctgaaagtacattgtcctttctcttttgagtttttgttcatttctaaacatttttaccttacatggtctgtcagataaggactctggtaacatatcacaatggaaagcacccttgaaggagatagccagaaagaagaaccccaacttgatgcaaattgtgtatggagcatcatcattagctactcccttgataaatgagaaccatgacattagtgatgatgacgaaagtgatgatgaagacttctttaagccaaaaggagaacaacacaaggtttgtcatctcaagtttgacaaaatttggtgatccttttaatctcttggaaaggaatattaatcgttattttttcatataaatccagaatttaggtggtggattggatgtgggatatgtcaactcagaggattgttctaaatttgtgaattatggatacctaaagaattggaaagagaaagaagtatgtgagagcattcgtgatcgatttaccactggtgattggtcaaaagctgctctgagagacaaaaatttaggtactggcggtgagggagaagatgatgaactttatggtgattttgaggatctagagacgggagagaagcacaaaagccatgagaacttggaatcgggtgcaaatgaaaatgaagatgaagatgcagaagtcgttgagcgtaggctaaagaagctggctcgtcgagcaaaatttgatgcagaatatcctttttacccgaatgacatcatttaacttatgtaagcacgatatcatttgctgtctttcatctctgttttaggccaataagttgtctactgctgtctgtgtttattattctctgaaacaactcacatgaaaatatggtgaagaattatagcttagtttatcaaatgggtcactaagttctaagttcatatatcgctctggtcagggagtttcatggttgctgtttagatattcttcctctgcatgtcttatatgtcatatttggttttatgctactgtttctatttgcattttggcaagttgcttttggttcaaccttaacttcgttgtacaagcaataaatccgagttagaggaggatgacaatgataaaggtgatgggaacaatcctcgtagtcaagccgatgaaccaggatacgctgataaagtaagtagattttgctgcaggcagctaagatatatatccactgttttaaaactcactatttgctttgcagttgaaggaagcgcaggaaattacaaaacagaggaatgagttagaatacaatgatcttgacgaggaaactcgaattgagttagcaggattccggactggaacatacttgaggctggagattcacaatgttccttatgagatggttgaattctttgatccttgtcatccaattctagttggaggtattggtttcggcgaggacaatgttggatatatgcaggtaagctacaaagattttcttttcttctggcccaaatgaaggtccaaatgggcacactgctcttttcagcttaaaagatgaaatatctttttcttatttaaaggtaattgaaagatgatattttatttgatagatgcttatcgtatcacatgtatctttctacttaggcccggttgaagaaacataggtggcataagaaagtactaaagacaagagatcctattattgtgtctatcggatggagacgctatcagactattcctgtatttgnnnnnnnnnnnnnnnnnnnnnnnnnnngaatgctcaagtatactccagaacacatgcactgccttgcttcgttctggggtcctcttgtcccacccaacactggctttgtcgctttccagaacctgtcaaacaatcaggtatgtgattgcactctgctgcttgagattttgatcccaagttaacttagagtgtgtttgaacttttgtgatagagaatcgatcttctgtaattcaaagtgcgtcttcatgaaatgggtagtgtgagtttaggactgaccaatagtgaataatcgtatggatacttagtgtgttttgaatgagaaaagttagaagatgctttcttcctcctggtcgatgtcacaaccctaaatgacagttatgctttca

SEQ ID NO: 31108 - DNA, 3165 bp, Arabidopsis thaliana landsberg
gcagttttttagcacacatatcagtccattctgctccattgtttattgttacgatatcatgcaactgttcaaaattatttctattagttagaaacccctaatggcccacatatcatgtaaggggaatttatcggttgtttctttggttagatctgttgtattcttctcctgctgagtagctctcctggtgtgtgcttcaggcaggatttaggataacagcgacttctgtagttctggagtttaatcaccaggcccgtattgtaaagaaaatcaagctggttgggactccgtgcaagatcaagaaaaagactgcatttatcaaagacatgttcacttctgaccttgaaatagctcgatttgaaggttcatctgttcggacagttagtggcattagaggacaagtaaaaaaggtatgcttttgatctccttgtaattcctagtttttccacatatgttggctctccggttttctaataagctttcttttgtcaggctggaaaaaacatgcttgataacaaggctgaagaagggattgcaaggtgtacctttgaagatcaaatccatatgagcgacatggtattcttaagggcttggactacagtggaagttccacaattttacaatcctctaacgacagccttgcaaccccgcgataagacctggaatgggatgaaaacttttggcgaactccgtagagagctgaatattcctattccagtgaataaggattcactctacaaggtaaagccataaagtgcggtagcattgatatatatttgaaggtctaaacctaaagtttatgtggggaactaaagagcggctatctcgctaatttctctctcttttgtgtaacattttgcaggcaatcgaaagaaagcaaaagaagttcaatccactacagattccaaagcgtctagaaaaagatttaccgtttatgtcgaaacccaaaaatataccaaagcggaaaagaccatcactagaggataaaagagcagttataatggaaccgaaagaaagaaaagagcatactatcatccacaattccagctgcttcaacatcacacggtaatgttttaaaaactaatagcatcatactatcatgcagcataaaatctttgattgatcttgtctgacttgatggagaaaaaaaaaacatgcagatgaagaagaaaaaggcaacggatcagaagaagaggaaagagtatgaagcagagaaagctaagaatgaggaaataaataagaaacgtaggagagaagagagacgggacagatatcgtgaggaagataaacagaaaaagaagacgagaagaagccttgattaatttattaataccttatttcaacttttgtgtaatactaaaagttttgttttcatctctattgttcttctgtgttgttttttactttaaaacttatgaatttatcaatcacatttctcgaatgatcactttctaccccaaatttttgaaatactgaaacttttcttggttactctaattatcactacgttttgtgcaagcaaaaatagattagactgttaggatttgctaatgaatgttaaaagaaaaatgtaattaaacagaactggtaaaaagctgacaaaactggaatgggtgggaacatcgtcttccccttccccttcttcatcttcttcgtataaaccctaaaccctaaattctctctatcggttagctatgaacaaaacagtcgtaagatgtcttctttctcgttcacaccatcctttgattcatttctccaccaatttatctcttctccacagagttttcacctgtagccgttatctcactgctaggtttatgtccactcctccgccggatgacatgtttggtttcgacgatcctttctccccagtgattccgggaagttgtggatttgactaagagtactcctttttgcacgattctcttgtcgactatggaaacgttaatgttcatcaagtagtgcccattattactcaatcctctattgacgctagagccattgcagatgctgttactggtgtcgacgatgtgtttgggagaaaatcccagaagtttcttaggcaatttagagagaaattgagtgagagtttagtgattgaggtgttgcgtttgatagcaagaccatctgctgttatcagtttcttcgtttgggcaggtaggcagataggttataagcatactgcacctgtgtataacgctttggttgaccttattgtacgtgatgatgacgaaaaagttcccgaagaattcctgcaacagattagagatgatgataaggaagtgtttggccaatttctcaatgtgttggtaaggaaacattgcaggaatgggtcatttagtattgcgcttgaggagttagggaggctcaaggattttaggttcagaccttcaagatcgacttataattgtttgattcaggcatttctcaaggctgatcgtttggactctgcatctttgattcatagggaaatgtctcttgcaaatcttaggatggatgggtttacacttagatgctttgcttattctctctgtaaagtaggaaagtggagggaagctctaacattggtggaaacggaaaattttgtgcctgatactgtgttttatacaaaattgatatctggtctgtgtgaagcttcgctttttgaagaggctatggatttcctgaataggatgcgtgctacttcctgccttccaaatgttgttacatattcaactttgctgtgtggatgcttgaacaaaaaacagctgggtaggtgtaaaagggtgcttaatatgatgatgatggaaggttgttatccaagtcccaagatttttaattctcttgtacatgcttattgcacatcaggagatcattcatatgcatacaaattgctcaaaaaaatggttaaatgtggtcacatgccaggatatgttgtctacaatatattgattgggagtatttgtggtgacaaagactcccttaattttgatctgttggacttagctgagaaagcttatagtgaaatgcttgctgcaggggttgttctgaataagattaatgtcagtagcttcacacggtgtctttgtagtgctgggaaatatgacaaggcatttagtgttatccgtgaaatgataagtcagggattaaaaccagataccagtacctattccaaagtccgtaatt

SEQ ID NO: 31109 - DNA, 6609 bp, Arabidopsis thaliana landsberg
  unsure (1)..(6609): unsure at all n locations
aggcgtgagacatattgagaagttttacctctttagggataaaccatttgctgttttgttcacggtccggtgatgaatcaaatgagatcaaaccgtacagaagggcactagacggtctttcttctagacttgataggagctcatcaatccgtacaaacgcatcatcatccgtcttcattatgtattttgctgggatgactttggtctgtatcaacatggagaaacatccatcagagagggattaaccaagacaaggcaagaagtgatatctcatagtttctatgtttgtgtaaactactagtagcttaccccgagaatgcaaagcgcaactgttttcaagctaagtaaaccatagtaatcaacaaatggcataaactgaatgtctccatatgccttagattctctccacatctctaaattgactttttcatttgtgtgctgagtaaaagaaacgccaagttaatgctaagatatgtataaatccaaggaggaatgttagcttgcagaggtacttacaaggccaatgagaaatcgaacagctactttgccagatcttactgcctcgtattgcatccaagatcttctcaatgccatacgccgcttaaaattatttccagtggagaaaacacccaccaatagttctattcttgtcccggaaagagatggagctttaagtttctcttctatgattaaagatgcatggtcatcgggaatgggcagtcttgtggctaagacagataacattttcaaaccacctgagactttgactgcactgactaaccatggctcgagcttctgaaaattagatatgtcagttttaaacaaagcaacaacctcaaaactaacatggtatagtcatcctttacctccctgtaagcaaatgaagtctcgtgccgcccatttatcgtcatatgaaaaccttctaagccaaaccacaatgcggcagtgaagggactccctttgagaaatggaaaattagcatttgaaagagaaagttccatagttgcatcatcgttggaactcttttccgaaatgattctaccggtctgtttgttgcagagaggaagttcatcaactacaatggttgccaagagacttttcaacaatccatcgagatgacatacaagagaaaagatatgtgagttctgttacctaaatgatttttcaatgnnnnnnnnnnnnnnnnnnnntcttcgtttccccaacctagcttctctgtccatgtattttgcactatcgatggtttagaaaagttcacattgtaacgcaagattattggccgacgagtttctcctgataatcccgagccaacgagctgaatctggaagctactagaatgttcatcaggaataccaaccaaagttattgaagaatcttcaattaaaccacaaggaagctcaagaagtacatgacttaaaccagacaaatccttatcaaatgcagtgacaaaatccggacagattcttctaatttccttagagaccataccagaagaataagctctcttctctctattgatttctaaaaccaaacctttcattgccaatgtagcttcttctatcccttgagcagtttctggcaaagcatctggcctttcaagaaatggacgcattcgagaccatacaagcattccattggacacttcttcttctccaaaaaagctcttgtttgaaaatagataatcaagatcttccaaagtcataaaatgtggcttctttgcgggttcatgaacactctctccttctatactagaatcatccacagtgtgagtgtgatcagattgttcataacggatgatgaagatcaatgtaagaaccataatggagactcccaccgaccaatccctcattctgactgaagtgaaaccaaatttgaatctcaccactgacatgaattgcttcattgagtaacctaaagtaaaacgcagattacgaattagagttagcataatccgattcttattctcacaatcctaataaaagaagaactcaaacaatggtcaacgaactttggaaccggtgttgtatacttcagacataactaaccagagacatttaagctaaaagaagaaagattaaactgaattggtgcagaaaggatcagtctttaatggatataaggagacccagaagcaagatcatagtaaattgttgtttactattacttagcactaacaaagaaatatagctcaaaagaaaaacagcttagtcactgtttcaatagctgaaaagttgtgtttattgtaaaattgagaagctttacccgttttatattgaatttcgatgatctttcaagtacataattcatgaagatccaagatcagccaaatgcagtttcagagcccaggcagagacgacgaaggccagctgaagcagagtctgagcatcttgttgctataggaaacgacgttgttttatataacaacgaaacgatgtcagttatttacaatgaaaacgatgtcgttttaacttttttgtattgctttgttttgtactcttggactactaactaggactctaataattttttttgtccatttttttgtacttggagatcaaaatcatttcaaattttcctgaaataaacaaattctccgagagataatcttcttttcatttcttaaatctcataatgacaggcaaatggaataacttggctatataggattggttggttagaacaaatatgaatagagagagagagactacactatactgtttactaaacagactttcctaaattagaaagtctctgttctcctcctccaccacccgtggcggatcgtggactgaacggagctcttccagcggacgatcgtggactaatctctccacctcctctgaaatcacttaagctccgaatgtacactttctccgacacccttggattctgaaaactcaccactcttctcatcaactccactcctcctcccgccggcgaacctaccgtcgatccacttcctccaccgcctagcttcaagctgctcactttccttatctctcctctgctcctcgtaaacattccgtccatcacttctccactatccgcaaacgacgtcgcacggctcacttccccttcctgcacacaaccacgaagaaaccagtatattaccggtatgttctcgataaagccttaagcttttgaagagaagaagaagagaattaattaccggtttgagattgaatgataagatagcaggtgcttcttcatactctgcagcatccaagtcttgaagatgagctcctttgaagaaattaggcaacacatattgcctaactggaacaagaaacattatcatcaacgggaacaaaactccggccaccggaacccacgtgatgccaaagcagaccagtaagtaagcggtttgaaacagagtaaacatcgccattgtcttaaacggaaccgtttcaataaacacagcatgattatcctcaagaactctgcacaaaaaaagagaccaaagttcacagagaccatgagaatacaccaacaacaagattttcagattgatgaagaaaggtttgttttttacttgaatcttctacttggggcagtgaagagaagcacgatcctttcccagaattgattccctgggaggctttcgattgccatgtaagcgaagtaaccccaaagaaccgagcttgggattcttttgatcaaaggcattgctgcaacacatccagccaccatcatagcttgaagaaagttgcttactctttgttcttttacttctactggcagaatattctccacttccgtctctatatcgaacactgtttcatcgaccagtgcatcggcgtttgaagccttttgaatatgtgactgcttgagtccttgaatctgatattgcaccgtgcttgatcagggatgagttaaaaaggtcaaattataaactaatatatagatgataccaacatacccgagaaggctcttggtgtatcagagggctctgcatttgttggtaagcttcttccatgcttccatagacttctccaattgttgcattgtttctgatgcatttacgcgcagctgccacgagtttgtttcgaagtaactgcacatcaaccagtttttaaatgccttttgagaaatacaattgaaggcctacataaaacacactacaatatgtaatcaaacctggtgattcagtgttgccaagctttttgtgtgcattggagactgagggatgacaccattggatggaggaattccgatgagaccgcaaaggattgtctacaaaagaagagttccaacctttcatatttcgtaactggtcaagtcaataaatcagtcaagaaaaacatacacttcatctcttaccaagaaacctagaagaaacagatcataatggtaagcaggaggctttctcagattgaaatcttcctgctgtgcgagctgcgaggctacactatggtcaaagtagtaaagaaccgcaatcattgacgctggaacaaccgctaaaagaatgtaaagcacaggtacatccaccatctcctgcagtttattcatcatgcactttcatgaatatcaacatgaagcattaatagtaaagagaataataagtgtagaggaagtgattagtgccttaatgacagtccaattctgatatgcaccaggagaccatggattaggactaacaagacgtcttggtatcccttgaggaacacttttccaaggtatgtatgatatacaagtccacactaccaccattactggaacaccataatctgctataaacccacgtaaccattctgcaatgacaaggataccgatgttcctgaggtttttgcttggagaagtaaatgacttttagacagatttttttggtttttgattcactgtttgaatagatatcaaggttccttaccagcaccaaatctccaagaccttgcttttcggctttttagtccagtatagagaagtccagaagacaaaaccaaaccgaacattccatttgcaaacacccaagcaggttgaaactcagctgatcttggatttgttcttccggggacaccaaactcatccacaatgccctgaaaagtagagtttcaacataaaggaatgcctttggtgcaaatgctagtataagttgtgaatgtaattgataaagaaagctcttttacttactctaatggcttcttgcatgaaaagcatggctattagaataccaaacagttccccagcaagtcgagtgaatcgattgatgaaggtgcaagcgcctaatacagctaacaagaacaacaacagccccgtccacaagcaaacccttaaaaagaaatcatccatgaaaaacaaaaaggacaatgcccctctcataaatttttgagactttaaaagcttttgaaaggaactgagctatgcaaagagaaaaacttgagtttaccatccggtccacgctagaaagagattagagcccaaatccgttctacttttagcaaaattgaacatgaaggtgtacattataacagtaggctctgcaacaccaagaatcaacaatggttgtccaccaataatggaatgtatcactccacataatgcagtcgaaactaaggtttgaacagcggtaatcttcccatcttgttgcaaaagaaacaaaacacacaagttttctgttactctcacaataatcaaagacagattatttgaatgagggaacaaaaagagttattcatataccagtatctctttccaactgttctccaaatgtaatcaccggaatagcggatgcaaagaatatgtaagttgttggtgccagaatcctataatatttttgcataaattaagttactatcaaagctcaagcatcaacatttcctgaaaaatgaatatacctaaatccagctctgagaccactgatccaatcttgcttgtagcagttgagtctccctttgacatctttctttataccctgaaacgggacaaagctctctgcttcgtccatgtagatttggtgtgttcaagttttcagtgtcctacaaaacaacactcagttctgttaaaactcaaaacccaggattatgatgcatgattaagataaagcatgtagtaaccaagataggaaatctgatacaactagaatgatttagattgaaaaaaattccaatagtgtaaccaaaataaacaaagagtaacgaataaatcttaatacccttttaattactaagaaactcagatccgaatacaaatatttgcaggaaccttaaaagaaacccaaagaaatgtcttcaaaagcgttaattgcggaggatgtctttaaaaggagttatgtagatttgataatgggtgatttggcaaacaaaaaggtgagaactttacaacacatttagtacggaaagctcatagaaaaatcaaaagctggcgagaagtaaaaaagtcatgggatctctgagcttggattcaagaatgactgagagagaaagaaagaaaaacacttaccagagacaaatcagctcaaaatgactaaaggaacacaactttagaagactgagagaaaatagctttcgttttctaggcttgacctccccagtctctatacaagagccgtgggagattttatatcagttaaaaactactgctggaggagaaaaaaacgccagtaacattgaattt

SEQ ID NO: 31110 - DNA, 4126 bp, Arabidopsis thaliana landsberg
tcatcttcaacaaaactacctgaaggagtagagaattagtacatctaagggcccagaaaaatgtgtgtttgagtttgtatggataaggtgaccaacctcatcatagaagagaataggttctttaagtgagagagcagccaaatcaatctgatcttcacagttctcccactgaagagtagcttccccctttggattagcttttgcctcaacctgcttcacattaaaaaagcatacagcaatgagcatgaaagtcacacttgattgattatcgtgtgacagacagaaaaagagtgaaaatgagagcaaggcgaaccgtttctttgtctttctcaactacttcacttccacagtatggcgttgtaaacgtgtaatcataatctagtatcacctgctgagacggcttgctgcaagtagatcagagtggtatcagatacaactatcaagcaaagcttccctattgaaaagaataatatcttttgtgatatatttttcagtcaaatcctgaaacttacctcctgaatttccattgtgctgcagcaggaacttcaacaggtggaagcccttcctgcttccaaccagctagtgcgtcaaacgcattaaaatgaatcttagtgttgctacctaagtgtttaaggactaacgcattctcgccaaaaaccatttcaggtaagtgagatgtcttaagctttttttcccacctgtgttacaatcaaacatcacattcgtgaatctcagaagatgctatttacatatttgagataaacagagagctataccaggaaatgtgatgagcagagatcggaacaactaaaatcagtaagcacaaaaactaaaccaaagcaaatacgattttgatttttttacagaatagatcatatactccaccaaaaactaggaaaaactcgaaatcaaggacacaattctgatttccttcgatacgttccactaatacggtgtacacgagctcaaaaacccaaactacactactcagttcatcaaattaacgacgagcacaaatacaaaaccgtaaacacaaatatcacctacaagtaatcacagacaccaacaaattcatcatatatgatcgtatcttatgaggtgagagagatagagattaagtactcttcgacagcgagagaagtgagaatcgtgccgcggagggtttcgatctcccagtcatggatgcgtaaacctcgacgtccgtcgggaagaagctcagccccggaagacttcagaacatctttatcgaccaccgtctccatctgaatcgccggctaatattggcactaccttttctcctccgacgatatcacttttgtgaccaaccggactatccaaccaagacatttgacttttgatgggccggcctagtttcattttagtttgaaaaaagaaggtcaatttgattttggtccttaatgggctttaagtttataacgtaggcctttttcataataatgtaatatagctagaatttcatgcttttggaacacactataaaaaaggtcaatattcaatgtttcttttttcattattagtagatttggctaaataaacctctagaggacctagaccaggtttgaaacctgacatggtggaacaccactagcccacttgttctctcaagctcaataaaatccatataaatcatcaaaagatgaatcaatcccaaaaattcacaactaatttgcacgatacacctcatgaacaaaatattcgtcgtcattgccactattaacgattcaaagtggtaaaaaaatcaggaagcagtgaaaggtgaaacctcatgaatctctagactctaatgcataaacatatttcattatatatcgtagtagaatactgagacacattgacatatttaagtatcaaacagaaattgtataatggtatctctattttattaacacatgtgtgcgtcaatgtgaatcagatagaattagacacactatctttttaatatttaaagttggagccgttttggtcaaaactaatttatgtgcactactcatttatttataggttttttaaaaacacaaaaattgtgaaaaagcttctaagccaggtggcgggttttggtgcaaagtctttgatatgttcggaattgctgcttcgtagagaaaaaaacttttctgataacatcggagtaaaaggaaagtaagtcggagtttaatcatcttaagatttgattgaatggctacgctcactgaaatagcaacccttgaggagaagtgagttttttcttttcaccttctatttctatgtgtatatcttatctactcttttgaaattaagacagaaaagttagagatgtgttcgtaggattgggtttttgtctgaaagactgaaactttgtaaataccttttcttaaaattgatgagtttggaggaacggtttcagtaaattaggttgtgtttcgattctgttgtttttgtcggtgttcttcgtgagaatttgtctgaatttctgcatcttcctttgattgaggattgttttttgattctgttctatagcttttgctcttaaggaatcaaagaaggcaagtttttttgtcaaatcatggctttttttctgtttcggggtgcttattaatttgtttaattctgggttatttagttataatgtgtgctaagtgattcctctactagtattcaagttaatggatttgattcatctttggttttaggtatatcgaattgtgcaagatgcatggaatcctacccaacactgccattttatctgctttctttgaggtttgattactttttccttgtccagaagatctgtttagcttaatcttagtgttagtctgagtataaactacgattgaacctgatcaactgaattttaggcggaggttaaaaagtcaaggaatcaaagatgcattatgaacctttacgtggatagagtgaagtacgatgactatctcccgcttctcgagttatgcaatgagatcaacacatctgaggtacaaggaatagatctatttgtgagatccgcttgttcgttagaagatcattatgcattgcccttaatccgttccgtcaatcaaaaactccgagttgttcatctacatgactctttcgggaaaaacttctggcagtaagcaatggttttttgtctctctttttttctttttgcattatttctgaagttttccattttcattttggtgattggttttttactttcagggacgttttctttcaaggtttgagctgcaaagtgttgaatgtgaggtctatgcatatccataagcttaacatcgtaggagagttcacacagctgcacacccttatactcgataagaaccgtatagttggttttggagaagactgtttttcttgcatgcccaaattgacatatctttccatgtgtgacactctagtgtcagatctttggacatcagctgctgctctcttgaaactcccttctcttaaggagctccggtttcaaatttggatctcttgcagtgattctagcccactcaattcagagtcatcaccatcatcatctaccaaggatgatataaacacatttattgaatcagaccctcccgttgaagcagatatgtgggacgttgctgaacagatggatcctagtttacctgtcgaagagactcttcatagcatggatttctcgtataaaattcctgagcaagatgatttggattcacatgtctctgtgtctgcagggttgaatggagaagtactcatgagggaaaaggtaaaaacaaaacaaccaatttttcttgtttgtaagtcaaacaatgagacaaaacactgggatggttaaagcttttttataccattttggcaggttaggagagggaaaatgccgtaccaacccaaagatgtttcacccgttgatacgttcacatggcaatttgggaatgttgggttgaaatatatatcctctaaagcatcaccgatctgttctgaaaagcattacaggatgtacatgataaactctctgcccaaattacaagtgttggacaatttggccatcagaaagagtgatagagataaggccattgaaacatattctgcaaactctgaggacttaccgtacaagagaaagaaggaaagtgtatttagagttcttgagaaccgtgaaaaaaagatc

SEQ ID NO: 31111 - DNA, 2449 bp, Arabidopsis thaliana landsberg
ggttagaatagtgatatatggatgggtagagtcttgagtagaatctgtgtcatgtggtgttgtgatattactagtggtggagcggaggtgcttaccaggagggtggactggaggcgaaccgacactatgcgtgtagccggaagagcggagtaactgagtgggtagggtgctttccttggctgagggtgttgagtgtgtgtggagagggagagggtagctgggtgtatttatagctggatgtatgtggtgtagcacagtgaagttcactgttggtgagaatagtgacgaatgaatcgtctgacttagtatgaacaggagagttataggtagaatatgggacaagagtattttgggagttttctagaatatgaaccatgtttaagggatgacatggttggatagggaatagtttgataagaatttagaaacgagaattattggaatctgagtttgggagcctggttcgaaggaatctcaaagttaagcatgctcaacttggagaaacctgggatgggtgaccagatgggaagttcccactggaaggaaaatcacagtcaccagagttcgtatgactggaatatgggtctggctggtcttaggtggactggacagcatgatggatgagtagttgaaatttgggatgactagatgaccgatgaatagtaatgatgaatagtggcgatggaaaagtaattatagatatcatcgatgaacagtaacgatgatgaatagtaatgataaatagtaacgatgatgaatagtgtacgtgaatagtaccgatgaatagtaatggtgagtagtaatggtgaatagtgacagtgaatagtcgtatgaacgaacgatgaacgatgaataggaactatgaacggacggacgaacgatcgaatgatcggacgaacgaacgattggaatttcggcagcataacggcatgaaaagattatttggacgaacgaacggacgaacgatcgaatgatcggacgaacgaacgatcggaatttcggcagcataacggcaggataaagattatctggaagaacgatgaatagggactatgaacgaacgatgaacgatgaatagggaactatgaacgaacgatgaacgatcgaatgatcgaacgaacgaacgatcggaatctcggcagcataacggcaagacaaagattatctggaagaacgatgaatagggactatgaacgaacgatgaacgatcgaatgatcgaacgaacgatcgatcagaattttggcagcataacggtaggaaaaagattatttggacgaacgaacggacgaacgaacgaacgaaccatgaacgatcggacgaacgaacgaacaaactaataacaggggacgaacgatcgaagaacgaccgaacgatccttgtgctagtttgtgcttgtgtggaacatggagtgggtgtgtggggggggggaagagagttgccatgaaatggcttggggtgggatgagaggaggcccttgccgatctatttatagccatggtggggggattaggggaagggatgagaggattagtgggagattagcatgtatttgtcttgtataagtgagattagcttgtagagctcaccgtatgacaccggaggtatacgtatacgtatgagcatgaagaaagttatgaagaaaatatttgtgggggcttgaaaaatgattctgaaggtatttcttaggaagaaaatacttggagatatatcggtggaatatttgggcagtgtttctgaaagagtttgagggtgatcactggggaaatatttgtaggatattttgaggaggattttagagagaatatagaccactatattttacttgttgatatcaacttgcaaacaaacattttgaaacaaaatttgaaattcattttgaatttagagcgagtttgagaatatttcagaatttgaatttttgggatgctacaacatctagtgcaaatagtaacatgctcaacggtagatgtagggacatggcgagcattcaattcctcaatcttggcaattaaactagcattttcagctttaagacaagaaattgaatcattgcttattttagctctttagtcaagttctcgcatttttcaacttctagagcaaaagcattttttaaattaacaaaaattttattttccttaacgagcaagtcctcttggcattccaagagatcatccttctcgttaatggattctatcaattcattcatctttttcttttgatattttgttaggttggcaaaaagagaagttaaatcatcttcattatcactagaggtagctagagatggcaatgggtacccgaaacccaaaacccgatgggtttttaccccattagggtatgggtttggatcaattttcatacccatggatttgttaatgggcataaatctatacccagcgggtttatgggtacgggtttgttcctatagtacccaaacctgtgaac

SEQ ID NO: 31112 - DNA, 3665 bp, Arabidopsis thaliana landsberg
tcggaacgtgactatctctgtccagcttaagcctggttctttccttactctccatgtttccatctcctttatgctaagattggcttcgttgaagctaccttctgcgttgtatatgtttgacatctggatgtaactcaatgagtttgtgggttctactacctctttcagtttatctaccgctaacttacccaaccgggtgttaccgtgctttctacatgatcccaataatgcaatccaaactactgcatctgggtccattggcatctgcttgataacctcttctgcctcagcaaaacgctcagctcggcttagcatatcgatcacacaagcgtagtgatttagctgaggaagagtttcaggtttctcaaacatggatctgaatattctcaatccttcttctactcgtcctgcgtgactgcaagcagagagaagggctatgaaagtcgctgaatcggggttgatgtccattttctgaaagactggtagaattgagtctacttggccatgtaatgagtaagccttgagcattgagttccaggaaacaacatcccgcgaatccatatcgtcaaatacacgcatacacaagtcaagagagccacacttggcatacgcatggattaatgagttgttcagcaccgtgtcagccaaaaaaccacccttgatcacttgagcgtgtatagacaaagcatggcgagcagtgacaagtcctgcacaagcttttagtacacttgagaaagtataccagtcagggcttagcttctcctgacgtaactgaccaaagagatgaatagctctctccggatcatacactgcaaacgctgttataatcccattccaagcaacaatgtccctgcagtgactcatttccataaaaagcttgtagcagtcagtatagtcttctaacatttctgaataaactttaatcaatgcagtagccacttcagtctgagtcaccaacccggattttacagtcagagaatgcagttgaagacaacactttgaaacctcattaggaactaagtcagagcttttgtacaaggaagaacatatattaagcaacgtggcacgatcaaatcccactccatcactatgcatccgcataaaaacgccaatggcctttttcccaagattgcagcactgaaaagcagcaatcattgagttccaagtaaccaaattcttaaactttatggcttcaaacacagtccaagcttcatatgctgcggcaccatcatgacacctaccgtacatagagataactgcattcgccacatagatcgaacaatgtaaaccaagtttcagagcaagtccatgtacctgctttccaggctcatatcgacatgaagttaacacgcttgacagcgtaaactcgttagggaaacaatgggataacatagacgagaaaagacagaatccctcttgctcattcccagcctgtacatagcctgtgatcaatgcagtccatgaaacaacattcctctcaggcattgtatcaaacacctgtcgtgcgtataagatattcccacatttggcatacatattaatgaggaaattagcaagtataacgttctgtgaataacaatagggatgtgagagcatgtggtggtgcaagttgattccatcgaggagattgcgttgctctgcacatgcttggaacagagctgcgtaagcctgttgagactgaagctcgaccggcgcagaatagaataaggaaacagctcgacggatatcaccagaccttactaacgtacgcaatccttcaacaaattcgcgtttcagtgcagaaggtaaaacagaagagccaaagcgcctcaatgtcccaaaagagatttgagataagcttgtaatcatcgacgctcgaaattcattaccttgtttatgaagacaaattaagtaaccaactgtttcgtctgacagaaacaccttttgtaactaaactaatcggaattgtgtctactttattgtccctaaatcctctgtttttccttaagagatggtaagataaaaaagttaagaggtaaagtaaaccgggtattgctgcttgatcaagatagatcttctgcgattcggttgaggaaccaaccgggtagggtaaatcaaagctgtcggtttaacaagcggttaaagagcggaagttactattttgtagttagtacaatttccatatacgttatgtaaaatattttcgatacttataaattcataatttgggaattataaattgaatgtcagaaccgaaaccctaaagcgatagcggcgacttcaagctccaccgacgcaaactctttttctaggtcaagctcatagttcgtcttcttctccataattctcactgatttcaccaaagaaaaatcatggaagggaaagaaaactgcaaagatctcctgaaattggagctcaagaatccatcttcttcctctgctatggattcagcacttttgatgtgtacggataagaataagaagaagaagaagatggaggctcctcctccatcgaagccaacgattgctccagttcctaaaagccaacttcttggtaaacttaaaggcttcttgggggttatggcggaggctaacaaaaagtctgaggcaaacccagaagcttataatatcgaagcactaacgggtaacgaatctgaacttatcgagatggacttgatgctcggtgtcgctgatctcaacacgcctgaagcagtcagtgcggctgaagctgctattgccggcattggtccggccgctgaaagtggagattcgagcagcgatgatgagagtgatagcgaaagtgaaggagaggagagtaagagtgcagaatgtagcagaaaacgatccaagatcattgagctctcataaaataaaacatgttgtctcttctcaatttcaattttttttttaactttgtatgaaacttttgcaatgatgatgatggttctggaactattaatgtttttacgtgggttcaagttacttgcaaaatatggataaactattaatgttcacagtgacaatccataaaataaatcgagtttaaattctgaagagtgtgtagtatgtgatgaccttaacttaactctcttcgtcaacaagaagtgtggagccgtcgcagattccaacgtcaagtaatgttgcagtctcgtcatcgagtgctgtcggaaaaggtgagccctgccacggaaatataagattgtttcgttgatatgatgaagataagcgatacaacatacatatatagtcgaaactcgaaacgttttctttcaagttaatgattattaggaaaagatacctcttcctgcagaaataatcttggcttgatggacttgagcttgaaaaagttctcagataagatcttcagctttccaacctgttacaaacaccaatcgaaaactttcaataaaacggtacatattttccgagttttagacttcggattctcaatacaaaagaaaaaagtagtgacaaccgtgatactgcccggtaacttctttgtcaagtgaggtttttcacccattgatggaccaacgcatttgagagtaatggctgcacatgtcattgtgatttaaaagcaggttctatacaatcaatgaaccttaagtaagatacgcttaacgagtcatacagataagtccagatgctatattcttagggccgctgttctcagctgatgctctttcg

SEQ ID NO: 31113 - DNA, 3166 bp, Arabidopsis thaliana landsberg
  unsure (1)..(3166): unsure at all n locations
tatactaatagtaaataaaatcgtctctgagaacgaatttaatttatggggcacggacactaacgcatcaatatatactaaatactgaacacatgttaatttataaaacttgaaagcctatagtcaataaagaggttttgtgataatccaccgtttatcacaagaaacgtttgtgtttaaaagtagtgtattcctagttatataaacccatgattgccggaaaaaagagaagatatttatatgttaatcaggtcgttttcaaagtaaaaattaaagtgaagtaagaaaacaagaataatgcaatcccttaaccacaaaaaataaaagaataatgcgaaatataaagtaatcaatatttattaaaaaaatgaaaaatgtcgctgcaaattgcagacaaagaacacagactcttccctcctcatgtcatgtcaatgttcaacttcaagttccccactttaaccattggtcacactctcttttctctctctcttcatctatgaagttactcttttctacgctgtgtaacacttagtcctcttctcttctcttctctctctcctctcttggagctactatacactcttgagtcttgacaagtgtgtttttgtgtattgtctctctatcatctcccaaagtagaaaagctagaaaacaataaaaaggaaaaaaagatctcttccacttatatatctccccttctatattcttctataagcatcaaataaacttcacttctctctctctctttgcctcaccatttctgctcacaagtgtttgttagatttgatctgaaaaagatgaatctatagcttttatagtatcaatctcatcatcacaaccagctaagtttctctctctttctcactttttctccatttgctgcaattattgatcttagctcaagatctacaaaaaaagaaccctaatctctctttgatccatataaaattaaagaagaaaaacaaaaccctaaatcaagattcaatcttcttctacttttccaatatcaagaacaagaaaaggccatggatttgatctctcaccaaccaaacaagaaccctaattcctcaacacaactaacaccaccttcctcaagccggtacgagaaccaaaaacgccgtgactggaacactttctgtcaatacctccggaaccaccgtcctccgctctctctcccctcgtgtagcggcgcacacgtgctcgagttcctccgctaccttgaccagttcgggaaaacaaaagttcaccaccagaactgtgccttctttggcctccctaaccctcctgctccttgtccttgtcctctccggcaagcttggggctcactcgacgctcttatcggccgcctccgcgccgcctacgaggagaacggtggcccacctgaagctaacccatttgcgtcacgcgccgtcaggttattcctccgtgaagtcagagactttcaagccaaagctcgcggtgttagctatgagaagaagaggaagagagtcaacaggcagaaaccgcaaacgcagccgcctctacagcttcagcaacagcaacagcagccacaacaaggtcagtctatgatggctaattactcgggtgcaacagtatgatcatatttatataatttccccttttctatatgtattgtctcttatttgctttctctaagatattaatgtaaaaccttcttttacattatctactgatgcttttgtttctgtactagttgtttatgaataagaaaaactacgattatttacgataaagtgtttgatccattatgttcttggagttttcttttgttttcaattttaacatttgaaagatgattcgatgattattcttgatagttgatacacttagggctcgtgtgtattatgtgaccatgctttatgatttattagtggaggcatctttaaatatcactttgttagaatttagatcatataataatcatttatttccatgcgattatggttgaggttttaggaacattttgtagatgatcaatgatttgtatatgaatcaaattatattttaaaggtcaaaacttatatgtacttatgtattagtatgatcttctgtctcttgtatgattactttatgatatatactaataaacacaccatctcacagatatgttttgactataaaaattgtttctgtatgctctctaagttaattccagataattttaattgaaattagaatatatagattggtcgttgttaggtcttgtagtcccaaaatttgatgagcgaagtcatctgacatcctttctcattaaatgcctactattgttttgaatatggattcactgttttgactttctaggtcgctttaggattggactataggagctagccaccttataaattattgattctattttatttcagtgcattattgattgatgtatataaggattttgatcaattaggaaaaagtcctcctttttagtggcatttgtagaatttgtcagttttgctaaaatatttctgatttgtcatttgcttatttataaaaacataattttaaacattttgtttgggtttatttggttccaattgtttttaagatatagtatttgtttttaagtatgtattttataaattctacaaaaaacaatacatgtatgttataaaaaatcccattattatggttttgaagtgctaaaaactggcaaattcacaatgacattaagcaaatgacatatctaaacgaagttgaggcaaaaaaggcaaaatctgtaataatcccaagaatttttcttactacaatatataaaagaaaactatgagaaactatgatttactgttaagataagttcggcatcagaaagtttcgtaacctatagttatgagtcttggacaatatatgcaaaattttactttaatcaagattataataatgttacggattccacattttactgtacaattgtcatgagtcatggtcaaatgatactttacaatacaaacataggttataaagataaaatatcaccaaaacatctatagtgtttgatcattaactttttttcttttcttttccaaatacgtaacgctctgctataatcaaaagtggtaagattatatatgtaaaaagagagctgtaaagttgaaaacagcactatagaattggaatcaagcgaactttgcctttgaagntaaatattc

SEQ ID NO: 31114 - DNA, 5474 bp, Arabidopsis thaliana landsberg
gtccacgtatactgccacgtcacctataatttcccactcttttcctttttttgggaacttccttcattcacaaacgagttatcatttcgtagccaattaagtttcatcatcatatttaatcaccaaaaatataattcgcatcgtcgttctgttttcttgagtcactaatggatcaaagatcattagaagctgctggtaaatctggaaacatcgatctactatacgaactaatccatgaagatccatacgttcttgataaaaccgaccacgtgcccttcgttaatactcctctccatgtggcagccgtcaatggaaaaacagagtttgccatggaaatgatgaacttgaaaccatcttttgctcggaaacttaacgccgacggacttacaccgttacacctcgccgtggaacacggtcacttctggttagtacttgaagtagttaaggttgatccaagtcttgttcgtaataaagggagacatagtacgtacactcacttatttgttgaacccttaattatgtttcttagttttttccaaaagctttagctctaatcaatccgaactaatgttataatatgtatctagtaaattcaaatcttggagatagtattgaagtaggacgaatagtccattgaatgctagtttgaattcagtctattgttgcttttgactagtcattatgtcgatattgtatggtcagatcatgaactagattggttataccaggagtgttaaattcatttttcttgtccaaaaaaggtatgacgccattgctagttgcggtaagtagaaagaagattgatctgatgtcagaattcttcttgggttgtcccgaaagcattgtggacgcaaatgtgaacggagaaaacgctcttcacatcgccgtgaataactacgaccaaagagaaggattaagcgttcttaaagttctcatgggatggatcttaagattgtgtcaaaaagatgcagagtggatcgagacaagagtcataaaccgaagagacaaagacggtaacacgcctttacatctcgcggcgtacgagatcaatcgtcaagctatgaaattgatgttagagagctccaagattaacgtcaacattgagaacaagaacggtttaaccgttctcgacattgctgtgttacacaataacagagagatagagagaatggttaagagacatggtggaaaacgttcggtttctcttgtcaagattaagacaacatcggatatactcgcgtcgcagctttcttggagagaatcgagacggacgaagaagattcggttttattcttggatctctgaagagagaagaaacgctcttttagtggtcgcaactctcatagttacagctacttatcagaccgttctccagcctcccggaggcgtgtctgatggcggtggtcaaaacagtggaacaagcggtccgaaagcgggttcagtggttatggacgaggtctactttatctggttatggctgtggaacagtgcggggttctactttgcgattgagatgatgatacgtttgttgagtttaggacaagagagtatgttttggtattaccctctgttcgttcctatggtcttggcttactctgttgcaggggatgtgatcaagccgaacgcaagagcgtacacgatcgcaggtgtgggtgcgatcgtggttcttataattaggggattggtagtttggttttgggaatgggtgcagtctaagagaaccaagctacgtggacccaagagtggattggtttgggaaggtttcactacgttggatcaagctagaggtgttgcgcctaatcggtatgtgattaggtaatcttaatttcctcttgttattttattgttgcttttgtatttttattctataatgtgtaaaatctctactcggggtacatgaaatatctgtttattatttgcttctaatatttactctacgtgatttgatgtgcataaaaagactacatgattgacaagagtatacgttgctagaaagtggaaggtgtcgtatgacgcattctaattcgaatgtaaattagtaaaataattactgaatctacaaaaatcatgattttgaggttttatggtcacagttaaattaacatggcaaacttgtatacgaatcaaaaaaatattgaaccatgttatatttgaattctttttcaatatatttggtttcgatttatatttttctaaaactatatatagctttaatattaaaatttcaaccgcactcttctttttattagttatttatataattatgcaaatatagcttgagaagcacttcaaaaagtgtgactgagtttttaagcaaagtgcaattagtcttttgtctgaagtttgtcctgcagacctcaccacacaatcacttaagtactcatatatacaaaatggttttataataatagattaacatgtacattattgaaactaaacaccaaactttcggaagtatattattactatgaatggacattgacgcacagaaaaggattcaaaccaataatggatattccttgttaatatttctcaaattaaataatatattttgctggtaagaaatatgtctatatatatataatattgtttagtaggtgaacaaataatatatacatagctatttttgtttttaagcatcaattacctcaagagaaaatttaataagtggaaaaagtcagaaaaatatgaatccataatataagtgattaagtgtaaaggttggggaaaaaacgctaaagagatacaaattgtccaaaaaaacaataaaaaaggtacttcctttttttatattgtggagattggtaagtcagttatattttcttcaatgtaagtaaacaatagacaggcaataaatgaatttatttagtttccaatataaaatttgaatatgttttaatatacaaaatagtaacaatccataaaagaaatatatatttatatataatttacagtttattttgttgactgatacaaacatttttcatgtttttttggcaaatacgataaagtgtatttaagttggtcgaaatccaatcaatggaaatatgtcaaatgtttaacgtgtcttgaagactttttacaaaaacctgccaaatattgtgagcccatcgttttttctacctatgtcattcaatttttaactgatagtgttttgttaaatttagttaagcaatactaataaatactaagacttttaaacaaaaacctgccaaatattttgagcccatcgttttttctacctgtacatcatttaatttttaactgaaagtgttttgtttaatttaattaagcaataataataaataagtaaccaaaaacactttaatatctttgacggtttcaagggcaatttaggaatctcatgacctatataaactccatactcaccccgctattcttctccatcgtcagatttagcgatttcacctccattttcttcgatcagtgctagaaccagagcctacctagctcgcaccttaaggtatcatcaattctagcttctctctttcttaatccgtgtcacgatccagttttgtgtttaatcgcgatccgatctcgggctttatctcctgtttcgatttggatctactttggttggtttaattttcaatatagatttggttttgaatgtttgtgtgtttattaaccttcttctgtgattatattgagagttaaccattttctgcattcaggctcgatctgtgtcggtgatccgtagaaaattcacgtaatttcatttctcattttacgttattcccaattcctgaaccgggttctgttgcatgtaccagatctgagattttgatttgaatttcttgcagtatgtgtatatttttcgttgaatttcggattgttaagcatgatcatgagtatttgatctctgaattggttgcttcacctaacatttgggtcatgtttacgttaacgtattctctgtgtatccttttactcttacgaaaccggatctgagtttttgaaaattgttaaagtttagtttttgcttattgtagattctccttttgaatgcttttaactttattttgcatatcaatttcttctctacaaagcataaacttttgtgcactcacttatggtattgattacaaagagatttgaagtttgaggttaaactttttggttttttttcacaggaggtgatttagtttacaagcaaaatggtgaagatttgctgcattggagctggatatgttggtggtccaaccatggctgtcattgctctaaagtgtccatctgttgaagtagctgttgttgatcctcttgtgtcaaggatcaatgcctggaacagtgatcagttaccgatctatgatcctggtcttgatgatgtcgttaagcagtgccgtggaaagaatctcttttcagcaccgatgttgagaaacatgtgagagaggctgacattgtttttgtgtctgtcaacaccccgactaagacccgtggtcttggagctggcaaagctgcagatttgacttactgggagagcgctgctcgtatgattgccgatgtttcggtttccgacaagattgttgttgagaaatcaactgttcctgtcaaaaccgcagaggcaattgagaagattcttacacacaacagcaaaggaatcaaattccagattctgtcaaaccctgagttccttgctgaaggaaccgctattgaagaccttttcatgcctgaccgtgtcctcatcggtggtcgtgaaacaactgaaggctttgcagccgtcaaagccttgaaagacatttatgcccaatgggtcccggaagagagaatcctcaccaccaatctatggtctgccgagctttccaagcttgcagctaatgccttcctagcccagagaatctcatcagtgaatgcaatgtccgctctctgtgaggcaactggcgccaatgtctcagaggtctcttacgctgtgggcaaagactctcgtattggtcccaagttcttgaactctagtgttgggttcggaggatcttgtttccagaaagatattctcaacttagtctacatctgcgaatgcaacggcttacccgaagttgctgagtactggaaacaagtcatcaagatcaacgactaccagaaaacccgatttgttaaccgcattgtctcttcaatgtttaacacagtctccaacaaaaagattgcggttctcggctttgctttcaagaaagacactggagacaccagagagactccagccattgatgtctgcaaaggtctgttaggtgacaaggctcgtctcagcatctacgacccacaagtcactgaagagcagatccaaagagacttaaccatgaacaaattcgactgggaccacccacttcatctccagcccatgagccccaccactgtgaagcaagtctcagtcgcttggaacgcacacactgcaaccaaagacgcccacggtatctgcatattaaccaagtgggacgagttcaagaaacttgatttccagcgga

SEQ ID NO: 31115 - DNA, 1094 bp, Arabidopsis thaliana landsberg
tatactcctatttccccctgaaaggaaagttccatagctatatgtccccgaataaatagttcatgatccataaccccacggaactgggtttagtcggtttactctatatcttaccgattgataaaccaactaaacctaattataaccagacttaaccgtaattcagccgtttttaacccgatttcagttctataaccccataaaaaattcccaaattgaaaatattaaaaccccccaaaatcgacgaaccctagagagagaagagatttggtggataatatgtcgttgatgttgctgtaatggttagattgagtttggaaatgttgggttgcgaattgtttttatcgaacaaattgaagtatgagtggtggggttccttttcagccatggtgtgagaaagaagaagacgattttcaatatccaaaaaacacattaatacccactaaattgttacaggaaagaagagaagtgacgacttgttgcaggaaaaatgagtggtgatgtggcaaaactctcacgtgacaaaaaatcttgtgttttccttttttctaaatgctttccttttactataatggcaattgttgttagcttctcattcattcatgaacacgttaagagttttatctctcttttctcaattctgtgaaacttggtttttatatcaataatttgctagagctatttcttctttcaagctctttcgattgatatctgaattgttacttgcataaaacaatacacagttttataaagaagagacaaacgtcttaaaaaaagtcgagcttactgtcacataagcatcatcaccaccattgaagcaaaaaaccaagcttggaaacagagaatttcacaatgattgaaacagagatatctaacactacccatcggatgaattgagtgcgtgtgtatgtccatgagtttatttatgattttcacgtaaatatatgggtggaattaacatgttttgtcttgttctctttggggattttgaattttagggtttaaacgcatattgggtcgggttcaataagcaatcagttttttttttggtttagttactatcaataattgatttggtctcgggtttatgcatc

SEQ ID NO: 31116 - DNA, 2576 bp, Arabidopsis thaliana landsberg
ctatgtcaaggtttgtttaatcaaacgggcttaaccactttcgtgggtctttcatgatttctgatcggatttttgtttcgcatttcctcggagactcattttatctgtaaagtttcgacatttacgagtttcaatggttcatacgtcttaatgttgatcggatccttctgtatactctcttagctgcttattgcttactttctcatcattgatttgttgttgttattgcagagttttgatctctaaaatcgttggaaagcaaacacaatctcttgtctcgaaccagaaagatagagtgtctcaatggggaagctatagaactgcttttacagctgctctaaggtcgcctcagctcagaacttactcttcatctggtaggattccgagtaatgtgtattgtacttttgcctttagagatctcaaaggaagttttttaagtaatcatctgtctcgaagttatactactgcccctgcaagaaatgtagttagtcatcatgcccaaattgcttggagaaggcttcattataagtattctgagcgtattagtaccattgctcaggcgtttagcttgtctcttacccgttcgcacttgttaatacctgggatcgttgctgtcacttgtggacaagtagcatgggcacaaagagctcctggttcggggataaatcactatgcttcagataaatctctctatacaagggctaagaatggtcctatctttctgtcttcgttattgttttcggttatagagggttttatcttgattgggagggctttttatatagcttgtttgtttactcctactattctgatggggctggttgtggaatcatgtgggcctcgttttaggaaaatatggcttgagatggtccatcgaactctggaaagagcaggtcctgcttttatcaaatggggtcaatgggcagccacgcgacctgatctattccccaaggatttgtgttcacagctctcaaagcttcacagtaatgctcctgagcatagcttcgcctacactaagaaaactatcgagaaggcatttggtcgtaaactttctgagatatttgaggagtttgatgaggtgccagtggcatctgggagtattgcccaagtacatagagcttctttaaggtttcagtatccaggacaaaagtccaagtcttcgctggttgcggttaaagttagacatccgggtgttggtgaatcgattaggagagattttgtgataattaatttggtggcaaagatatcgactttaattccagctttgaaatggttgagattggacgagagtgtgcaacagtttggtgtcttcatgttgtctcaagttgatctcgcgagggaagcttcacatttgagtcggttcatatataacttccgtagatggaaggatgtctctttccctaaacctgtgtatcctcttgtacatcctgctgttttggtggagacatatgagcatggagaaagtgtggcacgttatgttgatggaatggaaggacatgaatggattaagactagattggctcacatcgggacccatgccctcttgaagatgctcttggtattaacctctttgtatcttttgtataactgatatacgcttcatcaatgctcttaatctcaagtgaattgttacttcaggttgataactttattcacgctgacatgcatccgggaaatatccttgtccggaaaaaggcttcccgtggaggccttttcaaaacgaagaagcctcacattgttttccttgatgtgggaatgactgcagaacttgcaaagaatgaccgagagaacttacttgactttttcaaggcggttgcgcgtagagatggccggactgctgctgaacgaacacttaaattatcaagaaagcagaattgtcccaatccagaggcttttatcgaggtaatactatctttgctctaaggttctttgtacctcggaaaaacagtttgagttgtcaaatatatggaagatatctttcaaagttcttttatttgtgatggctaataatctatactctgacaggaagtagaggaagcattcaaattctggggaacccctgagggagatttagtacatccagcagattgtatgcacgaattacttgagaaagtaagacgtcatagagtaaatattgatgggaatgtgtgcactgttatggtgacaacattagttctcgaggtgacccaaaatcgtccccactttcaaattttagtgtagattttagatcatgctaagtttgatggaaggtttaaaaagaactaaaaaaagctaagcttattatagaaccagagcttaaagctgtagccattaaaactgtttttagcttagagaatggtttctatagccttgtttgattcaaaaactgtttataactccagagatattaagtttactttcgaactaagtaattggtttgattacagggttggcaacggaaacttgacccaggatatgatgtgatgcacacgttgcaaacaatggtgttgaaaaccgactgggctaagtctctttcttatacggtggatggataagaaggcgccgtaggcgaagaaaggttccatctttttaaattt

SEQ ID NO: 31117 - DNA, 5804 bp, Arabidopsis thaliana landsberg
cagctgcatctcattgtgtttcagtttattcatggtttacttaatattcaagggagataatcacgggtgctggtcatacaagtgctattgattggtgggcactgggtataatctgccactatctttaccttattttgatcacaaactgttattaatatgctcatctccttttatgtgtgtttgttgtaggtatcttgttgtatgagatgctttatggtcgcacacctttcaggggtaagaataggcaaaagacatttgccaacatcttgcacaaagatctcactttccccagcagtatccctgtgagctaccttgtaacaacaacctgtgtgtctttcccaaagtaaaaaaaatactaatctaaccatatgtgtttgtgcaggtgagtcttgtaggtagacagttgatcaacacgttgttaaatagagatccgagcagtcggttaggatccaaaggtggggcaaatgagataaagcagcatgctttctttcgcgggatcaattggcctctcatacgaggcatggtaggactaataatcgttatttttatatcaatcagccttttccgtgtttgttgttggctgatataatagagtgattgcatacagagtcctccaccactggatgcaccgttgagcataatcgaaaaagatccgaatgccaaagatataaagtgggaagatgatggagtgcttgtgaattctacggacttggacattgacctcttctaatcctattcttcctctctctgcctttgattctcaaattatgcaaaactcttcttctcaataaaagccaaggtgttgttgtacttgtagttgcttaaatataaacggctcttttcatgtttttccatttcttctaatcaacaacaataaacatacaaacttaagagccatgttaatattcatgttaagtgtgataagcccattatgaggcccataactagcccactagtagttgggagaaatgtctttgagaagtccaaccacctgctgcatcgtaggtcgcttccatggcagatcggcggtacacaagtaccctatcttcaccgcctccgcgatttcatcctccggaactgtctcttgcatcgtcggatcaatggctctcaatccttgtccctgcctcaccaaccctctcacccaattcaccaagtcaccctccggcttcttcccactcacgagctcaagcaaaacaactccaaagctatacacatcggattctaatgtcggagaagcatttcgctcctgttccggtggtgtgtacccgtctaaactttcggaaccgggaaattgctcgtccaagagtttaactaaaccaaagtctgctaagcgtggctcctggctagagtctaacaagattgttgcagccttcacttctccgtggaccattggaggaatgcagccatggtgaaggaaagctaatgccctcgctgtccccaaagctatcttatgccgaagtctccaaggtgcagaatcatctccgttgttatggagtagactttgcaaattaaccatgtctaagtcctcgtagattgcaattctttgctctgtcgctatacagtatccacagagcgggaaaagatttgggtgattgatcctagcgagacgttcaaatgcaatcgagacttcagtatcagtcaatgtggttccacttgggataacttttagagctgctctgaatccaccgggtaagactgctccgtaagtaggaccagacttgccttcccacaacattgtgcctctgtcgaagttgaaagtcgcagcctttaggtctgcaagcgtcattttcattaatggcttgtcgatcattaccacagggatttgcgttgcttgcttgatatcagtggttgagtcgtgttggtctggggagttgggttctgtgttgtttatggctagctttgttgcccaagttcttgattttcttctaactctcaaggctacaagtatgagcagtagtcctataagtaagaacgccatggagattgctaaccccaaaccaatcttaagcccttgtattcttcttgttgactttctttccttttgtaataattggctttgcagcgaaggggcagttgtttgtaatattaatgaaggatctctggattgtttcttgggagaagttggggttgcaaaaggttagattgttgaaagagaagttaaacctttgcatcatggcgagtttctccaaaagcggccttgggatatctccgtctagcttattcaacgagagatcaagtacttcaatgttcttgacgctcagcataggcacgtggccagtgagattattggaggagagatcaagaaccttcagatgactcagccgcgagatttcacgcggaatgatattagtgagattggtccttgatagattcagataatgtagcgcagaaagcttgccgatttctgggaactcttgtgccctgaatcgattgcacgcgaggttaaggtgtcccagcttgtgagctgaactcaaaccattgaatatatggccgacaaagctattatcggacaagtcaagatgaatcagactagaccagttgtgtttgtggccgggtattaactgcaagatatgcccatcaaatcggttttcactgagatcaactgtttccacgttttcatgcaagactcctatcaatgaaccctgaaacagatttcgtgaaaggttcaagctttttagtagtgggaaagctgaaccaaaaccgacaggcagagactcgttgaggcggttggatgagaggtcgatggagagtagagatcggcaatggacaagttctggagggacgccaaactgaaagtcattgttgtggagcttgagagttgttagattgacaaggttgcttattgcggcagggattttgccagagatgctgttgaaagaaagatcaagggtgtgaagcgacatgaaattgccgatgttgctgggaagaggctcagaaatccggttggaggagagattgagactctcaagcaagctgagactccacaaatccgaggggagagacgtaatcttgtttccactgagatctaaagtttggagcttactcattttgccaatagtgttgtcggggatcgaaccagacaggtccaacccagaagccgaaatatgcaacacattctcactagagtcacagacgaccactcctggccatgaacacaaggaagaaaacgtatgagcttggggagaattgggtaatctcattgcggagaagaagctagagagatgataagcgtcggtgttgggatctaggctcgtcagatgcttgacgaagaaggagaagaacaggagagatccccatagagacaacctcataacttggtggtgtctgggactggagaaagttggatgggaaagctcagaaagaagacagactgtgtgaaaagaagaaaagacataatggaatcacggggcatagaggtgatgatagtttagaatacattgaaatccctttcacgtgcacagcttcaaaaaaaatcagaacttttagtcagaaagctatgaaatttcagaagaagaagataagagttgaatagtttgggggagttccggagttgagagttgagtttttggttgtatcgtatatggacactggagaaagtgggaagagaagagagagtcgttgaaagtcaaaaaaagggatatgtggagattataattaggtaaagtatttcgctagtgagttataagaaaaatatgataaatggaatctgtctcagaccttttgtgaatttttccaaatcccaaagttgtcaatggatttggtgagtggaggagtgggtggttgttgtggtttctcatttcagtagtgttttggttattaatgtaaaaattcacttttttaggggttttcacacttttttgactctgtcacagataccttggaaattgagaatcattcattcctctgattagcccctaaactggcgccttaatgtccgcaaataagagaaaataaaaacaagagccatcaatgtagtttaaaccaactcatcagattcatagctcattttctggataaaaatagccactcactattttaagcaatcttatgctaaaacagagctccaatagctatctgagtttcatcggattcaaagactgaaacttgcaattagagagaatgaagaaacaatgctagcaaaacagagtcgagatatcacaacttgtgcgccgaaaaggaaaagcccattaagaggaattaaatgggccgagagataaatgccggttcgtccgtagatgagaagacacgtgtcaggtcgggtagagagttggcggctgatcgtgggatccacgtcatacaacgcgccagctgaccttttcctctgttcgaagatcaatcaacatcaccttaacagattcataccaaaaaggagcatctttcgctacaaattctgtaatcaaacgaaaactcaaaagttgtcgatttttgaaattcgaagagaggttttaagactttgataaaatggcattgtttcgcaaattgttctaccgcaagcctccagatggtttgctcgagatatgcgacagagttttcggtctgtttctctcccaattctctgcttcatttatctatttttccttagctcattgtacttgttcggtcttctgggattgagtgtctgaaaagttgggactttttacgctaatttgtctgaaatttgggagttttacaaatcaagatatgaaatttcattttatcatgattggcaaaaaacacattgaactgaaaaaagtttcttctgtgtgtgttgcagtgttcgattgctgcttctctaccgattcatgggaagaagaaaactacaaagtttatatggcaggagtagtcaatcaactacaagagcatttccctgaagcatcttctcttgtgtttaatttccgtgaagtgggtactcgaagtgtgatggctgatgtcttatctgaacatggcttgactataatggattatcctcggcactacgaaggctgctcattgttacctgtggaagtgatgcatcattttctccggtcaagtgaaagttggctctcgcttgggccaaataacttgttactaatgcattgtgaaagtggggcttggcctgttttagcttttatgctagctgccctccttatatacaggaagcagtatagtggtgagtctaagactttggacatgatctacaagcaggctccgcgtgagcttctgcgtttgttctcgcccttgaacccaattccttctcagcttcgttatctacagtacgtgtcaagaaggaatttggtctctgaatggcctccattggatagggctctcaccatggattgtgttattttgagatttattcctgatgttagtggacaaggaggctttcgccctatgtttcgaatatatggtcaggatcccttttttgttgatgataaaaagcctaagcttttgtacactactcccaagaaagggaaacacctgagggtctacaagcaggtatttctcagaatattcatagcgttcttataattatgacctctgactcagcctgtgttacattgcatctgaaggtcttagaaaaagaaatatatttgatcactgattagccctgttggttttttgtttcttgtgcttcttagctttctttttccttgtttgcaatatgatttaatggcttttcgatgttgtttactcaactctttgtgttttgcaggcagaatgtgaactagtcaagattgacattaattgtcatgtgcaaggtgatatcgtgatcgagtgccttagtttgaacgatgacatggaaagagaggtcatgatgtttcgagtggtttttaacactgctttta

SEQ ID NO: 31118 - DNA, 3489 bp, Arabidopsis thaliana landsberg
ttttttccctctatcgtcgatgtatatatttttgcagatggggaaatcgatggaagtttgtaagaagtgtggtttttgttgatgtgtgagattgattcagaggacacaaagcttctgaataagaacaataaaaagcttttgccatcttttctttttcttgtttccagtcgtttggacaagtttacaccaaacagtttttgatcaaagattaagtgcttcacgacatagtaatcagagttttacaatgacacatctgctaccccactactaaactaaataactcacggattatacttaatgctcccaggggactaatcagtgccggtccattccttccagtccttgtctacatgatcctgagcccatttaatagctgctcgggcggcttgtggacctccaggcaattccctttcattgagagtatctgccatgtcaatgaaaggtatcaccaagagtgtaccaggtcctccatactcactgcgcaagaacgtctcgaagatctgtcaataatcacaatggtgcagaacaaaaaactgttaaaactccctgagtctcatgccaagacatataacagacttagagaatggggtttaaagtatcactcatgaaacaaaaacttacagtcgactcattgtaaaccatacgtagattaatatcctcaccaaagcatcattactaagaccacagcatctcattttcaaacaatacaaactttttttcactgagctttcaagatgggttcaaattgaaaaccactccttcacattctaaaccgaatcacatgaccctctccattctaggccttaagctcgactaagtccaagaccacaaaatcactcctcaagatttaaggaaaatgcttgcataatcacaatcatacaaactaggaaaacttcgatcaaacatcaccattgcaattccaaaactagcatattgacagtaaaagatgattacattacctaaacaatttcagatcaggattctcattcatcacaagaataagagatttgaggcatgttaagaaaatatcagaaactgagactaaaaattacaccacttttgagttctttgaaatggaacacaattactaaaaacaccacaattcaagacatctcacatagacacgaacagatatacatgagtgaaggtgagaagatttgagattacctcagtgcagactccaacaatttcatcaacagagtcttcaaaaagatctctttttgatagtttgattaacatatggtccctaaatttctcagtctcctggttatatcacacatcaattaggtttcgatcatccatcaaaaatgagttgacgaagaagaggaaatgagctcacagcttcggcgaattcaggtatggcatccggaaacttgtactcagcagctctgcaaacgaaccctctccgggacagtgaagatagagaaaagtccctcactttggttctacaacgctgtttaaaaaactgggtcgatttgattgcgcaagatactgcagctggtgaagagataattggaagagcgcaacggaaggaaaaagaagaattgacttgaagaagccgagaagagaacagagcttcgtgcattgaagccattactaagctttgcttcactcttcaaccttatctcttgttttctgcaataaaacagctgagggttttagcgaggtttcaattaaagggtgaaaatgtaagaaattgaaagttttgagggtgaaaaaaacaaaataaaaaaaataaaaaaaccgagggtaaaataaaaagaacctgtcagaccgccgtgcgaccaccccggcaaggaagaccaagccgagtaacgatcctctacagcaccggatgcgtccgaggacgatcgtagccgtcaatcacgctctagccgcacggtcatggttcatcaaccagggtaaagggcctgtctcttgagaaatcaaggaaacagaggtacgagcctatagaacagatcctgttcaagtaaggtcgtgaccatctatcttttgtgtccttatatatacaaattggttttctgctggcttttcgatgtgggacatttgacactcttatttccacacttaatccaagtatcttatgacacgtgtaattaattatttagtaaaggaattgtattttaaaaaaaaattgagatcccaagtttcctcagtaccataggtttttttagtttaccttaaagatatcccctggttcctaatacaagtacattgcattgcattatatgtaacatctaaatcagttgtccatggatatgcaattacaaaaaggaaccgattacttaccatacagaacctattcaaaaagaaaaaaaaaagatttagtaccaaaggctgtgtgcctgtgatgccttagagattcctctcgtgtggctcgagccaaggaaatcctaagaaatcaaaaacttgtttctccgttgagagtttcagacttgcagttcctctagcaccctgagagacaaacattatcacagcttcaacataatcattctttcactttaaaacccaagaattcacatcaagttaattcacttttctccctcccttacccggttaccactagaactgtgagtagctgggaatagtccagtgtcgtcaagtcgatatcctttcgattctgctagcaatctcagcctgcagttatcatcgcatatatatatacatatgctgtgttctttatctaccaacaaatgtgtttagtgagacatgtatacaaatgaaatcatatccataccttctgttcaacacgtcgttccctgtccaggctatgagtccaaacgaatagatatcccttggatagacctatgaaaaaagactatttattgaatgatcttccgggaagagatcaacctagacatagctgaatcaatcatggtattgtcctttttatctttgactaacccacttagttcttttttgcattgtgtgacattaggagttttcaggtgttaccttaaaatcgatacggcgccgtagctcctgaccaggataagtgcacaaaccaaaatacgtgtcaacgcctgaatcagtaccctgcacaataagggaaatcattgaggagctgtgattgaacaagaatttttgttacacatgcaactctgagagaacaaagctttatctaatgctaaaagagatcattttataagatactgaaacaactgaagtaatgtgttttcaatgaagatgagatcctctcttaaataattttatcagatcatcttacctcttcactgtgggtgctgaagatgagatcctcccttaaaaagttcatttcttttaaacgctttacaaactttgtcaaaaatcccttgtgactggtcaggacaataagaaaaaacagtttaagtaaactttgttacaggaaactaacgcaggaagatgaggaaagaagattgtaggtacctttgtccatcaggatgggtgacaacgatatccagatctccacaagtcgctttcccacgtctatatgatcctccacatacaata

SEQ ID NO: 31119 - DNA, 1348 bp, Arabidopsis thaliana landsberg
gtagcagtgcaggtgacctatgacaaaatatttggctatgactccgacatcatcacatccataaccttctctacattcaaaggaaaaacctcgccaccctacggattagataccgaaaataagtttgtactcaaggaaaagaacggtggcaaacttgttgggttccatggacgcgctggcgaaattctatatgctcttggagcgtattttactacaaccacaactcctttgactcctgccaagaaactaccggctgttggtggtgacgaaggaactgcctgggatgatggtgctttcgatggtgttaagaaagtgtatatagggcaagcccaagatggtatatcggccgtgaagtttgtgtacgataagggcgccgaggatattgtaggagatgaacatggaaatgatactctactcggatttgaagaggtataatacttcttgctttcttctcttgtggttgaatgtgaaattttttaacaaaaagatatgaatatcttacacaaaatatttttaactaactcaattgttttatttggtttccatcaattgcagttccaacttgactatccaagtgaatacattactgcagttgaaggcacatatgacaaaatatttggttttgagactgaagtcataaatatgcttaggttcaaaactaataagaaaacgtctcctccatttggaattgaagctggcacagccttcgaactcaaagaagaaggttgcaagatcgtcgggttccatggaaaaataggtgagatgcttcatcaaattggggtccatgtcctacccattacagattgagctcaaaatgaaacattctcgagcaagtttgttcatgttctttaattatctcctatcatgtactctactacgtattatttccttatgctttatggcttgtacgtattccccattttcatgtaataataaaacaaagattgcttttaaaattcagttctttaaaatttaattctttagggaattagatttgaatccagcaggtaaaacttaaataacttatttccatttcaaggaaaagtattcttcttatggaagaaactacttaaaaaattggttatcaatacaattactaataatgagagttatcagaattcagaagtaaacaaaaatcaaggaaagttatacagaaaccaaaagcagagctagaaagcttacgccttaaaatgcgacagttttgaagtcatgtcagcctttaattgcatacctcagcattactttcgtcgctgataagaaaaaagttgctttttacgttcttcattcgcgagaagaactgaagttgttactagatttgagtatttcgctgtcgtgtatttacccaaca

SEQ ID NO: 31120 - DNA, 4444 bp, Arabidopsis thaliana landsberg
ctcatttcgccgaatatattaagaaaatttatacttatatacatttccatcgtcttggtctcctgtgatcgaagaaaccataaggtgtaatcacatccataacatgaacatgaagcttgaacctgcaaaagttatatgtgctctctaagaataatttacaataataaaataagtttaaaatcaaatttaagtacatgaaaacctagtttctcataaacctatacatgaacaatatatagacgaatctccacatatttaactatatattgttcatgaatgcatgatctcttaacctggacgcatcatacgtctttgtaagatgtcaagtctctgagatatgcaaatctagtagccgttgatttttagaaatgctttcttattgtgttaaaaggtaaaatctgtgtctatgtgataattttatgttagcaaaatgaatgctactgtgatttaacatgtggagaaattttatttttacaaaatgttgtctatattttatggatatttaatcttatatttaaattatatgattttcatttaagtattctttataatcaaataaatagttagattttgttgtctctttgctgcacttgtagattaatttcaaaaacatcaaatatgaattttaaaattttgtaattttagtagtaaaaagtaaatctctatattacagtaaaacctctataaattaataatgttgggactgcacaattttattcatttagagaagttttaatttatcgataaatattaatttatagatagatttttctaatttagtaacttttcaaaattttctataggattttttcattatagaaaatatttttcaaaaatcaattacaaataaaaaataatatcatgtttagaaaaaaacaccaaaagtttttgataaaataaaatactagaactaaaatttaaataagaataaatacaaatttaagcaaaaaatattagaattatatttcaaaaaaaaacttacatataatgtatatatataattgatatatttatacaattattaatttatgatattgatgggaccatatatttacataagactttcaaaaaagttattatcttattaatttatcgatttgtgtcactttttatcctagtcctaactccgaaaaaatttattaatttatagaggttattaatttattgagtattaatttatagaggttataatataaatagtataaattcattaataatttgcgaatttctgtgtctttgcttctttggagaaaaaaaaattatatgctaaatcaacgcatactagagttgggagttgggcctttaaaataataagtgggcctttaccttgtggacttaggccatatgagcccgagaaaatagattaaaacgattggtgcctttggaagcgacgacttcgtttgacttttcaacttaacgttttcgtctcaaatatagccgtagacaaaagacgattgcgtcaactaaaaggttaaaagagacagaaaattttgaacaaacgtttcaactatatgtgaacaaaattttgattttttttcccaaaattcccattgcatatggaaaaagatttcgatttggaccatgattttttttttgttgaattaatgttaaatagaccatggatattgaatttcttttgtgagtgtatgtatgatatgtaaaagcttcaaattgtgaaatttacaatccgtttactcctttgatactatatataaaaacaccaagttattgcaagatggaaggattaagaatttaagataatggccggccactgacaaagaaggttaaactttcattaggacaatgaaagtttaaaagaataacaaaaaaagaaatgcgtgaataaatggagatagcagtgaaatctataaatatctgcataatggatgttcacgttatagttcaactaatgaagctaaattattatttgcgggaattataaatacttctaaataattatgttgacttgcaacttaataattaatccttcattttcacaacacatacagggaactttgcttggccacccagacatattattatttcaataattattcaattgctaaaaaatattagaaactcaacgggcatatatgaagtatggagcctcagtttctatataaagcaactctgccaagtgcattcctcatatacaaaaggaagaaacacttaaaagaaaatatcaaatctaaagtcgatcacatggctaataagagtttagagattcggtttttatttccacttgttttgtttttggttgtgaaattactttgtgttgatggtaaaggattcaataataatggccataagataagaaaaggaagatgggaaggtaagctgaagatgaacttctatcacaatagctgccctggagccgaggatatcgtgaggcagatagtgtggaagaaagtcgaagcaaaccgtagcctggctcccaagttactgagggttcattaccatgactgctttgttagggtatgatgtgcatgtagggttttttctttatgtgaacatctttcttataaagataagtctgatgtggatgatttttaggggtgcgacgcatcgctgcttttagattcggttgctggaaaagcagcgtccgagaaggaagcgagacctaatctctcgctatccgggtttgaaatcatcgatgagatcaagtctattctcgaaaaacgatgccctaacaccgtctcttgcgctgacattctcactttagccgcccgagatgccgtctcttatgaagtaatacatatgaacaaactcgtctaaaaaatttcatgattagaaatcaaaaatttagtattttactagtcgcatatgttagttttagatgtctttcttatcaaatgaaaccaataatcaattctaactccctgagtttctatgtttgatgtgttatagtttgaacggccgctatggaatgtgtttaccggacgtgttgatggaagagtttcattggcaacggaggcggccagagacttaccatccgctggggcaaacttcaccactctacagaaactctttgccgagagcgatttggacgtcgttgacctcgtcgctttatcaggtttaccatatttgatatttcatatatcattttttggtaatcacatttgcatatacgttactgataagaaaccaagtgaattaaaagctaaccaatgaaaattgggaacaaataataaaactaaagaacgcataaaactataagaaaatcgcgggaatatcagaccacgtgcatgtccatgttaggaagtgtatgggatgctacaaattaatttcctccaatcttcaagaaaaagtataatatccgatcgtatatataccatcaaatatttgaggataatcttggaaaaggcgttgcacgtgataattattcaaaagtcaattaatcttcttaggaatgatacactaatattttcatataaatcattcatttaatcacctaatttttcgattatatattaaaaagaaacgaaattgtatgaaaaataggagcacacacgataggaatagcacattgcggtgtgtttggcagaaggctcttgaacttcaccggaaaaggggacacagatccttccctaaaccctagttacgcctccttcctcaaatccgaatgctccgacaaatctttaagactcaacccttccgcagtggtcggaatggaccctactggtcctctcgcctttgacagtggctacttcgtctctctactcaagaacaaaggactcttcacctccgacgccgccttgttgactgatccctccgccgctcacattgctagtgttttccaaaactccggcgcttttcttgctcagtttggtcggtccatgataaagatgagttccatcaaagtccttactcttggagatcaaggtggtgagattcgtaaaaattgtcgcctcgtcaactgataaattttcacttttttttttatcttaataccgtataaatttgattatcatgtaatcatcatttgagatatgtttttcttaattttattacaatactaagattttaatgatccatatatatatttaagtggaattgtatgtttccaatttatctgtttaattaccacttctatgtctttttgacaaggcccgtactttagcatgtgtaagtagaacgatgtccggttaaaaaaaaaacagtgcagtctctatataaattgaggtcaataatttaaaaattttatttattcacattaaatacactttgaaaacttcttttaaacatggcttataaatagtttgaagaaatctccattttattcaaatccgaaaacacagaagatacttttgtaaccataatcacaaatacatctttatcttaaacttgagatgttttattcaacaaattaaaaacaagtgagaaacaaactttaaaggatcgatcgctcgatgggtctcatgcaaatcatcatgctgctagatgt

SEQ ID NO: 31121 - DNA, 2388 bp, Arabidopsis thaliana landsberg
cacttgatatgaaagagatttgtcgcgacatagctatctcatcgatggttagtggtcataagaacttcctcaaactattgggatgttgtcttgagttcactcctcctgtcttagtttttgagtatgcagaggttataactcttggtccattgcttacatctcatccgggatatctgaggaggataaagatagcaagagaggtcgcaaatgctttgacttaccttcacacagcattctcaagagttttcatccattcgaatctagatcctttcaccattttcttagatggaaatggggtcgcaaagctcgggaatttctgcaactgtatcacaattccagaaggagagacatttgttcatgatgatacattacagaaataccatgagttgaggcataatacattaaaggggacacatgggcttggtgtatgtaacttaccggtcattgatcccgactacaaatcaaccggtaaagtcacgacaaagactgatatgcacagctttggaggattcatgctagctcttgtgcagataagggaagttgatgatgagctatctctatcttcggatatgctgagagcattagctgacttgttcatcaaaccttatgatgatgttcgctatgttcacttcccgcttcaccatcatgtttctaagatactgaggaagtttgggtatgcagaggttgtagattcagatatgagcgaggtagctgcttggccaattaaagcctttcttagattagcgttgagatgcattggatgcaagttgggagactcgttgagtagcatgattcaagtgacgaaagagctcaggctgattgagaaatctgcataatatccaacaaacaacagatcacagatgagctccatatgacaggattctttttgtagtcaaacattaagccaggaatgttattatagtagcttcagtctgaacgattaacattcagatttttcccaatagtaaaagcacaatgttcgcagatttgcttctgttacataatttaacttctaatacgtgcgtaacatatataatatctctgattttctcgggaagatagataattcagaaacgttatttacagagttttttccattcactttttcctatgagcttttaacttgaagataaagagtaaggtttaaaaagttttaacttatatgctgacgggttgagccaggcccgtgcagtagtgcaacgcatgggcgactcatgaaagcccagatagcaagctatcttaacgggctttctcccttaaaaaatagagttaatatcgtgtgggccgatggcccacatatcagatattaaactgataagaacagatactacacttgatcttagccaaaaggccgagaaaggtatgaattcttcggtccatcaagcttctattatatacaccaactccaagagcgagcgattaattatttagcgatgtgggacaaaaacaccaaagccttttctttatgccttcgtacaaattaatcaacaatttggacattaatacattattaattaattaacactgtaataaaggaataaatacagttctaaatcgccaccaggtaggtttcatggtgagctagagatcttcgcttcaggtaaagagtttttgttatttcctttctctaatctggtgttttctgggttcgtgtgagagattcttccaaatctgcatcttggattttgtctatgtttgattagcttaagcttctctcagacatagaaatcttgatttggtctgattttttgcagtgtttaaggattagataatgttaccggagagaagaagcacggtgttttcttcttcttcttcatatctgaatccatctggtcacaatgataattcttttttacttcttcggagaggcaaaaagtttggtcgtattgtgaaattgaagctttcacatttctttttgttctttgtgtcactctttttcttctcttgcatgttctctggccataaactactctttcatggtaagctttgagaactaaagaaaatgtctttctttttgttttctctcagttttggagattattaattcaacacttttgaatttggtgtaggttctgagttcttacctcattttgagcaaaaccgtaagcttttactttgtcttaatgattgaatttgtgtaaaaacctactacaaaagcttattgtattaagtggatttggtttcaaatgcagcttacatgaacagtcatatgttggtttcatcggagattgatataggattaaacaaatccaacatcgaaagaccacctggaagcaagaagagaaccaagcgtatggatttttgtatctctagaggttttcaattaatgtgttagtgttggtttcttaactctaaggctaagatgtttacatataatgcagatttacc

SEQ ID NO: 31122 - DNA, 1362 bp, Arabidopsis thaliana landsberg
gcggttatttagggactctttgacgaattttcatacttgatttctcagagagaattacagtgtcacaggcatgactcacccattagtacgggcaagtgaatctataatgttgtaccctagatacatgtacattgaatattaaacgattagtttttgattaagattctaaagaaattgttaatgatgttgttcctagattcatgtgattcagtcttccataatctaagttcttggccattgtttagttggcggtttcacattattatcacgtgcatgcaactatacaagtatatcagagtttgagaggacttgtgtataattacgaaagagtaggtagcatttgaagttagttttgcaaatctgtgattacaaaatatttataatctgtttggttcacctctgatgagtgggagaattatgtctagagaaacgattgcattggtaaataaacaaggtctttccatttttttcgtacctaacagaagaaaaagtctctcttcaacataataacaagatttttgttactaatgtttttgacgtggaaagttgcgtgcaggtgagttgtagtagtcttttgatcatgatattgtagtcacacctaataaagatgaaatggtgtgttttctaatggctgctttaataattcatctaaacctgtcattcttaaattaattgcaatagtaagagccgtaacaatgacatttctcgcaagtctttttcacgactttgttatgagtgttccgtttatagttttgtaaggaaagttcgaacaaatattgggacctgagggattctcttacacgttgattttctgttgtgctctaataacttaatgaaattagaacagaacgaacgttactcggtgtgagacaataattatgggtccatggttcacattatacaaattacaaactttaaagactgcaatttataggggaaacctgaatcttacatgcattttcatgttttaagactagactggtacaagttatggccggttcagatgtggatactggcaccgatgactatttctctttatttaatcaaagtgtcactagtttcatgttttgagactggttcatgtagcttttcttcaaataatattcacaagatattctaataactttaggtggacataaagaaaattcaaaataagaaagagtaataagatctagatgtttgaagaaactgcccaaaacgtttcttaaagatatagcgtattcggatatgctacccattttggattaatcaaatacgatactcattttttttaacaatggatttaaatttgggctaaaaataattaatccgatggcgcaatattaaataagcggcccatttggttttattattatttggctt

SEQ ID NO: 31123 - DNA, 1289 bp, Arabidopsis thaliana landsberg
acctcagatgctcaagcagattggcggcatgggcggtctgcagagtctaatgaagcagatgggttccggcaaggacatgatgggaatgttcggtggcggagacaagtagtatctttcttccttcctttgcacaccaaaaactagacattcttacgttgtcattattagagttttcccctttgtatttgtaaaatatttgcaaattttctccaattttacaaaaagagatttggtaacaaaataatgtctagggtccagtcgtggacattatatattgaaaaccaaaaaagatttatatcaaaagagtttgggtgaacaaaactgtatcatcttttgaacagattgactctctttgaatcgaaattacatagaacaaacaaacaatagaagaataaattaagagtcatatttgtaatagtattttgatcaatatttgcttgagcattcatattagtgtttagtttagttcactcttatgagatttttttttttttttgaatttttacttttatattttacttagattttccaattgattcttatgcctttttaaaaaaataaaaataaaatagaaagctaaataatatataaaaaggaaaaagggtaatttaaataaaaagaaaatatttaactaggaaaatatactcaatgattccccttcatattggatggagtatgtaagttttgaatgcctaacttgagaaaaaaatgcatcaaatttctttcttcctaatgtaagtttttacattgtaaataaatatcttgtctaaattatgtttacaatttcatattttattcttctaataaatacttttatagaatttttatgtataatgtttaatgttataaatgtttaaaccgcctaaaatcgtctagaccccaatttaggcgttctaagcgttaagcattaggtcatcgcttgtttagccaagttaagacccttcatgtaagaacagagaatcaattggccgacattcttacaaagccattgtttccctctcaattcaagcagttactttgcaagatggacattctctttatatttatgctccattttgaagggggcaattagattattgttaaataatgattcggttgtatatggttaactggggttttctggatttttaggttaaatgagaaaagggtttgtgaatcctgggacacctctttcaatgattaacagaaacatttttctaattttggctccatattcttcctttcatgaatctctcttgaacttcattttaggaaaagtttgagctatagtttttctgttgtcttccgcc

SEQ ID NO: 31124 - DNA, 4464 bp, Arabidopsis thaliana landsberg
ctctcagaggatcagaaatgtagcagaggttataatcaatgataattccgaaagaaaacttgtggttgtctcggcgatgtcgaaggttacggacatgatgtatgacttaatccgcaaggcacaatcacgagatgattcttatttatccgcgttggaagctgtcttggaaaagcatcgtttaacagctcgtgaccttctcgatggagatgatctcgctagtttcttgtcacatttgcataatgatattagtaatcttaaagcaatgcttcgtgctatatacataggtagtgtgatagtaatcttatttacttttactttgagatttcagaggaaggaactgacatctttcatttgcagctggccatgcatcagagtcgttttcagattttgttgcaggacatggggagctttggtctgctcagatgctatcatatgttgtcagaaaggtttgaattatgagttatgataattacatgtgaagttactgaggttgtatgcttttatcatctctcttttctttttactgtagactgggcttgagtgcaagtggatggatactagagacgtgctcattgttaatcccaccagctctaatcaggttgatcctgattttggtgaatctgagaagagactcgataaatggttctccttaaatccgtcgaaaattattattgcgactgggtttattgctagcactccgcaaaatattccaacaactttgaaaagagatgggagtgatttctcagcagctattatgggtgctttattgagagctcgtcaagtaaccatttggacagatgttgatggtgtatacagtgcggatcctcgtaaaggtatgtcctgttttttttttctttgcctgtaaaccgttttacaaataactagaagttttgctgcagttaatgaggcagtgatactccagacactttcttatcaagaggcctgggaaatggtaaactttgcgttcctgttatcctaaattcaggaggccaagtacaaacttctgatcaaaactcttaacttcatgcagtcttattttggagcaaatgtgttacatcctcgcaccatcattcctgtgatgcgatataatattccgattgtgattagaaatattttcaatctctctgcaccgggaacaataatctgtcaacctcctgaagatgattatgaccttaaactgacaactcctgtcaaagggtttgcaactattgacaatttggccctcataaatgttgaagggtaagctactttctccgttgatgtgcgagtgttatttccattctcgtaaataacaagctgcattcatacctatcctattgactgctctcttccaattcattctgatagtactggaatggctggtgtacccggtactgcaagtgacatttttggctgtgtaaaagatgttggagctaatgtgattatgatatcacaggtgccttagtttctaactttaccttagtattatagcaaattttttcattatagaggcagagtcttatgtcatggatatattcattgttcaggctagtagcgagcattctgtgtgctttgctgtacctgagaaggaagtgaaagctgtttctgaagcattgaactcaagatttcgtcaagctttggctggtggccgcctttcccaggtgcctttatatctctctttgttcttcgaaagatatcaaatagcttttctcttagcaaatgaacagaactcttattttggcatccactatttttctcaaactatggtttcattgttttcattcagattgaaatcatccctaattgtagcatattagcagcagttggccagaaaatggcgagcactcctggtgtttgtgccactttttttaatgcgttagcaaaggtaagttaagtgtagtgtttgcaaagaaaatcagatgacggttcatcatacttttcatatccttttttctgcttagaagctctgctgacacattgccatacctaaataactgcaggccaatatcaacatccgtgctatagcccaaggttgctccgagttcaatattacagtagtcgtcaagcgtgaagattgcatcagggcattaagagctgtgcactcaatgattttacctatcgagaaccactttggcagtgggaatcataggaccgggattaattggtggaaccttacttgatcagattagagatcaggtgagtatgtgatacttatatgcaagattatagtaaaatatggatcaatgttcaagctgcatcatatttaaatttcctttcacaggcggcagtgctcaaagaagaatttaaaattgacttacgtgttatagggatcacgggctcaagtaaaatgttgatgagtgaatcgtaagccaacgaacttgatacattacttttttggtgaagtttctactgctgtaatctttacacaatcgtcatctttttagggggattgacttatcaagatggagagaacttatgaaagaagaaggagaaaaagctgacatggagaagttcacccaatatgtgaagggaaatcattttatcccaaactctgttatggttgattgtacagccgatgctgacatcgctagctgttactacgactggttgctacgaggaattcatgtggtcactccgaacaaaaaggctaactctggaccacttgatcaggtaaagtgtttgatatttgcttaaatgactgttggatcgggagctacttttatgttcatcttgagtatatatccattaagattctgtggttttatgaacagagagactaattggtaacactcctgtaaatgcagtatctaaagatcagagatcttcaaagaaaatcgtacacacattacttttatgaagccaccgttggagctggtcttccaattattagcaccttacgtggtctcctcgaaacaggggataaaatactgcgaattgagggaattttcaggtatctatctcctcttcgtcttggtgccacagtaatttgttcagataccacaacaatggccttgctttgcatcctcacactaaaattttgctttgatgcctctctgcagtggtactttaagttacctcttcaacaactttgtcggcaccagaagcttcagtgaagttgtagcagaagcaaagcaagcaggtttcacagaaccagatccacgagatgatctatctggaacagatgttgccagaaaagtaaggttttttttttcctgtcaacaaatcgagccaatgcaccttgtaaaaagatattgaaccttctcgtttctgcaggtaacaatccttgccagagaatcaggcttaaaattggaccttgagggccttccaatccagaatcttgtgccaaagccgctacaagtaagactctgtataatcacacaattaaattcatcaacaataaggttaatccttttgacatttcttattcacttgttgattcacaggcttgtgcatcagcagaagagttcatggagaagcttcctcagtttgatgaagaattatccaaacaaagagaagaggctgaagcagcaggagaagtaagtagtacctccttggcaaaacttttttaacaccaaatgcgccgtcttgaaaagaactcatttcagattttgttgcgttgtgtatttgtttaggtcttgagatacgtaggagttgtagatgcagtagagaaaaagggaacagtcgagttgaaacggtacaaaaaagatcatccgtttgctcagctatcgggtgctgataacatcatcgctttcacaaccaaacggtacaaagaacagcctctgattgttcgtggacctggtgctggtgctcaagtcacagccggtggaatcttcagtgacattcttcgccttgctttctatcttggggctccgtcttaaggcacactctacatgctagaatatgtattttggatttcagagattctgatttttatagatgataccaaacttcaaggtaataaaacattctaggaaaaaattgaataaagactgttggtattatacaacacaagcattaaaatgctgtctcctgactcgaatttcatctccttccatatgattctgacccaaccgaaacaaaatttagcatcagaaacatttctcaatctatactttgggcaaaaaaacttctacataacctatgttgaaacactttgttttgaaaatgtgactaatctaacatccaatgaataacttcatttgttgagaatctaatagtactcgtcagggttttgtttgttttgaatgagaggtacaccgtcttctctccatattaatccgctcttcgcaaatcgcacccaccacctcgacatacagtgtgtgttcctgagtccaaaatggaaaaaagaaaagaagaaaatgaaatcttctgaacagtgaaatgtaatgttcaaagatattctttagtagtacctcatgaagaaccctttcagccaattcttctggtgtatcattagcaatcacacgaactgcactatagcaagta

SEQ ID NO: 31125 - DNA, 2490 bp, Arabidopsis thaliana landsberg
  unsure (1)..(2490): unsure at all n locations
caatagtatattttattttctcagattgaggtgataccaaactgtagcatcttagctgcagtcggccagaaaatggctagtacacctggagttagttgtacacttttcagtgctttggcgaaggtgattattacttaaatactgtaaccagcatgatgagggatcatccatctcatatactatcgtttgcttgattgctcccttgtaattgcttgtttttgtatctcgcttgtaggctaatattaatgtccgagctatatctcaaggttgttctgagtacaatgttactgtcgttattaaacgtgaagatagcgttaaggcgttaagagctgtacactcgaggtttttcttgtcaagaacaacattagcaatgggaatcgtaggaccgggcttgattggtgcaacattacttgaccagctgcgggatcaggtgaacttcataatgttgttgagtcttttcaaaatgctacattaccttctttctggctctattggtcctttacgaagctgattaggcatttaattatgtttttcaggctgctgttctcaaacaagaatttaacattgatctgcgtgttttgggaatcacgggttcaaagaagatgttattgagtgacatgtaagaatgactaattctgtacatttcttgattctgtcgcgttgtagtattttatctgaaagacattcttattcattctgacattttcttctatatccgcagataattttctctgttttaacaccacatgtgtacctacgttttttattgcagtggtattgatttgtcgagatggagagaacttctaaacgagaagggaacagaggcggatttggataaattcactcaacaagtgcatggaaatcattttatccccaactctgtagtggttgattgtacagcagactctgctattgcaagccgttactatgattggttacgaaagggaattcatgtcattaccccaaataaaaaggctaactcaggtcccctcgatcaggtaatatattcttctcatcaagtatacttcttatgaaactctgttaaagaaactcaataggaaatgttcctgtcctgtgttggtttcttactccactgatgtttctctgtttgtgtgctcagtacttgaaactgagagatcttcaaaggaaatcctacactcattacttctacgaagccactgttggagctggtcttccaattatcagcactttacgtggtctccttgagacaggagataagatactacgcatagagggcatttgcaggtctgttaattaacagatccaccacagtttgactctgagttcttttctgatgatttctcttttggattttgtttttttgttctttcctccagtggaactttgagttatctattcaacaattttgttggagatcgaagtttcagcgaggttgtcactgaagcaaagaacgcaggtttcactgagcctgatccaagagatgatttatctggaactgatgttgcaaggaaggtacgttaactcttctatctatcaaactaacctagtaaagttctgaaactgatgatagtctctctcattgagccaaaacccttctgtttgtgcaggtgattatcctcgctcgagaatctggactgaaattggacctcgctgatctccccattagaagtctcgtaccagaacctctaaaagtataagatctctctatatgtatatctcattaacagcaaaactaacaatgtctgcactcaatgtccttcctaattctactttcagggatgcacttctgttgaagaattcatggagaaactcccacagtacgatggagacctagcaaaagaaaggctagatgctgaaaactctggggaagtaagattattcacaacaaacgttttccctttcgatcaatgtgatcatattttaaccatatatatatgtatgtaaacttgaatttaggttctgagatatgttggagtggtggacgctgttaaccaaaagggaacagttgaacttcgaagatacaagaaagaacatccatttgcgcagctcgcaggttcagacaacataatagccttcacaacgacaaggtacaaggatcatccacttatagtccgaggacctggagctggtgctcaagtcacggccggtggtatattcagnnnnnnnnnnnnnnnnnnnnnnnnnctcggtgcaccgtcttaactggtgaagaaaaccccccacattagttatcagttttgctattatcttcccgcttaaagtatcagcttcggatcagctaccttttgctggtcttagtagtttttttgtggtaacatgtacaatagcaactagttttgttggatatgttttgattttttttaatacagtttcatttgtttaatatttacaaatcaaaacgatttgatatttaataaaaaggagcatttagaatatctatttttttggtttatataatataattaattctccttataagatttctggcatgtactaccatgcattttt

SEQ ID NO: 31126 - DNA, 1443 bp, Arabidopsis thaliana landsberg
ttcttaggaaaggaattctgactcgcatttatgcaccaatggtcagttagttttactactaaatctacatcctcttttaaatgcttttcattgaacaaagctatcatctatctcaggttataatccaagagctaagagaagccggtgttttcagctcagtggtaacttcagctcatatgtctctctcaaagaatagaagcaactcttcaacctcaagcaactactaggaaggtgttggagtttgatcttgttggtgaatcttaagcagtatcagcgataccaccgaaagcatctccaggcttggaaaaaatccaaaatgtttaattataactttcttgaaaatagacttcaaaaacttgcagagagatgaaacagagattttctgtacattttcgacaagattttttttttgcttaggtaactatacaagaagaacattagagcaggctttgtggatctacttggaccattaatatacattctatgtaaaatgcttggatttttctgttggtcttgaatcttgatatgaagaaggaatcatagtatgatagtgtctgtgtttaaagactagtgttatagagtgaccaaaagacagtggagtgggcgcgtgtcatatacgcgcgtacgagctttttttttggcggttctttgcctctccttcctctcgagtctcgagtttgtgccctttattcgatgaacaacgttcttcagtttggtctccagagctccgccatatatgtcgccaagtacggttctgtctgaaatcttttaataactgattcgacttgtttagttgattatccttgaaaatttaggtttagaaccccagaaaccagtttggtttagaacgactgaattgtcgcctcttcttcttcttgaaatttagggcttattttgtgttgttgttactcctgaatcgtttcggaaaaattaaaccttttagtcgttgatttcggatttcttctaggttctgtttcatttagctgatgtttggaatctcaaagctgtgaccttttttctcaactttttatgttttccaaaattttattgtatgaaatttcgtgattgatgatgattctaggtttctggtggtgcctcttaggagtttgagagttggttcatctttcgttggagttggagtgggaacaagaagtttcaacaagaggctaatgtcaaatgctacagctttctctatcaacaacagcaagcgaaaggaactcaagataccaggagcagctattgatcagaattgtcatcagatggtttgtgctaagattgtgattcatttgttcacttgcactagtgtagctaagggtttttgtttggtttgcttgtttaattgttggttttgatgtgtagggaagtgatactgatagagatgaaatgggaactcttcaagatgatcgaaaggaaattgaggcgatgactgttcaagaacttaga

SEQ ID NO: 31127 - DNA, 1465 bp, Arabidopsis thaliana landsberg
atgtacatactacatagtacacatacctacataaacaaacatgcatatacgtatatatgcgtgttcatatatatgtagagagaagctaaggatggggctaacgagagactgcaacagaaggctaaggcctgatctctatgtttcacatagactcgacataattcagtgtctactaagatgctatatgctcatacatattaactagaccacacttcactgacatatttttaatgtaacatcaatctatattgttcaatatacagcacaaatatcgatgttttaacgaataatgcacagagtttttattttttcacttgggtatgacatatgatgtggatggtcagttattctgcttggctcaatgtctgtataattagacttatttaaaggtgctatgaccaatcccaaggagacatattatctgtttactgaaaatgactttttgaagaaaattttaaattataattaaccttgggataacaaccatccaataagtcattaagtgaacatttcatcaccaaaccaagagctttccgataattaaacacagtaagttctgttccacctttcaattcaatacagacaaatcaccagtatataatgtaagtatctctctccattcttgaatatctcccccaattttgtttttttgtttacaaattgaaacttaaaatactagaatagtaaccaacaacgacaacaaaaagaatacaaaaaaaaaaaaaaactacaaacataaatagttttggcattacatcacaacacatagcaaatagattatatgaaattatagattatatagtttcttaaacttaccaagattcaaggcaatgcattataatgattaagatcagtccaagcttgaattccattgttccattcacttcctcctcctcctgtattagcattattactaatcactccttcattatcactgttattaccaaaataccactctgtctgattatctcctttcttcgtcggcgacgacggcgatgatgagtttacgatctcaagattccgataaagaataggttgtggcctctcgacgacaacagtttcttccttagaattaccaaaaagcatcgccatcctctgttgctgaagcctccagtgtaaatcttggtttaaacaactcaaagtctctatagaagaagctaagtttccgtcgcttgctccggcggttgtgaaccccgtcggtgaatggttgttgttgaaatctccaaaacccattagggataaacccgacccgacatcaacgggtgtgttttatcggcccgaggacatcatgggcctaagatcaagaacttcttggttattcaaaagttgaagatcgttcattttgttgagagataatccggccagctgataatccattgttgtcggaggagggaagaatttggatgaatcttccatgattgatgagaagaacctctgagaggaagaagacgaatgatggaatgtc

SEQ ID NO: 31128 - DNA, 2840 bp, Arabidopsis thaliana landsberg
aaacaaatcaacacaaaaagaaaacaaagacaagggaaaaggttcgtgttagaagaaaaagtcaacagcttaaagcttaaaaagtcggtgaatgaatgggtcagctctctccactttcattatctctctatgctctatctctccaatcataaaacttgctattccaattaaacttatacactatccattagtattttatgtagtattcttattaagatattttaacgtggtccatcattctacttaataagtttttctcttcttttaaatttattggcagcagtttgagaaaacgactagattgattaagaatgcaacgaatgtcaaatcccaaaccattatcttataccagttatattatgagtgcttcatatttatatattaacttgccaaagttttgaagattatactatgaaggctactcacagggacattgattcctagaagatgattttatgatgttaagccgttgactttggtaactaaatcatttgacctttgatgtttctgccccctttagcaaatagaaacttaataagaaaattttcattgaaatttagcatcccaaagaaaggtgtagaaaagttatagtgtaatgtgattggtgaggtgcatgttcgacactcttcaaatgttgattgaaacttttttttgtgtgcaaagttgattgaaactttaatattttttcattaatcgcttaaagtgtagtagtgtcaaaatattgagatgtcaagtatagaacatactatcattttcaaaacaattgtgcaatttcagtataatcagtatttaaatcattaataacctcatgtgtaattaactctattatattatcgattttaaaacacaagccccaagacaatgtccctcattctatctcatcaaatgctcaactttttttttttagtaagaacattaatttgggtgcattaatgaaggtcacaaaaagaagggtatagagggtaaattaaaggtgattgcgcacaaaagtatgtctttcagtttttcacagaggaagctcatgacactcaccaaagcagcacgaatgaagttcaagttcttaattaggcttcacatactctacatcatctcctcaaaatttatatcatttcatatgttcgatcttgttttcatgtgactctctcctcttctctaccgtgagtctcttcaatttcctaaccctttgttaacgatcatatataccttgtttctcgccgtactatttcatcccaaattttacttttaccacttgcgataatatatcatgaagtctcttcttctccttgcctttttcctctctttcttctttggctctctcttggctaggcatttaccaacatcctcccatccaagtatgtatctatgcacatctttcttactccagctctttcactatcttcaagatctctaacttgttcatgtctgcgtgcatgtgcaggtcatcatcatgtaggaatgaccggggcattgaagcgtcagaggaggaggccggacacggtgcaggtggctgggtctaggttaccagattgctcacacgcgtgtggctcgtgttctccatgccgtcttgtgatggttagctttgtgtgtgcatccgtcgaagaggctgagacttgtccaatggcttataaatgcatgtgcaacaataagtcctaccctgtcccttgatcagcctcttctacacttattctatgcattcaaccgttttgttttccttttgcttctccgggacatgaccatgtgtacgtatacaatgcatctttaattagtttctttcttattattaataggaatcttaaacacagtttgatccgagattaattaatcagaaaatatatggatatcaaaaaatgaaagccactcacctatttgggctctctcgctgtattatggtccatgaggccgtatttaagacagcaacaacaaaagttgtagacagaattatatttaaaaggcaacaacaaaagtacgtatacgttgttaccaccaaactttggaggctcgctaataataaccacactacccatttgttacacaccctttattttcaaccatatcatctcaccttcgttaaatgttcccacaattagctcagtattttactatatacatacacacacattccctccacaggatcaaacaaacacacgagctttctcctctacaacaaaataaaataaaattaatggcttcttcacttatcacctccgcagtcattgtcgtggttttaagcctagtgcttggatctgtagagcaagtgagtggactacgtcacgttcccaagtcccctaagatcactgatgtcaaacaccctgactttcttgtaaccattgagcccaaaccaactattctcattcccggtgttggaaggttcttgcttcctcccaaatgcaagaagccgttctacccttacaatcctgtcaccggagctccacttactggtgggggaatcccatcatataatggtggacaaggggccggacctcacacccaactccctggtggcgatgatacgcttgtcccaaaccccggatttgaagagccaaccccgaccattggagctggcacaggaagcaacggccaagttccaccagtgccactaccctgagtattattaatctgtcaacaaataagcatatcttagatgcaaacatgtctgttttggtgtcttgagtcttggttagataagtaacccgctactttactagccgtttcgtttgccatctctttttctctctgtgtctctctctatttgctacaaaaagagagaatcttgtttcatgtttttcagtttgtctttagatgaattcattttcacataccattatattaaataaggaaat

SEQ ID NO: 31129 - DNA, 2959 bp, Arabidopsis thaliana landsberg
tgattgttccgatagcatatcaaaaaacagtcatcaaggcgttgatgattccctgaaccagtcaagatcttacgtatgcagtttctgcataaggggcttctcgaatgctcaagcactaggagggcatatgaacatccacagaagagacagggctaaactcagacaaaagcttatggaagataataaggatgatgtcgtcgccgagagtgatgcatccgaagttgtgtctctagaccttaatgaacaacaacaacaacaaggagaagctttgacatgtgatgatcacgatcaatatgttgataacgatataagtcctaaacagaaattagagttttgggttcaagaaagcaagcttgatactaatgatcatggaaaggtcacggaggctagcatagatggttcgagttcgagtcatcatcgtgatattgaagtattggatctcgagcttcggttaggccaaagcgtcgtaaagaagaagacaacatagtctctgaacgatgaatcacatctcgattgcattgtatcaatgggaaaatccctatgaaacaccaaactctctaatccgtctattacaaatggattcgtggctcaaattgtattgtaaggtatgcatttgtatcttattgctaccattatcgttgttgtaccttgtattgatatttgtttccttgcttgggttaatttcaccaacaacttttgtaaatgacatacacgtccaaacaaacaaacatatatatagaaattatatatatttggtgtttgctttatagttgtttagggaaaatgaataactaataagcttaacttagctcaacattattgatctggtcatggtagagactattcaaacttgttcactgagaaatattgttacagttgagttatatattggtagtcgtcctcagattttcgagtaagcatttgccaattatgactcttatattcgagattagcactcaacatttaattatatgttagcaaatagtataacattagctagcaaacttataaacgataaatttgaccaaaacaacataaaccaaggtcactttatctactttttgttctctgaattctgaaaacgaatttgaatatcgtattctaacagtgaatattgcatttatactaaaatttacgatcatagccataaataagtagttatgtatagtcaaactatatgtagttatgcagtactttaagacgtttgaaccgctaagattcccataatctgcatgataatataatgtatgtaaactgatacatgcacaattgcacatgataaatataactaaattgatacatgccgatttgcgcatgataattataattatatgctctataacatgttaggatttaaaatgaaaagagcaaatggttcaaggctgcaacttggtgacgccaccaatgatgaccttttacgtcttaaccacgttccggtttggttcgagaacttgtttgagatccgctttggatctaaattcagattggttttatttgagacgccgtggaaaattggataatttccaccagagatatatgatttaattaattggattttggattcgattatagtaaaccgataatagtgaggcagtaacgaacaaaacaacttcaaccggatcattgggttggtttagtttactaattgaaccggtttgataatgtttaaaaaataaacaagtgacaacgaagaccagcaggtccagcacacgatcctaaatcctgtgagcatcgtctccatcgctggtcttccattattgacgaatctctttgcctttttttcttccttcttaaacaaacccaattcgatttcaacgaacgcctcttctctctcactctctttcgatttgttctttgccggagctcgtagtgtaagcgtgatccgcggcggagagatggctcctaatgatcctaaaaaagccgttggtggcggcggaagtggtttcttcaactatcttgcttcgtcgatctccaatttgggatctgctatgaccaaatcagttaatgggtgaggtttttgagatcccttttcttaaacccgaatctgtcactcagctcgattcgtgattttgatttgaaaaatggaaacttttttgttttgggggcctcctatgttagatcttcttctaacggtaaatggtatttctcccaaggctggttctttggaaatggtattaaacctaagcctaactcacatttcacatagatggagaattttgatgcacttctaaaatgggctttgcttaaagttaagctcttttgaacgattcgttgtgttttgatttgcttctcagtttggttccctatgagggacttgaagttatcaatcctgaaggaagtacagatgatgctgaggaggaagcaagcagaggaagatggaagcaagaggtatatatacttcttcctttactattgttgttgttgacataactgttgatctaatcatctgagaaatatacacaattcttaggatcgagatggctattggaagatgatgcagaagtacataggatctgatgttacatcaatggtgacccttcctgtgattatttttgaaccaatgacaatgcttcagaaaatggcggaggtttgtgctcatgatcacatctgatgatttgttcctgtctgatatagttttgtaatccgatgatgccaatgatatgtgctctgtttctggtagttgatggaatactcgcatctgctagacatggcagacaaaaccgaggatccttatttgcgcatggtgtatgcatgtaagaacattttcactcctttgatttcttctatgatcagtatctgtcctgcgtggctcacttgtaagaattgatttttaacagcatcgggggctatatccgtgtattatgctttccaacgtacctggaaaccattcaatccaatccttggtgagacttatgagatggctaattacaatggtgttaacttcatatctgaacaggtc

SEQ ID NO: 31130 - DNA, 1646 bp, Arabidopsis thaliana landsberg
taagttacgtattcttcttctacggaataacagctttcaaacttatatccctgggaaaatatgtcagcaatgagtatttggtctgttagacttgtctcacaatcatgttcagaggccccataccatcatgtttcagtaaaatgtcttttggtgcagagcagaatgaccgtaccatgtcacttgttgcagattttgacttctcatacattacattcttgccacattgtcaatatggatcacatcttaacttggatgatggtgtcaggaatggttatcaaccaaaaccagcaaccgtagtggattttttaacgaaaagcagatatgaggcgtatcaaggtgatattctccgctatatgcatggtctggatttgtcgagcaacgaactatcgggtgaaattccaatcgagattggagatcttcagaatatcaggtccctgaatttgtcaagtaaccgcctcacaggctccataccagatagcatttcaaagctgaagggcttagagagtcttgatctatccaacaatatgctagatggaagtatccctcctgcgctagccgatctcaacagtttaggatacttgaatatctcatataacaatttatcaggtgaaatccctttcaaaggccatcttgttacctttgacgagaggagttacataggcaacgctcatctctgtggacttcctacaaataaaaattgcatctcccagagagtccctgagccaccaagtgtgtcaacgcatgccaaagaggaagaaaatgaagaagaaggtaatgtgatagacatggtgtggttttactggacttgtgctgcagtctacatatctacatccttggcattgtttgctttcctctacatagactcacgatggtcccgagaatggttttatcgtgtagatctatgcgttcatcatattctacagttcaagcgttcctcagtctgcaactgattctgtggattagccaaggtatacaccactggaataacacagtcttaaaatgctttcttagttgatccaagttagatgagaaaaagcttttgtatacaaaatatatgtcttcgatgtcaaatatatacatgataccagtttcaatttctaaacattatctcataatatttgggcctcaggagcccattatagcccataaaacgcataacggctgaatagagtcgtactgtacttgaaattgaaaggcatctactagtagactctagagttttctggattctgttttccaatcttttcatcgttttcgtgtgaagtttaaagaagtttgggacccgtaaattctagaagctctggagatttcttgttcaccactataaatacatcatccgagtcaccagctttgctcagaagtagaaatcgaactcgccggaaaatcgtaattagctatctcagcattccaaacatctctttcgctttcgaaatcaaatcgagaatgtcgcttattccaagcttcttcggcaacaacaggcgaagcaacagcatcttcgacccgttctcactcgacgtttgggatccattcaaggaactgcaattcccgtcgtcgctctccggagaaacatcggcgataacgaacgcacgtgtggactggaaagagactgcggaggcgcacgtgttcaaggccgatctgccgggatg

SEQ ID NO: 31131 - DNA, 1108 bp, Arabidopsis thaliana landsberg
tcatctagtacgatcaatatcatgaagtcaatataaattatcatttctttcactttaattgatcatagcaccgataacattctactctctttaaaaggtcttatctctattcttctctattatgtaaaaattggttaatagtagatattaacaatttatttttgcaactacagaaattcgtaagtactatcaagaagcagaagatggcccaaaaggtggaagcacaaggagggaaaggagccaacctatgggacgatggatcgacacatgacgccgtgaccaagattcagctcgcagcaggcatagacggaattcaatatgttcagtttgattatgtcaagaacggacaacccgaacaagctcctcttcgtggtaccaaaggccgtgttctcccagctgatccggttcctatattttccttgcccattaatcttcttctttctatatgtgtactgctatattttgaagctttgacattttgatcttgatctctacagtttgtgataaaccatccggaggagcacttagtttctgtagaaggtcggtataaccctgaaggacttattctagggctaacgttcaaatccaacaagaagacttctgatctcattggatatgaagatggtacaccgttcactctccaagttcaagacaagaagatcgttggattttatggcttcgctggaaacaatctccattctcttggagcgtactttgctccgatgactaatgtaacccccttgaatgccaaaaagctagaagcaaggggtggtgacacgggagatgtatgggatgatggtgcttacgataatgttagaaaagtatacgtagggcaaggcgaagatggtatagccttcgtcaagtttgagtatgtcaatggttctgaagaggttgttggagatgaacgtgggaagaagactttgctaggagctgaggaggtatactaatatatctatcgatctatgcatgttgagatttgtttattggtttcttcattgagaattctctttgcagtttgaggttgatccggatgactacatcgtatacgtggaaggttatcatgagaaagtttttggggtaacaacaaaagaaatcatctccactctta

SEQ ID NO: 31132 - DNA, 897 bp, Arabidopsis thaliana landsberg
cttcataattatttggctattggcgcgacatggactccaaatttgtgaagtagatcaccagctcttccatggaaaccaactatcttttgaccgtccttcttgaattcgaaggctgtgccagctcctattccaaaaggaatagatactcgcttattagtcgtgaacctaagcatatttacgattggttcattcccaaagattgcatcgtaggtgccatcaactgccgtgatgtattcacttggatagtcaagctcaaactgcaattcaagaagcacaaaaaagaacaaaattgaggataataaactatacggttaaacgacgaaagagaaagcaagaactaataaagtatacctcttcaaatccaagcaatgtgggttttccatgttcttttccttctacaacctgacctgctttgtcgtacacaaacgagaccgctccaataccatcttgggcttgtcctacagacactttccttacaccgtcgaaagcaccatcatcccataaagttcctgcctcactaccagctccttctagcttttgggattgtgttgcaggagtcaaaggggtggtgcctgatggagctaaataagctccaatagcattaacatactcaccagctcgtccgtggaacccagtgatcttgtaaccttccttcttgaattcaaactttgtgccagatacaatcccaaacggtccagctgttttgttcttgctagtcttgaaaatcagcgttgtcactacagtatcaactccaaagtttttttcgtagtatccttccacggatgttatatattacggtgattgaggctctcactacttagattaacgcttagatgagtagtagttcttggacggcggaagggatactaactcaatcggctggattgtcacccttga

SEQ ID NO: 31133 - DNA, 3931 bp, Arabidopsis thaliana landsberg
tgggatagatagaagtatatgtttttaagaccataagaagacaacccttgtagcctagcacaagtatatgctggcataatgttgtattatatccacaagttgattataagtcctagtatggtttatgtagaagtagaagtatagaaaaagaggcagatcatgtgtgaacgatataggaaaaaatgcatcaaacatgcaacaaagatttaggtgtgaacgccaactcctaatcatttcattcatatccaacatctcataaggaagaagagaatacacatgcaaaacagaaacaacaaactgcatgctaaataaaacaagttcaaagacaaggatccaagtatacccttacaagaagcagacaggtaactgatagttaaaccatattaaatgtcactgcaagtgacgttacacatcagattagattgtttatccaatcaatgtccatcatgaggaaactgtccagttgtaagtcttcaactgagaatattgattctgcagttgcatcggttgggagataatattcatcgaccatctctgtaatctcagtagaagcagaaacatcagaggaagcaggaacttcagagggaacctgggttgttgccgggagtgtggtggcatgggaaggtacatgcacaactgatgaagcatagtttgttgctattgtctgtatgtcgagcttggacagaggccggacagaaccttctggaagctgcggctttttatcggtgggaaaattgtaaactcccttctcacccctaatacagaacaaagcagcatcataggctctagctgccttctctggagcatcgtatgaacctagccatattcgtcgtccagtctttggaactctgatttcagacacccatttgccccacgacctctttcggacacccctatagcatttaaatttgcgatcttcatgagctcctttgagtgaagagctaataaaaggagatttaggaggagagggtggcattatatcctaacagaagcaaaattttcagagtagtgttttacagttttatgcacaagtacagggactgtggaaactgaaaagtaagggtatcgaaagcagaaagaacttttgtgttgaactatggagcaagtggtgatgaaatggagaggcacgcgatgtttaccaacagcacgtggcaatgtagaaactgcgattgtgccagcgtagtagagtcctcgagagttgcatccgcggggatcgactaataaggtaaaagccaatttatttgtcaagcatacatttcttaaaggagaggcaccgcaaaaagaaagtaaaaaggagaggaagaacttacgatttatttaaagtcagatgaccgttttttcccccaagttgagacacgcgtacgaaccaccgcagtttctgaagataccattcgatcaatccaaagctagcaaaagttctaatcttgttgtccatatgttaaccagaaaagcaaagcattaagtttgatcgacatcacttgctggaaacatttggaaccggagcttcttgtcgtattcctgtaatccgaggaaccaagcctaacaacattgaaatggaaagaatgaatcaaactggagaaaagggaaagaggggaaagaaaggtaaaatggtctgcagatcttctgatatcagaaacattaactaggatcatatattctcagttacataattatatacttaactgcacaatgcactagaagtctagaacataatcttgtactacagttgtagaatcttctattatcacctaaatgaactgcaaagggatcatttgatgatcgtcatacttagcacatgaatctccatcagcaaactggttaaatgtggaaactgcaaagagacaggtactcatctaagtaaatatcaggtagttatggaaatttctctacagagcaaacgcatttaatacaaaacatccagatttgaactcatcagactactgtaattgctacctttctctctttaacgcaatggcttggccttcaattacagcaaatgactaaatgcagcacgcacaagaatatgcttattggaaaatttcgtatacaaactgattggtatgcctcttctaggtgctcgaagaacggaatcctgtgagttactatttggtttcccagctactacgactcttcactaccaaagaggcccaaaagtgggaagaatgtattcagaaactaacaatgtcttaaacccttcttccaaaacccttaagtcacaaatctttacagaacaaaagagaagtaaatagaccaatctcatataaacatcaacaagaagcagacaatgtcacaaaacatccaataaaaccttctatgtagataagatcattatgttcaaaacttaacaagaatgctatagagattgcaaggattttgttctaccaataccaccttccttttagcactccaatcgtttaaaagactcagcttacagaatattaggatctgaaactgtttgcttttcgatctgaagctggaaagcttcagagaattcctttagtaaagactcgtgaactatatcgatcaacctcaaatcatcaaccattccgtgttctccatcttcaagcaagccctttatgtttccaactttccggtctctaatcccacatggaactatccagttgaatggtgttagatctgtagtgacattaagagctaaaccatgatatgttatccatttcgacacacgaatacctatcgccgccactttttggttgcctatatataccatttgcaaacaaaaagaaatcaatctcggaatatatattagatgacttacaaaatcatccatttgaaatatgagacataccaacccaaactccagttaaaccgtcaagacgagaagctttaatggagaaagttgaggaaagcacacggatgacaatctcttcaagcatcctgaggtaccaatgaagatccatctcgtgatttcgaagattgattataggatacataactagctacattttcaaaaattcctataatcagcttgaagagctcattagaaaacacacagaaacttccaatgcattgttgacattattacctgaccagggccatggtaagtgacttcgccaccacgttcagttcgataaacatcgaaaggagcatcctttatatcgaaattgagataatcctctgtactagcagttcccattgtgtaaacaggagagtgttgtaacaaaatcactgtatcagcgcagtcttggtttctatcaatcaatgtctttttctcctcgacaatgctcttctgccatgaccaagctttcttgtatggaaccaatttgtcgtaaagatcaaaacacaggcacctgcaaaattgatagtgattgcacggaaggtgttcgttaaaatgcctcaaacagaaaatagagagcacaaaaaaggaaactttactttctggggatttcatgattcccggagtttaagatcttgacagatctaactaatctgtttctcttcgcgttagtacgatggtgatgatgaattcccgaaactagagtttctactccattcagcaactccataactctgtactaaagaagaaagtggaatttacttaaaatttatttctgtaaatatacagtcattcaatttttagccaatcaaaaacgacggaaacaacaattttgaccctacaaaataatatgtaaatgtaattaattattggaaaccaaaaaagcaatctttatggataacagatattttacaagcttaatttgaagaagaagataacaaaacaaaaaaaagagcgtggctttatctatcatctggtatccactatccacaactggggtcagcttctggttctctctctcggtaactttctgagctgaagaaccctaattcttatcttcaccggattccgggtatagggctttgtaaagttgttgaattttcaaagaaagatatgctggtttgtctgggtttt

SEQ ID NO: 31134 - DNA, 1324 bp, Arabidopsis thaliana landsberg
tgctgactgctgtctttcccttttttcaacacgcatttcctttttgctatttaaagattccaatttgctatcatgtccggcccaactagatatgtcaaaatgtttgggcctaggcgcctgaattatttcactaatttcctttttttttttgctatcaatgctatgccattatcagtattttttattttaaaaaaaatatatatcaaataaaagatttagcattcaacaacactttcctcaaatctttccatcaattctcgcagaaaacttactaaaatttccaatccgatatttatgctaccattgaattgctatcaacattccattttctattccacataaacaaaatctctaacaatgcgatttttagaaacaaactgatgacgccatttttaacaattgttaggattagtcaaatatcctcttcgactcgaaatttaaattgatacttttactttatagattttttttttttacaaatagtggaaatgaaatcatgatttataaaaaaaaaattccctcaaaattatacacttcatatcgagctctaattaaaaggtcgaataaaaccagttatgatcaaataaaattctctagaaatgtaaagacaacaacaaaaagggtatacataaattgtttgaagaattttagtcatttatatagtcagttgctaaaagtattcaaagtcaatgtaatcaggatcattgcaatcgccgttaggtttgttatcaccaccgccggtactgcaaccacctccagcaccgttattgttcttctttccgccaccgtcaacagccgccatagactctttatccttgcttgcgtaacacgaaaaatccaccggttccggtacatgcggcggcgttgcactccgaattagcgcccaattcacaccttcgaaaaacggatgctgcttaatctccgtcgctccacgtttgtaagcgattcgtttttgcggctctttaactaataatcctttgatgagatctctcgccgccgagctcacatgaggaacctcagggaatcttaaagcttgtcctatcacgttgtgaagcgttgcacggtttccttgtcctttaaacggcgtcgctccatagagaagctcgtaaatgaaaattccgaatgtccaccaatctacggcgcttccatgtccttctccacggataatctccggtgctaaatactcgtgtgttccaacgaatgacattgacttaacgttcgttggctctgccatgagttccggcatggatccgttgacgaagagtccgaaatctgatttcgcctttcgattcttctttgatgactgcaatatgcgtgggaagaa

SEQ ID NO: 31135 - DNA, 813 bp, Arabidopsis thaliana landsberg
tccatgtgtatatacttgctaagaacaaatggtcttctgcttggcagaaggatggcagggctccaacttcaaggtccaataccaacctccctcttcagtcttcctgaattgcagactgtgtgagtaaaacaataaatgaaactttgattaagaagtcactcaaagatgtgaaactttgacatgtatactaattgtgatattttttcttgactacttgcagtatcctaaagcgtaactggctaaacgaaacactagacttcggtaccaacaagagccaaaaactagattttgtggatttacaatataatgacataacagagtatattaaacaaccagctaataaaggaagcagcaggatagtaatgtatgtatggtcacatatcaaaatgacttacttcttttctatcagttacttataagagtgttgatatttctacagcttggcaaataatccagtgtgccccgaggtagggaacccaccaaatgaatactgcatagaagtcgaacacaattcctcatattcttcccctaagaacacatgtggtcgttgtagtggtgaggacagggaacccattcccaccacgtgccgttgtgtgtatccaatcacaggaacactcacttttaggtcaccttccttctcagggtattccaacaacgatacattcgagaacctcaggctaaacctaactggcttctttgagaatagaaattatacagtggattctgtggccatatgaaacataggagaagatgaagatgatcattatcttctaatagatctctctctctttcatataacaagacagattaatg

SEQ ID NO: 31136 - DNA, 1033 bp, Arabidopsis thaliana landsberg
  unsure (1)..(1033): unsure at all n locations
gattcaagtcattattttgagagacgtcatcattcgttttttggtcaagagagatgacataattcaatcaccaagatacagtaactgtagtttaaagcaaggacatgaggacaccagtattaacagataataaaaagataaactcaccttccttggtcatccccaagtcttaaggatgaaattactacttcagcagattcatcgtcgaagtaaacatcctgtatagtatataaacacattccaattttcaatagcaaactcttattagcgtacatcccccatacgtatcatagtgtgataaaagatgttgatagtttccttgatttttcaaaaaagcggagagaagaatttttgcaagacttacatcatcgtctctatcaagggcattgtggtcctgagagaaatacaaagacgataaattcagtacccaggaaatcattcataaattgaagaaaagcactagtgtgagaagatacctcttcattgtcatcgtttccatatattttgtatctaaatgcttggcttagagttattggccagagctgcaacatcgtaatccctgtcttcctcatcgctatctcttgtcctatcttgtagggtagttgggcgcctacacgtaacaattagtttaggaatttttataaccaaaaagagtgaagataaaatccaaaacccgggaccagatcatggtgcatttactgagtggtctcgtcatgagaagaaatattatttgactatgataccatcagtcatcaatgcagaattatctttgagggttttgtccaagaggaacaaggatcacacatgaatttttacatccataatcagcattatgtagcagactgaccaattaaatggttactagatgatttgtgagtagaggttaacatacccacatcctcatctgttgacattttcaaccgtgttgcggtcctgcagaacactaccttgccactcattccattcgctgttttcctaaagatttgggaatgaacaaagcacaatcagcanacatggtagattccaacagagt

SEQ ID NO: 31137 - DNA, 3301 bp, Arabidopsis thaliana landsberg
cagaaaagtaggaatatatggttacgtttttcctcttatagcttaacaaaaaaagaatggggttaggctagcttctcttatccaagaggttctctcagtaatccccatgaaccaaagcgggtaaattagtcccctttttgtgatgagattcgaacctggatctaaaggagcattacattatgataaaatagatgtcagccaaaacatctttcaaacataaccatataaattaattaacactaagagtctaaaaccttaaattttaacaaaaatgatagtctctgcataaaaaagggacaaacactagaccctagtatttaagaacatcagtctttgagagaaaattaaccaattctacggatcctgacaatcttgtttttcattgaccataactcattggtctgccgaagttacgaagccttgatctagtctctggtccggatgtctcagcacggatctttctggtatcaaactggtcgttatctttcattctcatatatatgatcttcttgtgcaaatttgaatgcacggttgggatgaaggtcgggcttgctgctggacggtattctaaaacaagacggcccgatctaaagcggattccacaagcattgcaaagggttttacgcccattaggtccttccctccactgcggggtagtggttgtctcgcaatgagtgcatttcaagcgacgactcttgttcttcttgcgtttcttcaaggcggaaatctcagaagattcagattcatccggagcaaactgctgtgacatctctaatagaaatgatttgaggaatgtaactctcattagtgtggggcgtttgcgcttgcttctgatgcctttcacgagaaaggccagtttctgatctccgtttgggttttggggtgagccaaaaccgttggtgttcttgaggactgagactgggcttaaagattgcaacaactttgagactttgacattaggaggggagttatcaacagtacagaagacttctgaagaactcgactgcttctgcacgcgcaaaatcaaagacaaagaatatgagttcaaacactgaagagtctagactccttcagacaaagagatccatacacttaaaccacatatcaacttactggacccatctagaaggtatactaatcgatcacgactgatttcatatagatcaacgaatatcatataagattggcaatgatctactaatgcctaaccattcttatgttatatatatatatacatggatagattttgagaacaactttattcctctctcaataactacactaaccatatagaagagagacctaaaaatatccttgccacaaaggccctaagccattacacaaactcaacacccttacctctattaccacatcccagttgccaaactggaaaccattcaaatccatgtacatttgactcaagataacaagctaaagtgaaagacctaagacactgcacaatcctttttcttgtatactttcaaaacttaacataaacactcaatagacgcattacgctagtactgcacaaaataactttcctcttgcaaatgcatcatgattgtgtacacatgttgataatctagtaaagcaataactgatgcataaagagtaaaaaaataaatgcatatgcaatctacattagtagcatcgataatggacgcaagcatgattctttgacttttacactcatttctaacataaagcagcaaaaatctatggaacttgaatccaacagacaatataccaaattctttcttaatgaaataaatattgtatacatgacctaatatgtgtgaatgatcaagtaacgtaaataaatgaagttcagatacaaaatgatgcactttcctaatgcaaatatgagtaattctttttaacgcaatttcgaaacctatacgataaattcaactgaagcttgaatccaaaagaattgctatttttaatatgcacatatgtgattgtgtgaacaatatatcaagttgcatcaatgatgcaaagtggattccctttttctcgcatttttccaaccttatgagttatgtggtaaaaaaactattgaggtttgaatctgaacaatgatgtaatatattatactaaattattgccctaaaaaaacttgtgttgtcaccgtgtaaaactattttacgtaatggaatataagtgtgattactattctacgctcttatctaaccttactcgataaaaagctatcaaagcttgaaggggaaagtatatttctgttaattagacagactttcctaactcaaatgcgtgctgttaaatatggcataatgtaataagtaaaatatatagagacatggttcgcttgcacgcacttttctaacttacatgcagggaaaaatttatcaaggcttatatctaaaagaatatgttatattatacatataatactggccaaacaatgccgaaattcatacgtgcgcagtgaatgagtaaaatagtctatcaagtaaagcatgatcatttagttttacatgttttctaacataacaaagtcataatgctaaatatgaaatctgaacataatgcaaataagaataatggtgatttcatagagactctatcaagtgagatgcataaataaatgtatatacaagcttaagaactcaccaaaattggcacatgcttctgaacttgcacacgctgtccattgcaagtgaactcataggacaaactcattagctcatccaatggtggaggtacgagcttttgaaatttggcatcccaatctccctcatcatcgccggtctctatatcttctacagaaacatcattggtaggatcaacgagattatcaaggaaattatccggtagacccttgaagtcctcttcaggtaaccacaaatcgttattcatttgtcacccactgtacaaaaaatcatagacaagatatagaaaaaaacataaacatatggtataagagtaagaaagcaaagctaagtttcagagatttcaattgaatataaatgcgaaaatagacatcaactcgtgaattgattaataacaacggtctcgttgagtgagaataaacataaaatatgaagacttcagtttccattagctcacttaatatgttgactcaaaagtaaacaacataaacatataaaagcaagaaagccaagtcaagtaacaactagcaaatatcattttcagagatttcaactgaataagaatgcgaaaattgacataaacccgtgaattcactaataacaattaattaagaactgtttggtcaaatgagtatacctaaaatagtgaagtatgactaaattcaaag

SEQ ID NO: 31138 - DNA, 1624 bp, Arabidopsis thaliana landsberg
actcatattgtagtgttattccattctgtccctaagtatagctctgataattttcctttatcaggttggttttattaacaagagcgatcctggagtatcaaacaggatccctttatgctatgctgtccatcttcctactattcctgctctgagaaagtaggatattctctttacgtgcatgtatagatatccttttaggggttttctgcggtcttattcatttattttcatcgttccattttgattttaaccacagggaatacggtgagcttctggtgagttgcggtttggttggggaagcaatcaccatatttgagagcctggaattgtgggataatctaatctactgctactggtatttttttttttttttttaaatactgcgttgtgatgaattcagcttcgcttgtttcccccttcccctctatggattctatcttctgttgcaaaacttattacgtgacttgaaattcagccttctgggaaagaaatcagcagctgtagatctcatcaatgcacggcttcttgaacggccaaatgacccaagattatggtaatctgttatttggtggtacccttagactgatcttttcttgttgcttatatcttaattaataaatcactgtgaagtgccataattatctgctgtgaacgtacgcttaatcttattataagcagatatttctttaagctttgtatatacgagagaaagttattatggtatcccatcgttaaattaaatgtgatgataaatattggattcaggtgttcactcggtgatgttactataaatgattcctgatatgaaaaagccctggaagtttcaaatgataagtcagttcgtgctaaggtagtttgagacagaaaactgaaaaatcttttatgttcttctctcttagtccatgctctaattatcttcatcttgcagcgcgctcttgctcgcagcgcatacaatcgcggtgattttgagaagtcaaagatgctgtggtaccgagagcaacttccggcaatgttacaacggcggggacaggttcaccatgcggtgcatgcaagttcttgaggaggaagtgcgcatccgattgtatatttgcaccgtacttctcatcggagcaaggagcagcaagattcgcagctattcacaaggtgtttggagcaagcaacgtttctaagctcttgcttaatgttccaatccatgatcgatgtgaagctgtcgtcaccatcgcctacgaagctcaggctcgtcttcatgaccctgtttatggatgtgtctctcatatctttgccctccaacaacaggtaattgaccgagtaaatcggtagtgctccatcggtctttatagactttttgtttagttactaacggaatttatgtggtggttgactcgtatgatatttcctgcatgagatcgaatgttctctgaatcttgatgaattagctaggaacaacttcttttcccatcatttcttttgttttcacattagggcttttcttcctttttgctttgcctaatttttttttaaaattaaagtttgagattttaataatttagttttaagaaaacgttacaacgataaataatcagttttccaataaatatttgtcatgatgttttcatttcttatg

SEQ ID NO: 31139 - DNA, 2058 bp, Arabidopsis thaliana landsberg
tgctctaagtcttcttcaaaatttgggaactatgtagtagtagttaaacatatcccacatttggttgttcttcgttttcttcttaccatccttccctagaggaagacctgtcgaaaaacccgagatttagaaattaatgtgacatcgattcatcaattttagttaaacttaaagatatgatgagcctaaatgcatctattgtaccaactgcatatatctctagacttctaaagagatttagtcatttagatactaatccccgggactaacctgttgctgaagaatccgcgctctttgcttccttgaaagtttcttcgctgctcatcggctggtctaacccaggcatcgacggcaccacgtgatctgggtctctctgtagattcaaaactcctggtttcatcaattgagccagcccgggaatgtgttctttctgaatatgttccggttctacctgcaccagacccgggcctctcaactggtttctgcctgaacctgactttgtcgtccaattcacgggttagtatttccagatctttctctttcccacgtattatttctggtacatcattgtgattattattactgccaggttcttgatcagattccttgatctctggagcaatggattccttctcgagttttttccttagctcttcaatctcttctttcaacatcttctcttcttctgtttcaggcctggaaaagttggtttttcacaacactgagatcaatagccgattatcataaagccaaaaaagaagcatcagagagttcataacataagaatcttaaaatctaggcggagattatatagcatgcataaaccgaagggtatatacccaagagaaacaagcagaaactatctaacagcctctggaactcatcaatgcacagagaggcagaacaaaaataacatactaaaaacaatgattaatgtcaaaggagctccattgaccaaacagaagtaggacaaagaaatgaaacatagtatcacacaatttcagaacttcacatcatattgtgcgatctggaactcaaagagcataataaccatgaagactttataactaaagtacaaagaatcccattagacactaaggatctgaaacctaaagccaaacggcaaactattataagttctcagttccatacattttaatctctaaaattcatccaactatattaagactgactcttatgccataatgcaccaagcaattaaatattacttcaatattcagataactgcagcaacatagaattgatggagagcaacaatcctcagagaaaattttaaaagaattccagatgaataaggacctgtcaaccctgcgatgctcgagttccaaatccatcttacgccaatccttcccttgttcctctaacaacacttctcgaggctttgcatcgccaaaaggattcacctttggtctcggtttcaccacattattcaatcctgaactctcagacctgttagattgagcactagaaggtctactagaatgtgcactcgttggcctacttgtttgagaacttcctttcttagcctcaatatctgagtcaatcttcttccaatccaaacctttctccgccaaaacatcctccctcggtctagctgccccaaatggattcggcttactcgtcttctcaacaacaggtggagtctcactccctcctgactcaaccttccgtggttccaaaaccaaacgacgacgttcttcctgacctgaatcaccaaaactcgacccaaatgtagatgatctaaccggtgcttgccttttccctgcaccccaattatcaacatcatcagctctagataatcctccacctccaccaccaccgcctccaaaaccacttccaccacctccaaaaccaccaccaccgccactgtaacgaccttgtcgtccttgatccaaagagggaagtggtttcttctctttcccccaatcatcaacctcatcagctctagaaggttgaggaaaatccgaaaccctagactgattcccctcctatcatcatcaaatccacgacataaggtctccttccacaccaccacca

SEQ ID NO: 31140 - DNA, 926 bp, Arabidopsis thaliana landsberg
  unsure (1)..(926): unsure at all n locations
ggatttgcaccaatgtaatcgagaagtttcagacacaatagagtatatgaacgataaggggagttgatgtattgaatccgccgggactgacagggctcgaacccacagcttccacccgcgggaagaggattgtaccatagaagcaaggaggtaaacctctttccaatatataacatgaattctagcaatgtagttgggttttcatgatgatccnnnnnnnnnnnnnnnnnnnnnnnnnnnnnnnnnnnnnnnnnnnnnnnnnnnnnnnnnnnaagaagtttttttatataatgtatttgattttgatttatgatttttgcatttcttacgttttctatctatagacacaccaattttcttaaaacgtgttcaccgaactagagactggctcgcaaatccgtcgcaaaaagtgcgaccgattatggtactcgtaagttcctcacaaattatgaggaatatattactcgccaattttgcgagggttttgcgatatgtgagtttcttcctcgcatgtatctcgcaaaaccatagtaaatttgcgaggcacgttatccctcgctaagttccctcgcaaatcttttgtttttttgtagtgctggtggctataatttgaaaccctaaagtatatgtcacatatcaggaaagctgagtcttcttgacggagaagtttacggcggagaaataccatgcatcaatgtcttgagtataatatttggtggaaaaaaataaatagattattgttagtggttatgaatgttgtgagttgtgactttctccacatcgaacctaaaattgaacgtaaaaatcattaattgtttttatgaagctgccatgttattttgcaacataatccatttaatcattgttataaaataacttttatgttggatttgatgacataatttatattaaaaaaaaaatttaca

SEQ ID NO: 31141 - DNA, 1903 bp, Arabidopsis thaliana landsberg
gaacatatgattgaacaaggaacctaaagagttcaaattaactaatgtacacctgaggatgtccagaagaggtcaacactagtcaaagaactaagaaaaggataaaggaaaatgagtccaagactacagaaatacaaacaccataaaaagctacacatcactccttggtggttttgttgatgagagacttgtggatgtgagggatcacaccacctccagcaatcgttcccttgatgagtgtgtcaagctcctcatctcctctaatcgccaactgcagatgccttggcgttatcctcttcactttgagatccttgctcgcattcccagccaactcaagaacctctgctgtcagatactccaggattgaagctgtgtagacggctgcagtggcaccaactctgccatgtgccgagactcgggtcttcagttgcctgtgaattcgtccaactggaaactgaaaaaaaaaaacagtatcagtgtgaccaatctctctacttgtatggctatgcacagcatcaatgtcaaaacagtatcagcgcacactaaatagttccattaaaatagtataacttaataaaaaacagaacattgcacatactagaaccaaacaaaacatattaaaaccctcatgactcatcaatatcaatagtaagctacagagtaagggaacatttgggcacataccataagacactacctaaacaatgtggggagacaaaaacaacaacaacatgtattctcagatgaccaagcaaccagtgagcaagcaacacaaatttgtataattaacacaaacattgacaaaaacatcaacatggtaccgagtaaaagaaattacacatatccagcaagtttacttcctcatgcttttacatagaaccaaaaaaacaaatctattcctaaaaatgtaaatggtactgatgaattaggaacgaatcagagtcaaacaaggtcgtcgaaattagggtttaagagatgacctgaataccagcacgagcagagcgagagatgggtttcttcttgtccttgtctttgtccttgttagcagccatcgtcttcgcagctacgagtccttttccacctttgcctgccatgtctcttgaaattgttgtttccttcttctagatctaaccgtacacagtcaaacaaaaacaaaaacgaaatcagaaaaagaagagtataatgcttaaatctaccagatctattcgaaagaagactaaatcgaagaacagaatcgagaatcgatccaagaaagacagaaacagatctcgaatattggaagagagaaaaagagaagtaaagtaccttgagacgacgacgagagaatgcaaaaggaaaaaaaggacgaaagaaacgaaatctggttgaatagaatgggattagagttttaaaattaaaaagtttggtgggagtttttaaatattttcaaaatcttggggggaaacctacgctttggcggttaaatttttcgctttggagccttaaaatgtttcaacattttgccattaagccctctatttcttagaaacgtttaaaatcagcttttttttttcttttgtaacagaaagatccatttttcatgagaaaggttgtaggcactatgcttgtggtaaaactaaatggtaagagaatattatatgctttggtttgattgttaagatttgagattgttagacgtacctttgtatgatttcgcttcgtgatgaatcaatttcttcgagttattgtgatgaatttgtgattgacgtctctgttatttatattagcctcgtcataaatagttcaagattatgatttatattttcttttgtttttaggcaatacaattgtggtatccacaactcaataaactcagtcagatatctttctttttcttctgtaaaactattaattgtgtggcata

SEQ ID NO: 31142 - DNA, 2749 bp, Arabidopsis thaliana landsberg
cacaaacaccagaacttggtccattaacttacgtgcagatcatgattcatgacccaaaatagaatctttcgaaacatataactttgtcttataggaaaaagtttctacttttatgcatttttcgtaagtagtgtaagtaattaagttggtacatcaaattgcaggtaatgaacgtggtttgcaagaatggtatctctcagagccaacgtgatagcctaattgaggtattaattctaattctgatttcattattattcttttaatttttattgcataagacatttattagttttgctttaaagtctttgcctttgtcctttttcttgagtcaggttgctaagtcatacgtagctgaccaaagagttggttacgcagaaccaacctcgggcgttgagctttacctctgtccaacactgggtgaaaccttggatttgttgagcaaaatcatctccaaggattatcttgatgaggtcaagtgttcagaagatatcgggttgattggtgttgttgtgtggaggcgtgcagttgtcgcgtctcctggctcacgccataagccgggattcaaacgtcagcattcttctacaggcactaagaggtctgtattggctccagaaaaccaaaagtctagaagtgtgagtgttacgaatccttctgttgtaaatgttgaatccatgaggaatcatggtttggttggttgtgatgatgatgatgaagacatgcctcctggatttggtcctgtagctgcgaaagatgacgatgatttaccggaatttaactttaattcctccagtggaccggttacttcttctcctcgaccaccgttgcagtcccggtctttggatcaagtaagggagctcatactcaagtatggaaattcaacaggtagtggtagtaaacgaccatgggatggtcatgatgatgatgatgacgacgacattcctgaatggcaaccgcaactgccaccaccacctcctgacttgagtcctcaatttcatagcggaaccatggccagaccaccagcacaacgacctgttgcgggaccaccgagtggatggaaggccaatcaaaacgcacctaggcaacaacagtacagtgcacgtaggaacagaggattttgatctttgtgaatacgtttgtgtaattaaagtttgttaggtctattgacgtctctatcatcggcttttaagtgtttctatagaattgtaaacctttgaataatggagtcttttaagcataaaagtttgaactcaacacaatcaaggatttgtacagattacaggaagaaagatctcggttcttcaacccgctaagacccgcttgagagcggatttctgctccgttgtcaatcttgcgggaaactgaacatcgaacttaatcttaagatcacctttgtttcttggttctttagctattggcatcccttctccaggaaccacaaactcatacccgggactcacgatttccgcgacaccaacgggtagattccgcccatcgagggtgttgatattcacagttgttcctcctatagcttctgcaagcgttactcttctgcttgtgatgagatcattcccatctctcgtgaacaaatcatgtggtttctcgtctattacaaacaccaaatcagctggtaactgattcacttgctcatttcctttgtctggaaactttatctttgtcccttttttccatcctggtttcacaacaatcgtcaaaatctctgtctcttgcgcttgtctcctgcaccatccaaagaaacttgagaaacaagtctaaaaagattaaaaaatacaaacaaagtaaagactatagagaaagttgttacccattagcatcaacaatggatctagagatcttcattttcctagttgatccagaatacaactcttcaaggctacaaggcaatttactctcaaccggtggaggtttcttaggcgcaggagtgccttcactgtaagttctgaatatattgttttcgctaccgttgtttccaccaccaaacccgccaaacattcctcctccaccgtctgattgaaacctcattgaccttccaggaccaccagctgaaccaaatccaaatggactacttccaaagaactctgcaaatatatcttccgcatttctagggttaaaacctcccgctcttccattgtttcccgtgctcccgggaggtggcatatcgcttaatccttcttccccgtattgatcatacaccgctcgcttctgcggatcactcaaaacctgaaacattacctcatattcttagcaatgcagcaacattacctcatatgcttgaggagatacattttgttttgcttatatcccaagaaaacaaactcatttacatataactttgaattattagctaaagcaatggatctaagggaacaagggaataaaaattagcaaccaaaataaagactcgcctcataagcctcagagatttgcttaaacttggcttcagcttctgttttggtgttagggtttttgtcaggatgccatttcatagccaattttctgtaagatttctttagatcatcctctgttgcgttcctattcactttcaatatatcgtaataatccaaacccatcttttttttgctctcgttttatataatttaatcttctcttctaaaacaaataaagaatcagatcttcaaaatctcgaatatatgacataaaaaatgaagaagaaaaaacttcttgttctgtagaaagaggacaaacaaaaagatcaccgacttggtttttt

SEQ ID NO: 31143 - DNA, 2569 bp, Arabidopsis thaliana landsberg
taagatagattatatatatcagaatgataaataaatcgtcaggcagacaacaggataccagagagatgagacgggagcagtatgagaagatagtcaagtcaacgaacctttcgctggattatggactgaatgaagcattacttcatcatgatcctcagaagctgaaaccaccaaagtccaaagaaaaaaagtttgttatggcaaagtaagataaagcaaactaatttgaagtgaaataaaaagaaaaggaaactgatgccaggaaccttcttgctcatcaggaactggaattgattcttgcacttcatctttcaagtctgtaagtaaagataaaatacatggttattctctttgtcaaatgatttggctttgtgtatgtattgtaataggtaccttccggtgctttatccaaattctcaacttcatgtgagttatgaacttctggaatgacaacaccattgttttcatctgcatatattaacaccaaaatttggtaccatagaaataagaaggaaacaaaaatacagttaaagctagttgtctctattacctgccgaatcaagctgtaatgcgcggatctcagcctcaagatctgcacggcgtaaaaatgtataggaaataagaattatcacctccaacaaaaaacgtacagacatttagcaaagaattccacaaaatacccaatccctcgctaactgagagttaaattcactcgaattccaaagagaaatagctaggtcagttctacgcaagccaattaaaaccaaccaatcagctaaaccctaatccgatttctaatccaaaagccgataaccctccttccgatttaagattaactaccagagcaacaaatcaatcagcttcataatcgaagttaacacagtaaaacgcaaaaattcaacaaaaattgaagaaaagatccgatcgaccaacaaaagtagtaagcgcataatcgagaaatcgagagagaaagaagacacatagaccaatgactagaaagagagagctcgagaacccgtacccatggcggattgaagaagcgaacgaaaggaaaagggtttctaggttatctcgcgaaagaagaagaagaagcgcgttaagggatccaccaaacgaactagtgccgcttctatgaggctctcatttttgcccaggtggatcttttatattccctttttttgcgtaatcaaatttttcttatttcacatcccaaaactcacgtgtcaggtttaacgtaaatacgacgtcggttagctaatataaggccataatgaaagcccaactaatgggccttagttacccttgtgtatgattgttggaaggcccatattcactattgtgagcaatatttattttgtacaacaattggaaaagcctttgtaaaaagacactagattttcaaccgcggggactaattatattttaaagttaatatatataaaagtttgtaatttgtaactatctatgtaactttctataaaatatttttattttatagtttagaattgttactaagtaacgtcctgccaaacccgtcccgccaacccgtcccgtaaaaaaaactcatttattttattaatgttgatcttatttatcatatgtttatgaatcattgtctaaatattttgtaattttgtagtaattaaatgctatcaaatatctctgcggtttgatgattataattgaattgtaatagtcatgcagaaaaacaatatcaataatgataattttgtagtaattaaatgatattaaatattttgaaagttttattttagtaaccaatcgtgtagttaatgtagagagattttagaaaaattgttaaatgtcaaatatttaattcgaagatttttttctaattatcaaaaacaaatattaatctagtggcaaccattgtaaataagtccaactacaagatttatttcacaaaatggctgcaaaaatgtatatttagatgatagaatctttaaatagttttggttttctcatcttcctattcatgtaatgtaaatatcgattttgtgttgtttcctgagcaagttaggaaaagatttcactcgtcaaaagagatattcatacatatcaacatgaatggtttgctaccgataacccaaaattttcccatatgttcgaatgattttgcgagtgagaaagtttttttatgaataaaagtttttatgaaagtctaccatatataacacttgggccaagtccagttgacaaaagtggtctataagcagtatatgcacacggtgaaatcgaactagattgggatgagtttacaagtttgccttaaaaccgtaagcttctaacttttttaaaaaaagattgtaaaattttggattatgattatttgttaacgtcaaatatttctatgaaagaacttccattaattaattattttcattagacaaagtagttatagtgtccaactcctatggatttttcaagattcaaaagtcattattgtggtataatatacttctattttaataacaagccaaatatttgtgaaagtaaacgtagcaattattataaatttattactctaagaattttcatgtcgcattca

SEQ ID NO: 31144 - DNA, 1018 bp, Arabidopsis thaliana landsberg
ctgaaaattgaagattctcggttaaggaaatcatacaactttgtaatacggaaaacagtaaaagagaaaggggtacggggaatgatgttacctcatctggagtctgctcggcacgaagacgacgaccatcaaacaagaaagcaattgagttgaaatccacagattgacggtcacagtaagcattcatcagttttttgagctgagtgcttctcttgatcctaaagaagacttcattaccatcctacacaagaaaaattaccaatgattgttacttcaagaagagtattatatacgattttctcaataccaaaaactgtatctataaccaaccaagtaccaacaacgaaaaatgcctaccaatgggtacagaaacataagcaaaacaaatcacactttacatagcaacgaaaacctttcatgaaacaaatgctccatactccaaaagcataactacaataagctatagtgagagttcaaggttataaattgttagtttagtcacaactcacaacattacaacaatttcttctttgatatatactgtctccaccaatacacaccctcacacatacaagagtagtaatgttttgtttgctacaattatgagtcaaaacataattcacaattctcagataacttttgtttgcttcaaatttaagccaattaaaagtcacgcttacacaataatcactacctcatacacaagctaaccagaatagaaattgggaataacgcagacaaactcaaaaccctagaattgaagcaatcagaagctatgaagatcctaatcacactcaaaactttaaccagacaacgaatcgttacacaatgcaagaaatagaagtcgagagagtgagtgagaaatagaaaacctgtcccttgactttgagattgatgtgagctccttggtcaggcttcttgtcttcttccggagtagcagacatcttactttattatcagattatacggtcggcgattggaaacaagaacttcgatctgcgatataagcgaagcccta

SEQ ID NO: 31145 - DNA, 2630 bp, Arabidopsis thaliana landsberg
  unsure (1)..(2630): unsure at all n locations
ccaaattttatttttaaaacaacctattggatactatactaagaaaaaaaaaaatattttgaacattatttctgtaaacaatcggatgtaagaaaatcatgtttctcacaatctcacttctcttaaagaaagtcaaaaactgactacgagattataagaaaaatgagtaaaccgacttataaatttcagaaaatcagaagcccaaaatgtttagggtttagggtccaaaaacgcaaagcccaaacccacttgcattcttcttccacctatccacagcagcacnnnnnnnnnnnnnnnnnnnnnnnagagagatggaggcacttaaggtatggagtctaacggcgacgccactgaaacaattactccgtctatcctcttcttctacacgtctcgccaccacaatatatggaagaagatcctaccacttatcacctgcgctgcgatgtgcctccgcagcttcttcttcttcttccagtgccacgacggctgaaacttctaaaccctccggccgcaatcgccggtctgcgtcatcttccaattccacctctgatcgtgaagctatccgctccattcgccttaaaaaggtttgattttcactttcaaaatgtgagctttacttaaatttccctttggaaatatgttgggtgctgatcaatgtttttggttcataggttgtagaattgagaggccaaggtcttgaaccttatgcttataagtgggaaaaatcccacagtgcaaatcagcttcaagagatatataagcatttagctaacggtgaagaatctgacaatgagattgatcgtgtttctatagctggtagagtcgttgctcgtagagcctttggaaaacttgcattcttgactctcagggatgactctggaactattcaggtttcagtcttgttctattttgtttagatcatttagatggctttgatcacacttcattagtagctggctgtgacatttccttgtcgatacaatcgtttatttccccttttgttttcatctgctgatctttgcagctttactgtgagaaggaaagactttcagatgatcagtttgaacagttgaagcaatttatcgacattggtgatattttgggtgctagtggctcgatgaagaggactgagaaaggtaagcttgactaagatgattatactcgatggagaatcttttttttggggtttgttttgtaactgtttgttctctaattttccaggggagctttctatatgtgtgaattctttttcaattctcacaaagtctctccttccacttccagacaaatatcatggtctaactgatattgataaacgttaccgccaacggtgagctctatcttctgtctatgtaaatccctgtttctaattcttaaagaaagctcataagttttatttgtgttccgcttgctgttgttcttactaggtatgttgatatgattgctaatcctgaagtggctgatgtgttccggagaagggcaaaagtaggttatcaaaatctttaaactcccatttgagcatctagtttcttttgtgcatgatccctaaacaaaatgctagttagagttagatttacatctttcagtgacactcatataagattgttagagttatttttgtttcacaacaaatcaacaatgctcttcttctgttttgttgtagtagatcgtttcagagatacgcaagacagttgagtcttttggatatttggaggttgaaactccagttcttcaggtttgtggccaccttcattctcaaatagccacttaatattgaatgtataggagtcggtttcatgaagttgtgaaaactagggagcagctggtggagctgaagcaagaccttttgtaacgtttcataactcacttgggagggatctctacctgaggattgcaactgagcttcacttgaagagaatgctagtgagaatcatcttctattttcataatatattggcatttctgccgttcttcttatctttcttttggctgagaatttaccttagaagtgtattggaaggtaaatgtttttctctgaataaaatccactttgtcatcacaggttggtgggtttgagaaagtgtatgaaaatggtcgtatatttagaaacgaaggcatttcaacacgtcacaatcctgaattcacgaccatcgaggtagttcaagatatgcctctgctcaatcatttgcatcacttgggcttccatactctttaatggttacctgatctataacagttttagcgttgtttagatgtatgaagcttattcggactaccagagcatgatggacatggcagaattaattgtcactcaatgttcaatggcagttaatgggaagctaacaattgattaccaggtgaatatgctctacgtcacggctagtgtgtagagataaacttatctaaattctatgttggttgtaatttttgagttattgagctgtgattgctctgtgcagggaacagagatctgccttgagcggccttggagaagagaaaccatgcataatctcgttaaagagataacaggaatcaatttcagtgagctaggggaagatctcggaaatgccaaagacacagttctgctcgcactccaggacgtgcttgagcccaaggacaaatctggaatt

SEQ ID NO: 31146 - DNA, 1770 bp, Arabidopsis thaliana landsberg
tctcgaaagttctcgacggattctccaacggcgaacacatggataacgccacgtcagcagcaatgggggcttgcgtggagcttatcgggctagccgttgatcaactcaacgaaacaatgacgtcgtccttgaagaactttgacgatctaaggacgtggcttagctccgtgggaacgtaccaagaaacgtgtatggatgcgttagtggaagcgaacaaaccaagtttaacgactttcggagaaaaccatttgaaaaactcgacggagatgactagcaatgcgttagcgatcataacgtggctagggaaaatcgctgacaccgttaagtttagacgacgtcgtttgttggagactggtaacgccaaagtcgttgtagctgacttgccgatgatggaaggtcggagacttttggagagtggtgatttgaagaagaaagcgactatcgtggtggctaaagacgggtcggggaaatataggacgattggtgaggctttagcggaagtggaggagaagaatgagaaacctacgattatatatgtgaagaaaggagtttatttagagaatgttagggttgagaagacgaaatggaatgttgtgatggttggagatggacaaagtaagactatcgtctctgctggactcaacttcatcgatggaacccccactttcgaaaccgccacatttggtaagtacatatatacaagtgattttttttgtcctaacgaaaagtttttgtgtttgtgtagcatacaaaaatactagtatattctataaaaaaaaaagaagattgatttatttttccttctaatgttttagctgtgtttggaaaggggttcatggctagggacatgggcttcattaacacagctggtccagctaagcatcaagccgtagctctaatggtaagcgcagacttatctgtgttctacaagtgcaccatggacgctttccaagatacaatgtacgctcatgcacaacgtcagttttaccgtgattgtgttatcctcggaaccgttgattttatatttggaaacgctgcggttgtattccaaaagtgcgagatcttgcctcgtcgtcctatgaaaggccagcagaatacaataaccgctcagggccggaaagatccgaaccaaaacacaggaatttctatccacaattgtactatcaagcctttggataacttaaccgatatccaaacattcctaggccggccttggaaggatttctctacaacggttatcatgaagtcgttcatggacaaattcatcaacccgaaagggtggttaccgtggacaggagataccgcgccagacacgatcttttacgccgagtacttaaattccgggccaggagcatcgaccaagaaccgggttaagtggcaagggttgaagacgtctttaacaaagaaggaagcaaataagtttacggtgaaaccttttatagacggcaataactggttgccggctaccaaagttcccttcaactctgatttttgatattttttgctggaaaaggctggtctgaaacatgatgcatggctagtcgttctttaatttgtttataacgaacatacaacattcccttctaaaacattttcttgtattggctttatttcaaagtgtctgaatttgtttctatatattcgtataatttcggaagtgtttttccttaacgaaaatcatataatatgtatgcgtcaacttatacaatcaagttcctatttatgatcatgatatcaaaataggtttttttttttttaatttaacattga

SEQ ID NO: 31147 - DNA, 5211 bp, Arabidopsis thaliana landsberg
  unsure (1)..(5211): unsure at all n locations
tatcttatcagttataaaaactctttgagctcctagcagaaatcctaatttagcatagttatctataatggaagtggtgacatatatattgttgtcagcgccgttacggatggcaaaagcgtggatttccttaccccctttcagatttgaactatatgtcaacgaaggaagaaggctcgaaagggtcaccgtgtttggcctcgagccacatcttatcatctccctaaatgagtttataacctcctcatgatggttattctgcataagacccgaaatcatagcattccacgtactcagaccaatgctttccatttcactaaacaaagccattgcttccttgacaagaccatgagccatatatccagaaattatagctccgtatgtaaccgaatctttctcactcatctcatcaaacaatgctcttgcataatccaagctaccacatttagcataaaaaccaatcacagcattacacaaggataaatccatctgaatatgattttcaatcatcttcttgtgaacttccaacccgaaaataagatcgcttgactgtccgcacgcctggaagacgcttatcacagtgactccattaggcttaaaatcagagcaagctaacatcgctttatacatcttcttacagtcctcaaaagacccactttgagaataccctgaaatcatagaattccacgaaacaacatctctctcagacatttcatcaaacactttcctcgcagactcgatgttatcacactttgtatagtacgttatcatcccattgcccacgaagacatctgaatcaaatccacctcgtataacaaacccatgaacttgtcgagccaatgaacccaaccagaaatcatcacagcctgacagtgccttcaacacacaagagatgctaatagaatccggtctggcagcatcggaagagtaacaagaggatccaatccaggacaagaacaacgagaaagcatcgaaatacatctcacgcgaagtataagcgatgagaagtgcgttgaaagagaaggcatttctaacggtaatttcgtcgaacacatggagtgcttggcggaaacgatcctgcctagtgtaaaaactgatgagctttgacgcgaggaagttgtccggcttgatggagaagacgacaatacgcgcgtgaagctgaagcacgtggagaggaagtcggtgacgggtgaagtgctggatgaggtgaccgtacgcaccgccgtcgaccgccgccttgtttagcaagccttgcaaggctcgttgaatttcgaatcccaacttcattcatatctaaccaaaagctaaaccggagaaataaaacaatatgaatatatagaggcaatttaacgggcttattaatgggccttaaagcccatagtgtcgctgtattacagaacggagttttgaaatcgatttgacttttttagtttcatgtcttgtctgagaaattattattgtcgagctttcggttataaacagtctcgatcttgctacagtcgatcactgaatcgtgaaatagctaacgagtcatctgaagttgagagacgagctcgttctctgagagttttggatatcatatcttcgaaatctggtggagtttcgaatcgtcaggaccattttggtttcgttcaggaatttcgacaaacagattcgtggcgattcagaggtcaggcaatttccgaggattttgatctctcaagaaccaaaaatggagtttcaagcgtgctcgaagaagttatgctggaggattcttcaagctctgtcaagcgagatggatggagtttcgatgcttatggtttatcatccgccgtgagatcttgtgggttgaatcgagactttagaaccggttctgggtttcattgtttagcgttgaaaggtgggtttatatcagatgtctacttaggaagttctctggtcgttttgtacagagattctggtgaagtagagaatgcatataaagtgtttgaagaaatgcctgagaggaatgtggtttcatggacggctatgatttcagggtttgcgcaagaatggcgagttgatatctgcttgaagctttattcaaagatgagaaagtcaacctctgatccgaatgattacacattcacggctctcttgagcgcttgcacgggaagcggagccctagggcaaggaagaagtgttcattgtcagacactccacatgggattgaagtcgtatctacatatctcaaactctctcatctcgatgtactgcaaatgcggtgatttgaaggatgcttttcgtatctttgaccagttttcaaacaaagacgttgtttcttggaactctatgattgctggttacgcgcagcacggccttgcaatgcaagcaatcgagctctttgaattaatgatgcctaaaagcggaacaaagccagatgcaatcacatatctaggagttttgtcatcgtgtagacacgcaggtcttgtaaaagaaggaagaaagttcttcaatttgatggcggaacacggcctgaaaccagaactcaaccattactcttgtctagtcgatcttctcgggagatttggtctgttgcaagaagccctggaactgatcgagaacatgccaatgaaaccaaactcggtcatatggggatctctgctattctcttgccgtgttcacggcgatgtctggaccggaatcagagctgcagaggaacgactaatgcttgaacctgattgcgcagccacgcatgtccagctggcaaatctttacgccagtgtagggtactggaaagaagcggcgacagtgaggaagctgatgaaagataaaggactgaagacgaatccgggttgcagttggatcgagatcaataactatgttttcatgtttaaagctgaagatggtagcaactgtagaatgctagagattgttcatgttcttcattgtctcattgatcacatggagttcctctaatattcagggttctctctcattagttttatagtgcataccagatccagatcttttctataatggatcaagttttgctttgaacgttttcaacataacctctattactaatgaaaagactttaatttgtatagttgagtaatataaacacactaatttaataattaaccaggtaatgaaatgaatgtagctgtataatgcggtaaaatgcaccaagagtttctctatgacgtaatgtgaagttgagaaacacacgccatcaaaattttctttggttaataattanaattttaaggtccaagtttgcacgattaattcaaaatttactacacaagattcataattaaggaatcgaatataggaaagtgtccaactggtcctctcttatatacccttctccactaataccgcgctcagaagacgacgacaaaacaaaaaagttgcgagagacagagagaaacagagacatggatctgaaatgggatgattttttcaacgattacgaatggctgatcgtgtttctgaaaggtatggtgaagccagcggcggcgctcgtggtggtgcttttggcggtgattctttcatactcgcagaacctatctttggaaggagaaatgatatactctgtttcccgatcgtttcttcaactctctgttatcggatttgttcttcagttcatctttaaccaagagaactcaggctggatcatccttgcgtatctcttcatggttagtttcaatcaaactcaggatctgctgctctgttttttttaattattctttttatttgaaatgatttggtttccgaacaggtctctgtcgccggttacactgccggacaacgtgcgaggcacgtgccacgtggaaagtacgtggccggattatcgatccttgccgggacttcaattacaatgttcttgctcgtcctcctcaacgtctttcctttcactccgaggtatatgatcccaatcgccggaatgttggtcggaaatgccatgaccgtcaccggagttaccatgaaacagcttcgagatgacatcaaaatgcaactcaacctggtaaaaaaaactataaccaaaccaaattcccggttttattagattttccggtttatttgattttgtcgtgaaccgtaggtggagacggcattggcactaggagcaacgccaagacaagcgacgttgcaacaggtgaagagagcactagtgatctctctgtctccggttttagatagctgcaaaaccgttggattgatctctctaccaggcgcaatgactggtatgataatgggcggggcgtcgcctctagaagctattcagcttcagatagtagtcatgaacatgatggtaggagcagctacggttagtagcatcacgtctacttatctttgttggccatctttcttcactaaagcttaccagttacaaactcatgtcttctcctcagattgaaacttttataaatccttataacaatcttcgaaaacttgtccaaaagaaacgcaacaacattatgtctcaaatgaaaaaactcttggtaacatgaaacttaaaaggttctaaagcaaacacacttaaaagagaaaggaacagtcgatccaatagtatacatgctacaatgcctgcaagccgtggccatgagccatcaaagttaaggagactcacttcctctaggggaagtgcggtttggctcgtaatcatcatcaacagggctccggtcctctttcgaactgtcaccaccggctcctacaacaggactgacaacagagtttctgccattgtcttgggggctaccaccgtcacggtcagatccgacttccttttgaagctttggtgatggtggtgggctcccgtctatgatctttgggctgccttcatcatcaagaaccggactacgatctctggctcttggcgatagagagtcatccatccgctttggactgcgtgatctctcctccacactcctctctcttcttctcaccggggatcgtgatcggctgaccataaggaaaataagaagtcaatcagagaaagcagttactcggattcatgctttcaggttcatacataaatctaatgcatgtaaacacctaaacataaaccaaaattttgaagtttacatgggcaaatactaacctgtagcttcggctacggctaagactccggcttgggcttcttctacgacgaggagaacgggatcttacaggtgacctggagtagcttccactgcgcctgccatacaatccaagaaagggagatgagaaagtggaaagaataac

SEQ ID NO: 31148 - DNA, 5954 bp, Arabidopsis thaliana landsberg
taataggaaacgcacacacatgcatgcatatcagagcccaaatatctgcatattcatgtatgtacacatattatattcgaagactgatatatcatacaaaccttgaagcgcagaatcaaacagggaagcaaacaaagcaaaggttgtatctccactctccgctaactcatcattctcaatcttgcaagccttgagtgattgactttctactcgacgaaacaaagcctcatcgtcatcattaagaattccaacactctccctcctggaagcagatatcgggtttgtaggtgttccttcgtaatgatcagtgtgaaagttgtcaacctcttccttaatgttttcaaggagcaatgcagtatttgttggactatgaatgttatgcccgtcatacagtaatctgttctcgctgacatttgaactcaacatttcctcatgtggcgatgtagagtgtctctttctgcaagcaatgttatttgacatagccgggcatcaaaacactatacccagattccatgaactaaaaccataacccctaataagattcagttcttagagaaaatccaacaattcaaatcgcattcaagtctcgctagaatcagctaatttagaccgtactaacaaacaaacgacaacccaggaaaaattcactttaaagtaagaagacccagaaaatcggaaaagggtagtcgaaaattttaccgatagcgacggaattgatccctaacactgagggcctcggggtcgaagtagctaggggaagtgtccatatccatatccatttcttcaccaacgaaagctaaccccaagtggtatgcagaaatatcaaatcttagaatagcagaagagcgcggcaatgctcaagttgagctcgattagggttttgtagtcgtcaaaaatctaaaacccttttaaaatcctccgctccagtagaagactccgctgagacaaagacagcgacgacgacacagaacagtcgccaccagagtttaagcaaaagctccttaaacgctgcgtttcatctttgaagcttagtaaaaaagggtttaactgtaattaaatagaaaaacaggggcagtcttgtacaagtttcataaaaaacagaccagcggaaacgagttttaagcttcccaaagcgtttgttttatcctctcagagagctttctttagtgatggcggcgcttatccggtgttgctcctccttctctcatacttccggtggccaaccaccgccgcgtgacaagtctcgagctccaggttagctcatagctcattcgctgaatcagatttccaattcagagtcactgttgctatatgagtgatcctcttttggtaatgaggcatcagaacttctagatcgaaattgtttgaggcatcaatagtttgttggttcatttcaataacattagccaattctttgtcgcttctgaagtcatctttctccataacgttttctcagagattggaaaatttgctacatctattggctactcagtagtcagaaaacctggggatcatcctcctttctccaaaattatacattcgtcttcacagcctaaggagcgacaaggaaagggaatcttacaaacgccatttgccagtgtgggatctcttgacaagttttcagcttttgaggtagtttggtgatgaattccgggatgtctagctatatccaggtaaaacacattatattgtttgactcggtttattttttgttgtcaagttttttcttagtgatagtaagcttttagatatggatgtggcagggaattgggaggctcaaattaccggtgatggcagtgttgttgacaaactcccttcagatggctacacctcttgaagctttggctgctgagatatgtgagcctgagagctccatgttcagcatgcctattttgttgcttgttgctcttattggagccaccgttggaggtagtgactagtcttttcttcaatctatgcttctatgaactgtactcattggggtttgacaacactttttttgtggtgtaccaaatcagggttgcttgctcggcagaggaaaggggagttacagaggttgaatgaacaactacgacagattaacgcagctcttaggagacaagccaaaatcgagtcttatgcaccaagcttgagttatgctccagtgggagcaagaatcccagatagtgaaatcattgtggaaccaaagaaacaagagttgatttccaagttgaaaacaggaaaaacctttcttaggaaccaagaaccagagaaagcttatacagagttcaagatagctttggaacttgcccagagtctcaaagaccccaccgaagaaaagaaggctgcaagaggcctaggcgcctcgctgcagcgccaagggaagtatagggaagccatacagtatcactccatggttctagccatctcaaagagggaaagtgaagattctggaatcactgaagcatatggagctattgcagactgttataccgagctgggagatctcgagaaagctggaaagttctatgatacgtacattgctcggttagagactgactgatccttccgcaatgttttttttctttgttgtctgtttatgttcatgtaaaatcacatagaatggatatccaaatcccttttattgaatgtaattcgcttgtcttacaatccatgggaatacataactaatcatacaactgcagataaaactttatatagataacttaagtgagatacaaacagacacacacaaacaagttctagacaaacaaaaaaaaagagaaaaagcaaagagattgaaacttgagatcggcgccacgatctgaggtttattactgatagtacatgagttgctgtgcggcggctacattctgaaagccaccatcatacatggctgcagttgctccagcggcatttattccatgagcctgccttagagggtgttgaccctgtggatgcattaacgcattcacacttgccatcttgctaagtgccaattgcctctcatagtttaggagatcagctgcagatagaccaggaactggagctggggcaggtgggggaagtgggtttgagtctgtacctggtggagttggcttgtttccccatcaccaccacaattaacatgataacaaatgtcagattgcatgctaagtttcagatgaagtaacttttgggagcagtaagatcaaatagagagggtttagagtggtaagccaaacttaaaagtacctttatctgtctgttaaagaggtaaggctgagtgttacccatctgaatagcaagagcagcttcgggatgagtgttatatctcacgaaaccaaagcctttgtctcgttggacacggacctcctcaataactccagcgccaagagcatggaagtaacggtgtagatcaagctgagttacctgcaagatagatagctgtaacgatgtacccgaaatctactaatgtaaaacttcatcaaagaacctcaaataaactgtttttgttgtgatagtattacaaggagcacttcctagtggataatgtacctctggagcaaggtttcccacataaacagtggtaaactgagaattattttcaggtgtttcctcatttaatgtctctttaccatcctctgcacaatcaaacgaccaatatggctttgttaacttaaagtttttcatattactcagggaaaatcaatgtaggttcgtaaattccatttgaggagaaggagaaaaaaacataagaatttgcacagtaatagaaagacaacctgatgagccagttgtaagttccacaacactttttccatcagaactgagcttatcatcaccagaagtagcgcccttcgtggcccagttgcatctgatttgtctgctacttaaccacttacctgagaagatgtgatagaaacaaagattaattgctaagaataaagagaaaatctcaattttagatgacactgaaacagaagttatgcaactttcagcagctcttgactaacaaatcaagaaaactttcagcaggtctttctaggcacagtatcattcagttgcatgcaaattctaagcacttcagaacaagaaagcatgagaacgaagtactgagatctcagctactatatgatccttaccattcatctcattaatggcagtttgagcatcctgcaaatgaaatcaacatttaacattaatgtaaaccacgaacaatccttgagctaaaacaaaaactcactgcatgatttaaagaatgtacattacctgttgattgcggaaggaaacaaacccaaagcctctcgagcgcccagttttttggtcccacataactctcgcatcccttcaaaatattagacacagtcagagattatgatatttgttttacaaccaagtagaataagttagttaaaaggagctgatcaagcaacagaacttacgaacaactggaaaagacagaaaagctttgatataatgttgcatcagtgacctctggactgagatctccaacaaaaatgttgaaatgacctgcaactcatggaaactaaaacattgagtatcctcaaaaacatacaaacaaaatgaaacacttcaaaaaagtcaaaacttacttgatgtatcttccctctgaccagtggcatacgcccaattgactttgataggctgtccaaacctgtaaactcgacgattataacctaaacaaaagcattcgaacgataagaagaggagaggaaggaaactatgaaaattgttccttacagatgccttccgttcagagacagtatagccagagcagcggatcttcgatcaaagtagtgaacaaatccatatgatgactgcaaataaataaaaagatgcatgctttatgagtccatttttagtaagcagcaagtagagtagtttccttaaagtattaaaaatgtgcaattgttgaggtatgctcgtccaaaacaagaaagctactatataagagggtcactttcacaataaagtagaaatcaggtggattttagaatctaactaccttatcctttatgatgagtttactgctttcaacagggccagtgcttgtaaaaatctcttgaagcaaaggctctgtgacctgtgtatggatgtttccaacatacctgccaatattagaataattggagaagttaaaacataaactcggaactgcacatttcagacaaagcgatgctaaaaaaattcactcacacgctacggcaagtactgggatcaaaaccaggaggaaggtttccacttggaacaggctctaactgcaattgccaaaagtaagaaagaaaaaaaatgaaaaggattgcaatttcttttctatccccattagaaaagcacgagaaggtaaatatcagctcaatttggtaatgacgcaacaaaactaaaacacaaagacatcacaacagataaaaggaacgaattgctagcctacaggatctggaaaccctagccatccattcaatcaaatgagaaaaagaaacacagaatatgaacaaaaattatcttcaaatgaagaacacaaactaaacccgacccggaataaaaggactcacgaaagagtcgacagttcaaaaaaaaaaaaaaatccaatttcgaccaaaattagacacatcgaagatgtaataaaggtaaaataaaaacctgaggaggagccaaaacaccaggatggtaaagagagtgttgctgcatcagagcttgttgctgcatcatagcttgttgttgttgttgctgctgatgttgcttcagtctcggattctgcattttttttccccactgataaaaagaaagaaagatatctctgtttgtttctcctagacaatttttgattttcctccgctagggttcaggtactatatcgttctcgagatgaagaaagaaaaaaaaaaaactaactaaaaaaaaagaaagaaaataaaaaaagaaaaaggtagaaagagaaagaaaaaaaatcagagaggaaagagaaagaagctgtc

SEQ ID NO: 31149 - DNA, 3635 bp, Arabidopsis thaliana landsberg
tattctctcgatgtataaatagaacccatgtgtgaatgaataaaccaacactttacgacttatttcatggtatcagagcaagttttgctttaaacctatttttctctctaaaaaaacctgccgccgtcaaatattttgactgcatcgtttctctcttctactttgtcatcactatgtccggagctatcgtccccgtgactactccatctccttatggtatcactgcatctgacaatcccggtgctttgatttcctctgttatattaaaagaagacaattactctgaatgggctgaagaactcatgaattctcttcaggcaaaagaaaaactcgggttccttgatggtacgataccaaagccaacaacagaacctgccttgtcatcatggaaagctgcaaattctatgattataggttggattagaacatcaattgatccaaccatctgttcaacggttgccttcgtgtctgatgcaaaagatctttgggatagtctcaaacaacgattctccactggaaacggtgttcgtaaacaattgttgaaagatgaaatttcggagtgtaagcaagatggtcaatctattcttgtttattacgggagactaaccaagctttgggaagaactgcaaaattacaagaccagtcggacttgcacgtgtgaagttgctcccgacatcgccaaagaacgtgaagacgacaaggttcatcaattcctgctcaatttggatgaacgcttcaggcctattcgctctacaattacagatcaagatcctctaccggctcttaatcaagtgtactcgcgtgtgattcgtgaagaacagaggctgttgggtttacagttcaagccacaccgcttccgcctacacctcaagttgcggcagtctctgcacctcgatttcgtgatcgctcctctttgacttgtactcactaccatcgtcaaggacatgacattacagagtgttttttggttcatggttatccagactggtggttagaatagaatggttctaatggctctgctggacgaggcacttccggtcgtgggaacaatggtcgtggtaacaacaatcgtggcggacgttcttcatcttctggttctcgtggtaaaggacgtgctaacgctgctagtacacatccacctcctacatcaactccttcaaatgcggaccagattaatcaattgatctctctacttcaagctcaaaatccagccacatcttcacaaaagttgtctggtaaaacatttactacttacgttatcattgacacaggtgcttcacaccatatgaccggtgatatcacattactcacaaatgtggaagatatcattccttcgcctgtcactaagcctgacgggactgcctctcgtgccacaaaacgtggaacgcttgccttacataatgcatatgttcttccagatgtgctatttgtgccagattttaattgcacattaatatctgttgctaaattactaaagcatactggatgtgctgcaatctttactgatactctttgtttcttgcaggaccgttttacgagaactttgattggtgcgggtgaagagcgagagggggtgtattattttacgggtgttcttgctgctcgtgttaacaaaggtttcaaggattcctcatcggcgacattgtggcatcacagattaggacatccatctaccggtgttttgctttcatttccagagtttgcttcttctagtagtgatttagagatcatcaaaagttgtgacatttgttatcgtgctaaacaagcacgtgaagttttttctccaagtcttaataaagctacagtttgttttgaactaattcattgcgatgtttggggaccttaccgcacaccggcttcgtgtggatctgtttactttctcactatagttgacgacttctcgcgatctgtctggacatttctcatggctgaaaaatcagaagtatctcgattaattcgaaatttttgtgccatgagtgaacgtcaattttgcaaatctatcaagacggtccacagcgataatggaaccgaattcatgtgtctcaaatcattttttcaagaacaaggtattattcatcaaacttcatgtgtagatacacggcaacaaaacggacgcgtcgagcgtaagcatcgacacattttaaatgtcgcccgcacgtgtctttttcaaagtcatcttcctcgcaaatttcggggagaaagtatccttaccgctattcatctcataaatcgcacacccaccaaaattctccatggaaaatctccatatgaagtattgtttgggtctcgaccttcttattcagctttgcgaacgtttggttgtctgtgctacgctcattatagagctcgtgacaaggataaattcagtgaaagaagtagacgatgcgtctttgttggctacccctatggtaagaaaggttggcgcctttatgacttagagaagaacaaattctttgtgagtcgtgatgttgtgtttcaagaaactgtcttcccgtatggtactatagaatcaagctcaattcccttctcaccgtctatgtttcctccctctacgatttttcacgatgatgattggctccaaccgcaagctgatatttctatctcaccaacggttgatctttcatcacctactacaatacctactttgactaccacgtcccctcctgtgatcgtgacaacacccacgtctccgttatcactctcgcatcctatggtattgacaccatcatcgaactctaatcctggttcgccatcgtcacctagttcgcctcttcctccaagctcatctccctcgttatcacctctttcctcaccggaagcttcgcctggtttaccggaacttcttggaaaaggtcatcgtcaaaaattaccatctgttcttttaaaagattttgttgctcatcatgctacagctccatcacttactaataatacaccctctactgcttcttctgccactttcactgatcctagcctctctaaaacggtctgcggtaagatacttgactctattcccatatcgatttctgacgaaaaaatttcggagttgcatcgagtttttatggcagctattacttctgacacggaaccaacgagctatcaccaagcttctcagatcaaagaatggtgtgctgctatgggtttagaaattactgctcttgaagaaaaccatacttgggatatcactaccttacctccagggaagaaagctattggcagcaagtgggtctataaactcaaatacaattccgacggcacagtagaacgtcacaaggctcgtttggttgctctcggaaatcgacaagtcgaaggctccgattttacagaaacttttgcaccagttgctaagatgacaacagtacgctttcttcttgctgttgcggctgcaagacaatgggaagttcatcagatggatgtacataatgtctttcttcacggtgatttggacgaagaagtttatatgaaactacctcccggttttcatactaacggttctaatcaagtgtgtcggcttcgaaaatcactatatgggcttcgataggctcctcgttgctgggttgagaaacttgctactgctctccgcacatttggattcaagcaaagttatccagattattcacttttctcatctgtgc

SEQ ID NO: 31150 - DNA, 628 bp, Arabidopsis thaliana landsberg
ggctctgctataccagaggttctcggactaggacagtcaggtggttgtagctgttctaaacaagacgaagattcctcgattgttataccaacaaaatatagcatagaagatatcctctctgaagaatctgcagtccaggtttttgttttaaaccttttcttgaacagcaagaaagtgatcagaatcacaatctctaaagtctaattcctatgttttcatgatttttcagggaacagagacttctagtctcaccgcgtctttgactcaactcgttgagaatcacaggaaagaaaaggaatctctactcggacacagagttctcacttctccttctatagcttcttccacaagcgaatcatctgctacatcagagactgtagaaaccctaagggctaaactgaatgagcttcgcggcttaaccgctcgtgagcttgtgacacgtcaagatttcggtcagattctcattacggctgcgagttttgaagagctaagttcagctccaatcagttacatttctaggttagctaaatacagaaacgtcatcaaagaaggacttgaagcttctgagagagttcacatcgcgcaggtacgagcaaaaatgctcaaagaagttgccacggagaagcaa

SEQ ID NO: 31151 - DNA, 1982 bp, Arabidopsis thaliana landsberg
gacgagcacacggctgaagaatttgcgacagaggcgacacatagtgcacagatcatgtgggttaagtttcttagttctctttagagaacaatcgagattcttggttgtgttaagagcaaatctagagctcttgttggttcatgttatgtattttgtgatgatgttctgtttcagagtttgtgtgttggttgtatcaggagaaagaggctgggagatagagagaaagagagtctctgcgaaaactaataatgttttttcagatatctaaataataagctttttgcatacattgtattgtaaatttgtaacattcttctcctctcttccaatgatttttttttcttgttgactattcttactaaataacgatgaggtaaaatataggtaaatgattatcatttttttttttacttgctatatcatttcaactgggagaggttaaaaatacaaaaatagctttaagcctttaataacaatattggcaaagtattttactatgagatagaaaaatggtttttggtgtccactataaaaacaactagaatgatcggtcaatttgaatttacaaggaacattgaagttctcacttctaatctattctgatttactctgaaattttagttatagtttgacctactaattaaaatactctaaactaaaacgtactagttttttttttttttaaacgtactagttgaatccgagaaacgctcaactcaccgtttttttttgttttaaacaattcacacgcggccgaatgcattaaaatctcgcatgcgtttattaagttgaattttctgttaaaagtatataagatagtgttacgattacgtttattaggtagagagatatagtaagaccaaacaaataaaacaaaaaattgctaaatggttaggatgatgatgaaagtagcgttttgcaatgacgtgtcttctggttgctgtcacaatcgccgatgcagtgtaccgtccttggccgtcggagtgcgtagaagtggcgaacgtgatggtggagcagtgcaaaatgttcttcgtccatcaggagtctccgcccactgctgagtgttgccgctggttcagtagccggcgtaagtatgcgaaggagaggcggaggctttgccggtgtttggagtttctgacaacagccttcaaaaacctcaagccagatgttttggctctttccgaccagtgccatttcagttctggcttccccatgtctagagaccacacatgcgcttgtaagtgtcattgctttgatctaccaaaatttgttagccaaaccgatattccggtgtgattctgatttgattaaaccggatttgatatctctaatcaaaaagtgaaatgcttgatttcctttgtatcttaaaaggctgacgatttgtctcttgtttctctgtttctacagagtattgcagacttaaagccgacaagaactacgaagaacatctttcttttgtatcttaaggctgttgcgatttgttcttttcatttattttattttgggcggtaaaagacttcatatattttaaatttattttgtatcttaaagctgttgcgatttgttattttcatttattttatttttggcggtaaaagacttcatatattttaaatttggcttaaaaatgttgtttcaaccaaagaaaggaaaacagaaaaagaaaaaaaaaaaaaaaaagtaaaaagaaaattatcaaaaatatactacgctaatcggataaaattcgccatggtttgcattaaaccgtcaatttccttttctcaaaatcaagaaatcagtagcaaaatcagagattaaggagtttgaaagaaatacaatgaaaaactgatctttagataaatcattgagtcaaatttacggatattgcaaaaaaaaaaatcaaaccaaaatacttatgacttagcctaaaatttcatttattttattttaaaatagtaaaaacaatacttaaaaaaactttgaatgtgttaatgatgttt

SEQ ID NO: 31152 - DNA, 1613 bp, Arabidopsis thaliana landsberg
actacattcaatcctagaatactcaaagacataatccttagatgagaaatggtatccttgagtacaaaagatacaatcttgaactactttcttcaatcgtcaaaaacacaaacagaggctacaaaactacttcagttcataaagaaagagactttattaaccaaattccaaaaccaaacccttactcattgctatctaaccaactcacgatcactctaatcttctacattcaatcctagaatactcaaagacagaaactttacatgaaaaatgatatctttgagtataaaaggccataaagatacaatcttgaacaactttcttccaaagacataaaactgttccaatcctaacaacacaatcaacgacaggtacaagaaacttcatcaagaattctatcaaaaactaatctagtcacatagaaactggagaagaaactcacaatcttgtatagaagcgaaattagtggcacacccatttgaagtatcaagctgagaatgtttctcggcgaagaatctcaagcgaacctgagaaaacaaggattttctcgggaatgtgagagatctactaaagagtggtagagtctctttaaacggagacgcagcagcagcgagagacgaggaagaagaagaagaagaagaagaaggaatgatcatagaatgtgtcgccatgcaaattttcttggagcgtcaaaacaaatgtgatgatgatgatgccactgtttttgccttatgaggctatttgtatcgtctcttacattatccacaacagtagttttattatatagttttcgatatatcttatctctcacattatccacatatcttatttgtcaaaaaagttttatttttctttgcataattctttttttctcaagaaagtaaaccatattaacatccatctctggtatagcttaaccggattattccattcgaacgaccacaattcgctggaaaggtgattttggtttagcagtaaatttcatactttattcattttagtactctcttatgcacactttattaatttactaggtgaatatccgggatttttcgtaaatgttttacttataacaacaacaaacttatgaatacttaaactttttcacaattatttaactactttaactatcttaaaattacatacaaacttattaaatagtacacatgtttgacgacattcaaatatattctcctactaaatatacaacaatcacccaaaataataaaacacaggttgaatcgtagtcattatttataactacaacatatttataaacacaacaacaaaaatgaaacttgataatgttgtaatacgaacaagaatcgaagttattttcagcacattcttcgatttttttttctgaaaaaaccgaaaccaactcaacataacccattgaaacattttgtacctggcaggcacttggtagcaatgcctttgtgtgttttaagtctggtttgagaggaccactgtggaagaaatgtcttgggcagagttgaattgggtttgacctgaagaaagagaagaagagtcgttaaaaagagatctttggattttctttagttctttggcaacttccaccatcgttggaacttcttcactaaggacccatg

SEQ ID NO: 31153 - DNA, 5435 bp, Arabidopsis thaliana landsberg
accacaccttcatccaggtctttcgccaaatcccacatgtcttgtctgctaatgaaactagtgtagaagaatgcccaaagctaacttgagtatataaaatgtgagtgcagtttgaaccagcaccgaggagaggagaaccagacgtcacccgaaggactccagactatttcctgtgatcactggacacagactcatctcaatcagcagctgcaggcacccacaagtgaaaagtcacagttggctaactcaagattctggtcctatgcattgtgttcaggttgctctgtttaaaattcaacttagtgcccaccaccggaatatagtgtgtattataggcgaagaaggcttcttatcttcctctataaccaagaaaagaaaaaagatacccattatgaacattgttttgttgatgttattagcttcttcttcttctcccttctgcatcagaatgtggtttcatgtgagaaatcttctaattttatttcacgtaattcgttcttgaacttctctgatttttgaatagaaccttgaaattgttatgtttatttgttcttcaaagcttgatataataacaatagtcgctgaacgcatcagatcagccactcaaaatgttcgactgtccagattcaattataaaagagtgatctttgagtcggactctcagttcttagtgtctttgatcaagaataacatagaccatccaagcctagcttcaaggatccaagacattaggaatctcctccagcactttgatgaagtcaggtttcaattcatatggcgcgaaggaaatagagtggccgatagaattgcaagggaatctctttctttagtgaattatgatcccattttgtattccgttatgccagactggatcaaacacattgtggttttagaatccgtgtaatcaaacacataaagttgttgttgagccaaaaaaaaaaaaaaaatgttcgactgtgaaccttctcttgacttgcaatctaacggcattgaaggctttgttgtactcatggctattgcattgagaatgagataaataaagaacaacattgagactcagtgcagactggaaggagcaaattgatagacctctaaatgaagagctcaatgagaaagctcctgagttggtgctgagctggatagacaagtgttttaatgtatagagtcgtaatccagtctaaatacaaggttaaaggttgttgtaaagggaacacactctactttctcgggactcttctttggtcaatcaagaattggtgcttgtttctatgagtgtctgaacaaaaccagagagtatgagtttgatctttaacaaacgcaacaaggcatacaaaggcaaatccatagtaatgacaaaagatatctaagaaagaataagataagtaatacatttgcttaccaaaaatgaacaatatagttgagaacaatgtgatagaccaaaatcttatgtattcattcatcaaaagagaacagtttatattggaattctaaacgttttgcctactattgaaggtttcacaagaaacaaaacaaaccaaagactagaaaacaaagtgtaattcaatagtctacgttaacatgacgtgttttcgcaccgaagacaataatatataaactgtgatgacagaatatggagtcatggactatgtaaggctaaaatagattatggagtcatggacgaatgaagagtttttaatttcgtgaatttcataaataatgtgagcctcataataccactagttgtagacagcggttctttggtggtcgatattgcatggattatgcggtccactccacgatctaattattacaactatatacatatatttatatatcatgcactatatttgtattttacaatcttaaaaccataacatatcaaaacactttgattagtaacttttgtaattttataagcttcttgtgatttttatgtgataaaacataaacgacaccaattcgtttttttttgttttcatacatattttctataatatctgtcaggatctaataattaatatactgctctaaaagtatatatcatatcaattgtctccaagttttggtgaaacacctcaaactcaagttaataagactattttggttgtattcatgtttttttttggctatgttccattctacttacttcttaaaacaatgtagtgtccaataacagcataaaccagataagaataataattatgcgtgtagaattttggtgaaacacgtcaaacttatttaacaaaacatatatgtttcatttttttttggttaattttttcccaattttttttattttgaaataaattttccgatagtgacatataaccttatgtagtctgtcaattgtcatatttttctatttccatcatcctatatacttaacctttgttaaaactctttagataagaacttccaatattttccttacctatattttaatttccagttttatatatttagtacttaaaaaaattcaaatggaaaatatgtttgactctaatttagacacatataatatatatttccaaatactaaattacaaattgagaaactcatgaacaatagtgcatccacgtcgttatccaagttggatttctttctaaaacaaataattagaccttttaaaaaaaaatataaataggtacttgttaaaaagtaggagagcccacaaataaggctttggccgcttctgcttggactctccaacaaaaatcaaactcttttaaaaacaaacaaattgaagagcgattatacgatcacggagaagtcaagatccggtgacgaatccaacttcttgtgacggagctcaagtcgagagagagaagactgtactagtagtagtagctgtggatttttgtgtcatcatcggagatcggaatcttcttcttcttcttcttggagcttctataagtggagagaagggggaagatcaagcgacggatagtgataggttttgctgtatgtcagtagattgtgttgaaactgattttggtggatttggagaacttgcgaaccctattcaatggcctcagctacgaaaaagacttcggcatgtcctcaccacggaggctctcttccgcctcccaaactcgtctccgctgctcccgataccgttgctgtatggtccgacgctgacgatcagcgagcctctaaagtttctttggaatccgttatccgccctgtcgattcgtttcctgataatactgccaagaaacctgccaacaaaggtttgatttgatcgttgatcgtccttcattcttctgatgttagctcgcgattcgtttgaattacttgacttcttgtttactggaatttgttgatgatggttactttttgtgaaattggttcttgtctacttgatggcttctgattgagatctaattgtgatcactattgtggtttctgtgaagttgattttctgttgtgatcaccaatgcagggatttctgtgatgccaaggactgaaaccaagcacccattggatcctctttctgctgcagaaatatcagttgctgtggcgactgttcgcgcagctggtgccaatcctgaggtgcgcaaacttacttgattcttgactaatgcagaatgcttgataacattgtcactgaaactgttttactttttctttggcaggttagggatggcatgcgtttcattgaggtggcatcagtggaaccagataaacaagttgtggcgctcgctgatgcttactttttcccaccgttccagccatcactacttccaagaactaaatctggacctgtgattccgatgaagctccctccaaggcgagctagacttgttgtttacaaccaaaagtctaatgagacaagtgtatggattgtggcattgtctgaagttcatgctgtcactcggggtggacatcacaggggaagagttgtttcctcacaagttatacctgatgttcagccacccatggtatgttaaactatgttttaaggaattggatctctaagtgacttttagatgctaccgttgtttgccagtctctaagtttagattcttttgattttaggatgcggctgaatatgctgaatgtgaagcgattgtcaaagacttcccaccattcatagaggcaatgaagaggagaggtattgaagacatggatctagtgatggttgatccctggtatgttaacaacatcatcgtttctgttgacaattaaggtgtacttcttctctgagcctacctcttaatgtattgtgcaggtgtgtgggttatcacagtgaggctgacgctcctagtcgtaggcttgcaaagccccttatatactgtcggactgatagtgattcccctatggaaaatggatatgctcgtccagttgagggcatttatgtacttgtagacatgcaaaacatggtggtgattgaatttgaagaccgtaagtttgtgccactccccccacctgaccctttgaggaattataccccaggtgaaagtagagggggtgttgatagaagtgatgttaagcctctccagattattcagcctgaaggtccaagttttcgtgtaaggggttactttgtcgagtggcagaaggtagatttccagtaatagcctacttgaaaccaagtgattatgcttaagcttatttctaaattggctcaacattttgtttacagtggaactttcgtattggattcactccaagggaaggtttagtcatacattcggtagcatatgttgatggcagtcgaggtcgaaggcctgttgcacacaggctaagttttgtggaaatggttgtgccttatggcgatcctaatgagccacattacaggaaaaatgcttttgatgcaggggaggatggtctcgggaaaaacgcacattcgcttaagaaggtttgacatcagttttttttttggtgttcttaccactcagatctcagtttgtgtttaacaatcggtttttataggggtgtgactgtctgggatctatcaagtacttcgatgcccatttcacaaatttcactggaggagttgaaacaattgagaactgtgtttgcttgcatgaagaagatcatgggattttgtggaaacatcaggactggagaacaggattagccgaagtgcgaagatctaggagactaactgtctcttttctatgtactgttgccaactacgagtatgggttttactggcacttctaccaggttagtggaatacgtgattattcatttcttgagtaaagcagatattagtcatatttgcatctaatttctatagggaagacaaatgatgtgtctccgcatgagaataaatcctgagtttagtggcactttgcttgtgatttttcacttgaggacattgatttacagtgctgaatccgagtttcatttgttttctgaaatgtaaattcatctttctagatatttgaagaccaatatcattttatgtcttgaatgtcttcctgtag

SEQ ID NO: 31154 - DNA, 673 bp, Arabidopsis thaliana landsberg
tggaatcaagacagcttaaaccaagcatcattgccccagcaataacagcaagtaggagatatatacagaagtttgcaaaggcagctgtgccaagaagacctagtgaacaagaaaatgtcacatgtatgaacacagagccaggtcagacacaaaaggaacaaggtatagagtagcataacaagatcagaaaatgaagttaccccagacgtcatccagtttgatgaaaacttcattcagaaaaggagagaggggagggtcaacaagtagatatatgatgatgtgagcaatccaagccacagaaacaattaatcttcaacaagcaaaaaaagaaattatttaataagagcttaaccgaggactaatagagtgaaaacatcaaagtactaagaagattaagtaaaatacaaaccctaagattccaagaacaaacttggccaagtatcccaggacagtgaaggcccaagcagtctctgcctggaaaatggacgaggcaaggcaaatattggattacagaattctttagatagataaaatactgaggtatagtcatctttacctgctctccttgcggatacatctcttctaagaggttcacatcttcttccaattggagcaactcctacagggtacatgaaagcaatgaaatccaattaagagtaggtaagacttcaaa

SEQ ID NO: 31155 - DNA, 1389 bp, Arabidopsis thaliana landsberg
cgtttttgattttattgtttctgtttaacagaggagtttcgtagtggaagagagtgatgatgatatggatgaaactgaagaagtaaaaccgaaagtggaggaagaagaagaagaggatgagattgttgaatctgatgtagagcttgaaggagacactgttgagcctgataatgatcctcctcagaaggtaccatgatgactaagcaaaaccttagcttttgattttactaatttctgtctgattgtgtgtttctgactctcttggtttcgatacagatgggggattcatcagtggaggtgactgatgagaatcgtgaagctgctcaagaagctaagggcaaagccatggaggccctttctgaaggaaactttgatgaagcaattgagcatttaactcgggcaataacgttgaacccgacttcagctattatgtatggaaacagaggtcagtacaagttgattttgtttattttaacttccatcagatgggtttctttgcctaagtgtctacatttgtgtttcagctagtgtctacattaagttgaagaagccaaacgctgctattcgagatgcaaacgcagcattggaggtacagtggtctacaattttccttgagaattttgttttatggtgatgatattcaatcgttttgtgtttatgatcacagattaaccctgattctgccaagggatacaagtcacgaggtatggctcgtgccatgcttggagaatgggcagaggctgcaaaagaccttcaccttgcatctacgatagactatgatgaggaaattagtgctgttctaaaaaggtatgcatgtgtttgtctatatgtttaatcacttttgattcattaacaatgcataagcgtgattcttatacaaacatttcttttgaatttgtaggttgaacctaatgcacataagcttgaggagcaccgtagaaagtatgacagattacgtaaggaaagagaggacaaaaaggctgaacgggatagattacgtcgccgtgctgaagcacaggtagcttcatagaccatgaaatcaatcagaataatattttgataacattagtcagttttgtattgaccttatcacttagctatagacatgggttttgtttaaataatgttgggcttatccatatctctttttctgtaggctgcctatgataaagctaagaaagaagaacagtcatcatctagcagaccatcaggaggcggtttcccaggaggtatgcccggtggtttcccaggaggtatgcccggtggattcccaggaggaatgggaggcatgcccggcggattcccgggaggaatgggtggtatgggcggtatgcccggtggattcccaggaggaatgggcggtggtatgcctgcaggaatgggcggtgg

SEQ ID NO: 31156 - DNA, 4144 bp, Arabidopsis thaliana landsberg
tttaggttggtaatttttcggacgataaccgattcggaatttacagatctttgcatcgataagcgctatacgtaatcgcaaactgcaagtaattggtctaacatgtcgagtgggtcgagtagtctctggaagtgcagaaattataagagacttgattgaaggaggaggatccatcttggtcattggatctcctggagttggcaaaacaactttaatcaggtacatcaatatgaacttataatgtgatgatctttctgttaaaactgtgattgataaatggtatatgacaagattggtttgttttgtacagagaaattgcacggatgttagctgatgaacacaggaaacgtgtagtgattgttgacacgtcaaatgagattggaggtgatggtgatgttcctcattctggaattggtcgtgccaggcggatgcaagttccaaatgtgaatttacagcacgatgtatgtctcgcaactttataaccttgtaataatatggtgtaggatggaatcaaaaggatcttgctgtattaacaagttctttatgcaggttatgattgaggcggttgagaatcatatgcctgagacaatcatcattgacgagataggaactgagcttgaagctttagctgctagcactattgctcaacgaggtgttcagcttgttgcaactgctcatgggatgactatagacaacataatcaaaaatccttctttgcagattcttattggtggaattgaggtaaaaccttagacaacaactttgcttcttattttgttctgttgtttatcttctctaaccttaatttgaatttattttgcccagagtgtgactcttggtgatgaagaagcaaggaaaagaaaagtgcagaagacaattcttgaaagaaaaggacctccgacattcacttgtgctgtagagatgatatcgagaactgagtgtcgtgttcatcaaagactagatgttaccgttgatgctatactagctggtaagttaaaacttaaaagacttcctctcccaataaagtgtaattgagttaacaaatggtaaaaccaaaccgaacaaacttctttgttattatagggaaatccgctccatttgagatccgtcaaattcgtggcgaagacgatgttcctcataagttagtgactcccattcctttggagaaccttgaagaggagcctgcaccattgctcaacagagatttcgtaagtgaattgctgtctgacgatgaagatgaagattttcttcccattcggtctaataaggccagaagtaacacatacacgagcccaagaagctcaccggttcatgtgtatacttacaatgtaaagaacctgatcttttattgcctagtttctaaatgttccttttcttatccttggaaaataatcttcatcttaaacaaccaaagatactgactatagatgtggtatcatctgattgttttctaggtccttgaagctgatctcctccaagtagctgaagttatgggtctagacgacgaaatagaagtgacagatgatgttggagaagcagatgtcattctagcctcaagttctgaattgaaacagaattcatcaatccgtcgtgttgccaaattacacaagctaccgatatttgtcattaaggtatccttctttttgcatggctgattatgattcagcgcattcctttgttttattaatttgaatcacttctttcgtcctgttattaccttgcagtcaactactatggctcagatggtgaaggcagtccgaatgatccttggaagggaatcatttggctcagcccctaaagccatagaaaaatcttctgttgatgatatcgagatcaaagatgatgctcctgagagcaaacccagtttagaagaactcgatgcccttgaggtaactctcatccccctcctgtaactattctcggaatttcccaatagagatggcttgttatctcagatcagtctctttgacctaccaactattagttcattaggattcctacatctcatgtaactactaatacagttcagtgactatagattagggagacttgcgagtataactactgataccagtttctgaaacgcaggaagtacgtctagcaatcgaatatattgtaatcccgggaggtgaaccagtggagcttcttcctagacgatcagatataatagttcggcagctagagctggtggagagttaccaactcgcagttgagaacctcggcactcaccttaatccgcgccttcagattcttcctcgccgatcaaccaagaagacgttgacatcttcatccccccaaaaatcagcagatggtagcatggggactacgggtactcgtcttcctttccttaaggattgacatgtctgacttcagcatatggactacagtacatactacataagttggggacactcttgaacattgtacattttactgtaagtcttggtaaataaactgtttatatcgttgatcatttctcatttgcaatttatgtgttaccaatgcaatgctctttcttatttacccgagggggtaactctgtaacattgagggtgagagtgtgcaatctgtagatatttccttacctcttaataaatagaaatttctcaaatattccacgtacacgcttgaaaatgtaattgaaatgatcgattcttatacacatacaaactctgtaccaaaacccacatcttctcaagatcgtaatacaaaaactaaaaccagaggtcaattttaacaacatttgcaaaaagcaacggaagtgaccaccacacaccggggagaacgcgcacataacttcgaaatctttggcatggtctcaaacattctagtgagtggttaattagttcttttcaaaattttgtgagtgttatttttgttgataatttaaatgtgctatatgtatgagggaagtccggatgagatagtcacaacctaatttatttttgtgagtgttatttttgttaataattagtttgaaattgcatttttcacatcgttttcacaatatatattttcacactcacgaaatttcaaaaagaactaataaacaactggctagaatacaggagataaaatttacttactaaccacataattccttaaaattaaaatctatgtattttctaccctgatgatatcaaaccagtcaaatagtacattaattatttgtagaatcaacttcaaagttttatcaaatacttaggtcaaaacatttgaaacgagatgatacgacaaagttaaatgtgaatgtaacaaacccgtcaacactggacttgaatattatttggtctcctacatgttttgtcaacgaactaaacgaagagatcctttgcttcttcttcttcacactaaaaatggccctttaagtccacccatagatatttttctgtgattgctgtgtctgtcagattcacaaataaattacatattcttctcttatatggtatggattgatgtgtctgacagacacgattcgtctgcatgaggacaatgtacgcataaaaacaatgttggaagtgttatacttatacgaatctttcaatataaatcttctaactcaggaagtgaaaaacgagaagagggtagattactaacgaagagaaaagagttttgttcctgttaaagttcctctgcaacgacaacataaaagaaaacaaaagttctccaacatatctcttatctcacgcaattaaacacagaaattggcaaagaaaagcaagcttcttgttttgtttactgaggtcctgcaaatttgcccatcatctttgcaatcacgggagccaccttcggattcgcctgatgcttcgctagattcgcagggttcttcatcactgttatagcattcaaacaacattcaagactcgaaaagtattcaaaaaacattaataaactgcaactttaaactgagtcatcataccatcttgaagagcagccatgacttcagggtcgctaaatgccgtcattagctcaggatcctgctcacaaatatcaaaccaatctcacaatgtcaatttaacttcaaaaactctggatattggtaattcacaaatagtcgctcttacattcaatattttgctgaagtccataccaccaggcataccgccaccaccaggcataccaccgcctgcacctggcataccgc

SEQ ID NO: 31157 - DNA, 601 bp, Arabidopsis thaliana landsberg
gatatccctgttttcgtgtttgaaggcgtttttagcagaagaacctctgggaccagatgacatgtggtatagctcgtagcctgaacttaaaatcacatggactgatatattcattttaagatttagcgttgaccctctttcttactgctctgaatcaggttttgtccgagctgcaaagaacacagacaagcgaacaaaaagctagacctgtggaagttaccagatattcttgtgtttcatttaaaaaggttcacttacagcagatatctcaagaacaagattgatacgtttgtgaatttcccagttcatgatctagacttgagcaagtatgtgaaaaacaagaatggccagtcatatctttatgaactgtatgccgttagtaatcattacggtggacttggtggtggccactacactgcctacgctaaggttggtgacttcatttggtctcactgcatcataatcttaattcatcatattatagactatatgatagatatccactcgacagttgtcccattgtgcttgccaatagttcttctgtgagttctttatttgatcattatgtgtcatttttcgtgcagttgattgatacaacaaa

SEQ ID NO: 31158 - DNA, 723 bp, Arabidopsis thaliana landsberg
ttcagattcggttgaataatggcggctgcggcttttttgctgttaaatctagaggagcctccaccgatttggggatctcgtagtgtcgattgcttcgagaagcttgaacagattggtgaaggaacttacgggtactcttctccattctttttttttctgggttttgttccttgattccaatttatttggttttgtcagagtactcgtgctcaagactgaaatttctcaaatttgaacgatttcgctagggccacttgatatataagtttttttgaaacaattttgattgtgaaacgtttatatatagttattgatccatatattgttgatttgaggaattttaactttgcctcttatctcaataaattcgattttgttgattgaatttgggaattctcagattcttggtatggtagatatatatatatatatatatatatgttgcaataaacttctgaagctgtctcttttgatggtgtttagattcatatattaaaatttggttttgcagccaagtgtacatggctaaagaaattaaaactggtgaaatcgtggctctgaaaaagatccgtatggacaatgaaagagaaggggtaagctacatttgaactaccagtactagctttgacaagttgcaaacttttgtgagtttcgtatgacttatatttcccgtttcattgtttgcatgggagttccgataaccgctatccgggagatcaaaat

SEQ ID NO: 31159 - DNA, 5425 bp, Arabidopsis thaliana landsberg
  unsure (1)..(5425): unsure at all n locations
tgcaagcaggtttttacttttacaaaaggcttttttactactctatttctgagatatccgaagctaatgagcaatcatcaaggcctgaggtaaagaatggatcataccattgtgaacaacttatcatctctatctctgctgaattcgctttctcatccacctcctgctcctcctcctcctccctatcaccaggtgtgaaatcaaacttgagattcggatcatttggcctaacccatgccccttccaattgctctgctaagagtttgcggtgtttgctttttgtagacttggctgagtctgaggcggatagcttgtgtttccccagggactgtgctttcgtgcctgttcttgacttcagatcattggctgggaacgtgtttgaagcccatccaaatgaatcttcaatacannnnnnnnnnnnnnnnnnncaaacaagaccatcaatccattagtgactattactgctctcaaaaactatggaaagaaaagtcatatatatcagagttccaaacctgtaacggttctctgcagcaaccctagaaccttttagaacatcttcccctgggggctcgttcacataatttaatgaatctgacccatcaatggacagactaatcatcggtggaaactgattcagggaatcatcattgccacgtgggaattccaaggttaagtctaatcccaatttattgataggttgagtctcctgcaacctagaacgggaaatagtattgtctggctgactcgggccagaatcctggagagcggattctaacaactttctacttaagctggtgaccttcatcccctgccaaggctttctagctaaatcttgggtgtgattcacggaacccataaactgtctgttgaaaataggactgtttaaggagagcatttgatcattcccagtgcgggtagacgtcctccaaattgatgacagcaagcaagaaaaatgtttttgtaggagcatctccgtatctggctgctcagctgcaacatttaggagtgtccgaatattttcctgcaccaaatatgtgatattagtgaaaaccatctcctttccactataatcttcttgagttgattaacacgacacatttacaagacaaattctaatatatcactaataacttcttaaatggacgctagtgagtagctaacctaacgctatgccatagtcaaccttacctcagtgactttaaggagagccttcccagaacctgtgttgaggttcttctcgttcactgcactgtcggaagcagacaaaatatgtcgttgaataagctctctatatctctcacaacaatatgcaggatgccgataccgtcctctgtaagccccaccagctgtcattccataaagagttccgctaacaaaattccagttaggcccatattcatgaaccatggcacacaatatagcatcttcctgcggcaaccaagaatcaggcgagggaacacaatctctagaccacagatttcctttcttcaatttctctggcttgatcataagaacacgctttattggcatggaagtgatgaattttttccctacagttttacccctgttcgtcaatttcaactcattatcaacaaccatactgtcagacggctttgatggttccagttcatcaagtagtgcacttgtttgcttatatttgatatctgaattcgggagagacttcttgtgcttctttgctttcttctttgaggtcttctcttcatcagtgtcaacaattaaatctcttttcttgcccttcatatgcatccgcgaaagcggtgtaaccatatccgagtcactgctactcacatagccgaattcttcattatcatcatcagtagaatcttcaattttcacaactgacttcacatgttttgattcggcagccagtgatcctttcttcagggatttatatttggctttcttcgcctttttcttcttcttaggcttcagtacatgagcactttcgttcctgaggaaaagaatggttcaaattatctacttgttttaatggtttaaaataagtagaaatcactgcttgtctctccgactgaacagcagcgtcctagattatcatatcgacaatgaactgtgtgggtttgaaagcgtcttactgtgtcaaaaccatttcagccacctctgcagcttccctctctctagcttcattttccaaatcttccattaactacaaacataagtaaatacgtgaccaagctgaaatgcaggacatggtagatgcactaattaatctcacctggtgctgagctaagacttccacttgctgcctgtatgcctcagttgcaaaatcagcatcccattctgaaaatagtattaaaatctcatgtgagctacaaaccagcccataaattaacattatacaaaactacattatcgtcaaggtttattgtcagttaaactattgaattgaatgagcaaaaaaggttacacttactctcgtaaacaagaggctcttccccatcatcaatctcagcttccatttcctccttgtacttctcaatgtggtcaagttcccattctttctcttcaaatcctgcttcattttccattgcagcctcaacaatgatggggtcccaaagctctaaaaatctaatcgcatatctatcaataggaagaagctgattctcaaaagatgagatagcttgtccagcatcagccgctgctgcagccatttgcttgacatcatctaatacatcagtgtcatcttcttggcttgaagtagtgataacagctctctcatccctgatatcactatgtaacaatgacatttcttctttggccggccctgctgcaactaaaccttgatcagcaggctcatcagcctttatgtcatcttcatttactagctcatcgtcttctggtctctctacaggttcttctgtgaactcttgattgtccacagcttcttcttgttctactcttttgagagccatataatctgcctcatcttcggcctgttttagagcagcctcaacatctgcatttgatagaggtatatccgccccacaatgcttgcttgtttccttttcatcctttgtagtcagagccttatgcccagagaacaattccatgggatcgagcttcttgaaaaattcggtgttatactcaccgttttgaattactaggttatcaagcacacgcttctggtttgctttctttaagatattctcctcaatggtgctctcacttatcaaccggtatatatgcacttcacgtgtctgacctatcctgtggcagcgatcttgagcttgttgatccatagcaggattccagtcactgtcatagaatataactgtgtccgcacccacaaggttgatgccaacgcccccacttcgggttgacaaaatgaaaagaaagatcttgggatttgtattaaaccgctgcattaacgtctgcctctcttctggaggtgtagagccgtcaagacgcatgtaggtataaccatataaattaatgaaagcctccaagacgtcaagcatcttggtcatttgtgtgaatatcaacgctctgtgacccccaaattttaatttcctcaataacatagcaagctcctgcagcttaccacaatcaaactgtatcagtcgcctatctggaaaatatacttgtctcctaacgattgcaggtctaattggagataaaagaggtgacaataaatctgtaactttttccttgtacgatggactaagaaaaacaggagagtcacttttactgcaccagcaagtaggtgaaggcactcgtgcagctggaatcgcaaatgtgaaagcttcaactagctcaatcatcttctgaaaacgctcgattggtgaaaggactatgtcagcgaggattgatgaatacatgtaagatgaacagttagctttaagatcatcaagaggacccttaatggttaaaagagttcttagtgatgtagagtaagtcggctttctctggcatctcaaagaattccaccatgcaatggctgctgcccgatccttagattcttgtatcctttcctcaaagacagccttacgaatttcttcaaaaatatttgtcccttgcagatttttgcggttttttggactcaaagggattgcttctagatcatccttcaagttcacacgctgtttgattaattctgagggtgttgaaatagctttgatctcatctccttcccaagaagtcatagaaaaatcaagatgggtgaataagaatcccaaagcctcaagatcaaccttggaaaacggactttccaatagtagcgaacagattgttgaactcaactgcacatcaatgccagccatgtcaaaagaacttacaataggacgaccctcaaagagatcaggatgattacaaactttccgcaactgcattatgatacttatcatcccaaaaaagcttccactggtaagcgtagcctgtgtttctgtgcttgctatgaagtcctcatacaagttgcgctgcctcttagacagtctacagaaaataacatgctcatgtttcgaaggaagttgcttctccacatccctttttaggcgccgtagaaggaaaggacggaggacattatgtaagcgatcaataacttctttgttgattttttcttgtccctcgaccatccctgctattgggttacagaaccagtctttgaattcctggtgagactgaaagacatgtggcatcagaaagtgcataagtgaccacagttccataagatcattctgcaggggtgtaccagtcaacaaaattctgcgtttagaattgaagttcaatagtgtctgccatctctgagacttccaattcttaattaaatgggcttcgtcaagaatcaagtatttccacttcttgcgcttgaacattttactgtcctgaataactagcctataggttgttatgcatacatgaaaagagttaagcttcatccatccttgtctcttgagtttccgctcctttgcactaccaaagtaggtgagaattttaaatgcaggacaccatttaagaaactcagtctcccaattaagcatcacacttgtaggaaccacaatcagatggggaccccatattcccttatcacatgcaaggtgagctagaagagcaatggtcataattgtctttccaagacccattttatgagccagaataccgttcaactttttctcatgcattgtgacaagccaatccaaaccaatgtgttggtactcacgcaaagaatgcttaagtagaaacggcagtttctttcgaacttttgttggggagtatgttaatccacctggctgggcagatcttgctggtgctgctgcctcagcaacattatcactactatctttatcattatcttctgctactttatggaatgtgccttgaacattttttgagcaaggctctggatctaggttacattctgttaaatcaacgttggcattatctaaatcag

SEQ ID NO: 31160 - DNA, 1400 bp, Arabidopsis thaliana landsberg
tcttcacatgaagagtgttaatcagtccactgagtatcctgtctcaaacaatgtgacaatccaactccacatgtttggttctttcatgaaaaactgagttgtttgctatatgaatagctgcagtcgaatcacagaagaaagcaacaggttttgtttgtgatacctgtagatcttcaagcaaatagactagccaaacaatctccctgacagcatactgcatagctctatattcggactctgcagaagaatgtgaagccatctgttgtttcttcgatttccaggaaatgagagattcaccgagaaacatacagtatcctgaggtagagcgtcttgtgtcacgacaggaagcccaatctgcatcagtgaaccctttgagagtcatatctgaagtagctgaataaaacaatcctttaccaactgttcctttgatataatgaagaaccttataagcggctttcatatgagaatcttttggagctgctgtaaactgacacaaacgattcacgacataagtgatatctggacgagtaatagtcaagtacatcagcttcccaaccaattttcgatatgaagcaggatcatcaatgactggttcctttccatcactaacgagcttgatacttggttccataggaatagaggatggcttacagcctaataagtcaacttcttccaaaatatctaaggcatattttctttgacaaacaaatatacccgaactggatcttgcaatctcaagacctaagaaatattgtaaagaccccaaatctctaagcttaaaagctttcttcaaatcatcttttaactgtgatactgtatcatcatcgttactagtgatgactatgtcatcgacatagactaaaacagcaacatactttccattcacatttctcacaaaaagtgtgtgatcagcatgtgattgtcgaaacccgagagacattaacgtgtaactgaatttcaagaaccactgtctagaggcttgttttaaaccatataatgacttcctcagtctacaaacagcattaggtggcaaaacgtccccctcctttggtgtgtaccctggcggcaaagtcatatatatttcttcagcaagatctccatttaagaaggcattagaaatgtctaactgatgtaagctccatttcttagcagctgcaacagccaacagagtcttcaccgtagtcatttttgccactggagagaaagtgtccacaaaatcaactccttcacgttgtgtataacctttagcaattaagcgtgccttgtaacgctccaagctaccatcagcattaagctttactttatagacccatcgacaaccaatagcatgtttatctgatggtaaactacaaatctcccatgtagcggtgccttctaaagctcgtaactctgcattcata

SEQ ID NO: 31161 - DNA, 1108 bp, Arabidopsis thaliana landsberg
gtcagtttcaagcctcttttctccacaggaacctttggcttgaggggggtatattagcttatattatctcagtatatagtttgtatactaagtctcctttagcttagtattatgctatgtacatgtaactataaatactctttgtagatactttgattcattaatgagaattactttcacattatgaaagttaatacaccaatgtcgtcagcagtcacatacattcgtagagtatgcattcataaataagccagatatatacatatcataagagatttgttatacctatattcatccaaatgtttagttgtggtctcttgtggtaccaacctaaaaaaaataaggttatgcttccgccttaagtcttgagagctactatcttttttctttaatataactaaacatcttattattatcaggaaaccatgcatgtttaattttaagtttatatagaacatcacaagcaaggaaaaatgtgaatgttaaatagacttgaacattagttcatgaatagtattaaacgtgttttaatttgttactttattactttattttagctatttatttgtacatggtgctattttgtacctatgttttgagttttcaatggattatttatatcttaaaactttatactatataaactctgatatcaaccttcgcatttcatgattttactgaatattactatggaaatacgatataaaatagacattagagaacatcaaaggcatatatagcaaacgttagaaatacatgcctcaatatttgagacccatttatgttactcgcaagtcgcgcaacatctcacaccacacattacatgcataagcataagtgccacaaatacatcacctttaaaatgaatgaatgaaaaaaacttctcggcctaagttaatgtacatgcacttaatacacttttagcttcttgatagtggtagagaatatcaatagatatccacaaatcttgaaatggaataagtgattataatgacatatcaaatgaagaaaaactcatcaatcaatttattttccggggtcattagaaatagccataatttggtcaattataaacatcacacgctcaatcatggccgttgagaacaaa

SEQ ID NO: 31162 - DNA, 5071 bp, Arabidopsis thaliana landsberg
  unsure (1)..(5071): unsure at all n locations
gaatctcataggtaggttttggacaaacgatatgcacaccgctaagaccacactgtggaacttgtagtattactgagatttgcccttctgccttcaaggagaccccgagcacatcatccaaattgaagaaatctatcaaaagcaagaagctttagttgctttggctctggattctccttctagatcattgttaaacccattttttgattagtcctcggttaaagttaaattgtatccaagatattgtatagctttatggggaatgcaagagcatcccacttgtgtgtaaaactaaaacttatagaatggaaacttacccttatgaaagacactgggcaagtacacttttaactgaatattatgaaaaaacttaaaagatgattcaagaaccttttaaagtgtttccactaaaagcaagtgatttggattttggagtcatccaccttgtaatctatctaatttgttatcaaacattaaaatttttgaattccccttatatagaattaacagaaatttctttctttggtcaaactaaaattaactgatattctatgtaaagactaaaaagattatcaacaaattgaattttgcaagacggaagaatccttactgatgtgatggctgatcacattgggtttaagaaatgttaatggtcctaaaagtttaattttaaagtaaggtattacttccgtaatttaatacttagtagaaggaaagttatggggttaatattatgatatataataaatttgggggactattttccatataataaaaacttgaaataggagagagctggggatagagatattcttacgtccaaacagagagagtggggaagaaaatttattaaagcagcagccggaaaaaaaaaagaaaaaacgttcgaagaggaaaaaaaaaaaagagggagaagagcaacgaagacggacctgcaaattctgcagtctccactgacactttcgatctttctctctgtccactttcttcaatcctcaggtttctgcgtctttgtgtcatcatctatctcttacgctttctcgtttttgcattctctccgttcatttgtcagttgatttgtctcctccagttctttggctaatgcaatcggataaacagtcgttttagcagttatttgcaaggatttgtttatatttctcaacagtaaccgtagatttgattgaggatgatcattttccgcttcagtttctagggtttggtttagatttttcattgttttgctcggaggtttagtggctttctcttcaggttttatctctatgaatgcatgtctattaggagttggcgtacctggaaagggccgtgtatgtgagagaatgttagatgtgttccttctgggattcttttgatttgtgaaatttgatttgtgactcttgggtttgtagttgtttatggaaggagataaccatcagaggtagcatttatccatgcatcccaagcgatcaagtcaaggagatggttcagttactaagccagttagaaccagtgataggcttaggaggaggcccaaattgcatggtcgctcatacttgtactactcttcaccaaacatgttacataatcggaaaagaaacacaaagacaagaacggcagcctctcagatcgcaaagatgctgcacaaaggaaaccgtccagcgagggcatcaaatgccgcggtaagcattacatgtttcttcctatgatattgcatcaatactctaatatctggcacttcatcttttatagttttatccttcagtacatcattggtaagtggatatacatatgatcatctgtttttatcttgtcttgattttctacttttacttgttactgtgtctgcggagggtattaggggaacaacatgaaagtagtctaatcggttcttttctttgtaatgcataccgttttttttttgtctcattaaaccagaatgtttatacatttgctaatgacgtacagccaattgcatctgatctccggcgttccacgaggaagagaagaatttctgtaaacctggaggactatacagacagttctggagcggaggatgaggatatgatggtcagaatatattcctgtttaatatggcacttcgataatgtaatgtaaagctatctcttaagtactgtggtatgcctcttgaaaataagtttctgatctttttcagagtccagcatatcgaactttgaggaggagagttcataaaaacttctcaacttcaaaaagtagaaaggacatggatgctgaattgnnnnnnnnnnnnnnnnnnctccgtcctcgtcgttcaacaacaattgctaataaacgactgaaaacagaatctggcgctgaccaagatacatcagaagagaaagatggccaagatgaaactgagaatgggaatgaattagatgatgcggatgatggtgaaaatgaggttgaggctgaagacgagggtaatggagaagatgaaggcgatggcgaagatgagggagaagaagatggtgatgatgatgaagagggtgatgaagaacaagagggaaggaagagatatgatctgcgaaaccgtgctgaagtccggagaatgcctacgggagaaatcaacaagcaacaacaacctagatctcctcggagagtattgcatcagggcatgggcaccagggttggaagagatggtaggagaggtgggtctcggcctcacaagcgccatcgctttacaagaacagatgattcagatgattctcttcttgtggacgagttggaccagggccctgcaattccctgggctcgaggtggaaacagatctggagcaccttggctatttgggggtttggacacgtatgggtcaagttcattggggttgaacgttggagcttctggttggggtcaccagagtgatggtttggctgcattaacttctggtgttcagactgctggcccaagctctaaaggaggtgcagatatccagccactgcagattaatgaggatataaattttgatgacattggtgggctgtccgaatacattaatgatttgaaggaaatggttttctttccgttgctgtatccagagttctttgcaagttacagcattactcctcccagaggtgtactgctgtgtggtcctccaggcactggtaaaacactgattgctcgagcattagcatgtgctgcttcaaaagctggacagaaagttagcttttatatgcggaagggtgctgatgttcttagtaagtgggttggcgaggctgagagacagctaaagctactctttgaggaggctcagcgaaaccagccttccataatcttttttgatgaaattgatggtcttgctcctgtaagatctagcaagcaggaacaaatacataattctattgtttcaactttactggcgctgatggatggcctcgattctcgtggtcaagttgttctcattggagcaacaaacagggtagatgcaatagacggagctttacgccgccctggcagattcgatcgggagtttaatttttccttaccaggttgcgaagcacgagccgaaatattggatattcacactcgtaaatggaagcacccacctactagggagctgaaagaggaactggcagctacttgtgtagggtattgtggtgctgatctaaaagctttgtgcactgaagctgcgattcgtgcttttcgtgagaaatatccacaagtttataccagtgatgataaatacgccatagatgttgggttggttaatgttgaaaagagccactttgtagaggcaatgtcagctattactcctgctgcccatagagggtctgttgtgcaatccagaccattctctccggttgtgttgccatgtttacatcgacacctccttgaatccatgagtttaatatcagatatttttccctcgtcagccacgtcatcggagttgacgaagctgtcaatacttacatttggatctgcaattcctcttgtttatcgacctcgacttttgctgcttggtggtgaaggagttggactggtaattgcttgtcgtttcttgtgattatgtcttaaagctttattattatgaactgaattcacgtacttgttagtcgaacaggatcatcttgggcctgcaattttacatgagctagaaaagttccctattcattctctgggacttccatctctcctttcggatcctggtgcaaagaccccagaagaagcgttagtacatatatttagtgaagctagaagaacaacaccttcaatactttacataccaatgttcaataattggtgggaaaatgtaagtgtgtttttttaaaaccaaattccactttactgcagttacttttggagatcatgtttacgtgttcacttaatataatgtattaggatgtcctgttggttgttttagattgccagtctaatgatttgatactgatgactgcaggctcatgaacagcttagggctgtatttctgactttgttagaagaattgccatcaaatctacccatattattacttgctacatcttatggtgaattgtctgacatgnaagagcagtcagtatttgacaatcgatctgtgtaagttcatgttctacttgtaatcactttgtccagtaccatactacagctttattattagcttttcttttgttatcccataaaagctggtagggcactttctttgaaagtcggtcatccttgcaatataattatatactgtacaaacttgttctgaaagtcggtcattctttcaaagtcaaaaggcatgtatcagtagcctgcgagttagtatatgaagctgtagatgcttacgtatgttttccaagttgatgtttttggtttttctaaatttgtttggcaagtaatgatcagatttaattatgaacttatacaatatatttgaccaattacatgaaagttcagagaaaaattccagtgaaatagcattgcctatttattgtgtcattccccaacttagctactttttccttggttctcgttacaaatttaattttcttcatcctactggttgatggtcctcacgcttatgaaatataaatcagtttcccatattgtgtacatttgttttcagctatctgtg

SEQ ID NO: 31163 - DNA, 1151 bp, Arabidopsis thaliana landsberg
tggtacagaacatgttaagctcgatccggttcagagaattcgggtcgttgagacaatccgcaatggataaactcgtcgagaggatcaaatcagaagctaaagacaccgacggtcttgtttgggtcctaagaaacgcaagattcgctgcgttttgtattcttttggagatgtgttttggaatcgaaatggatgaagaatcgatattgaatatggatcaagtgatgaagaaagtgttgatcacactcaatccaagactcgatgattatctcccgattcttgctccgctttattccaaggagagagcaagagctctcgaggttcgttttgaacatgttgatttcatcgttaaactcatcgagagacgacggagagcgattcagaagccggggactgataaaacggcgtcgtctttttcttatcttgatacactctttgaccttaaaaccgaaggtcgtataacgacgccgtctaatgaagagcttgtgtcgctctgctctgagtttcttaacggtggtacggatacgacggggacggcgatcgagtggggtatagcgcaactgattgtgaatcctgagattcaatctcggctctacgatgagattaaatcaacggttggagatcgtgaggttgaggaaaaagatgtggataaaatggtctttttacaagccgttgttaaggagattttacggaaacatcctccgacatactttacgttgactcattccgtcacggagccgacgacggtcgccggttacgatgttcccgttgggattaacgttgagttttatcttccgggaataaatgaggatccaaagctttggtctgatccgaagaaatttaacccggatcggtttatttggggtaaggaggaagcggacataaccggtgtaaccggagttaaaatgatgccgttcggtattggccgtaggatctgtccggggctagcgatggcggctgtacacgtgcatttgatgctagcgaagatggttcaagagtttgagtgaagcgcttatccgccggaaagtgaaattgatttcgccgggaaattggagtttacggtggtaatgaagaaaccgttgaaagccatggttaagccgagggtctagatttgtttaattatggagacgatgtgtgcttatatattaaagaag

SEQ ID NO: 31164 - DNA, 3892 bp, Arabidopsis thaliana landsberg
aacacgaatgtgttgagtgtcaagatagtgtaatctcttaccctgtcttgatagccacatccagaagttcttctcctcagtttgaagttagagttgatgaggtcaactatgaacagaagaagaatctgtatcctccttcttcagattctgtgactgctactgttgcacatgttcttgtagattctcctccatcttctcctgaatctgtccatcaagctatagttgttaatagatttgcaggcaagtcaaaggaagaagcagctgccatcttaatccagtctacgtttaggggccatttggtatgttgtggcttgatcagaacttgtctgcttagtcaatcatgcattatacctttggttgaattttttctatctttgagatacaatgtgagagaacagggtttctttttcaaatgtaacgttttacttctatggtttctccaatgcaggcaagaagagaatcgcaggtgatgagggggcaggaaagacttaagttactgatggaaggatcggttgtacaacggcaagctgcaattactcttaaatgtatgcagacgctctctcgtgtacagtcacaaatccgatctaggagaatcaggatgtcagaagagaatcaggctcgacataagcaacttcttcagaagcatgccaaagagctaggaggcttaaaggtctcactctcttgtttatctcagatgcagttttcatttactactaaaaaaactcctttcaaactacataaattggttgagtgatagtaacattctactgcattactcgtgcttaaattcgctctttactaacctgcagcttttcatgcggttgtttaaatttatcgttgtctcttctgatgtaatctggtaatgcagtatcctgtgatttttttgtttattgctaagactagctctttcttctgtagaatgggggtaattggaactacagcaatcagtcaaaggaacaagttgaagcaggtatgttgcacaagtacgaggcaacaatgagaagggaaagggcattggcttatgcattcacacatcaggtacttccatgtatacctaactcaaatttctctgcataatggcatagaaacttgcaagaacctgaatagttgcccttgttgacaaagcagtccttaaatgtcgcttaagattcctgaggcctgaagtttgatatctatctacataactctagctaacataattggatatggtttaatgcttatgattatatccgactcatctttgcagcaaaacttgaagagctactcgaaaactgcaaatccgatgttcatggatcctagcaacccgacttggggttggagctggttagagaggtggatggctggccggccatgggagagttcagagaaagaacaaaacaccaccaacaacgacaactcctcggttaagaactcgactaaccgtaattcccaaggaggagaaacagcaaaatcttcaaaccgcaacaaactcaatagctcgactaaacccaataccccatcagcatcatccacagccaccagaaacccgagaaagaagcggcccatcccatcgtccataaaatccaaaagcagtgatgatgaggccaagagctcggagaggaaccgtaggcccagcattgctaggccatcggttagtgatgacgagaccctgagtagctcaactgctaggcgtagtagcaatctgattcctacaacaaaatcagcacgaggcaagcccaagtctcaaacctcatcacgagtagcggtgaccacatccacaacagaggaaagcagtatattaccggagaaagcaccagcaaagaaacggctctccacctcggcttcacctgcacccaaacccagacgatcctccgccccgccaaaggtggaaaaaggcgttctcaaggcagagagaacgccgtgaccaaccgaggtatagtaattcatcattatatgattttttgtcgcaatgaatatggagttatgagattgtgtatcaagtataagcaatgttggttacaagaaagtgttacgttgattcatttgtgcagtgtaagtctctctattgtttatttcactctttcatatattaaagaaaactagaataatacttacaacttgaagaactctcttgtagtcttgtgtcattatgatcgtgttggcagtgaaacgcatattttgttgacgttgccaactacttcttcattctcaactctctattagttctattcaagattttaacaccaagtttttgaaagataaagagtatacacaactctcagtactaatggatgcaaactaaatgtaactgatccgaatttaaaccataccaaaattattgatttgataaaaccgaatccaagagaaaataaaccggttctgtttttatttttttccatatcgaaagaaatctaaaacccactaaaagagttagaaggtttcgactactatttacgcaacgcaaccaacctatctgggccaagtccaagcaaaccaggaaatagctaaaaccctaatcctcaaattgatcgacaaaatcgaacactgaagagttgtttcctatcaaatcagatcgtgtttattttcagtacactgtctagctcaaatcctctacaacaatggtaagtttgcctgcgtatgttcttctttcggggttctctacaatttccactctttactgtttttgctgattgattttggaaaaatgatttgatgatatttcaaagcatccctttgattcgattagggtttctaaaagaatcctccttttttagagcttctgcttttatttttgctcatttgtgtttggggtttgtgtcagtatcagagtgttttttctatggtttactctgtttcatcttgtctgacgtatggaataatattcttcgcttctcgtatgctctccaggttgcagcgataattggaggcgctgctgttgctgctgctgcttatgctggtaaatatggaatagaggcatggcaagcgtttaagctgagaccagttaggcctagaatgcgaaaattctatgaaggtggtttccaagctactatgaatcgaagagaagctgctctaattctcggtgttaggtacctttctttctgtctttagagtttagcctctcactacaaatgatactagtggtcttgggacttttgttttaaataaggtttctcttctgctagttttgtaaagtctccgctgtgtaaatgatttgaaataggcggtatggtttctcacactagtcctcctcgagggactcctcctgttcttaaatatatcttcatctttggctagtcataggggagtttctttctgactctttcatttttggtagaattggtaaatgatcatttataggcagtaggtatgccacactagtttttaacaagtttgcataggggccaaactatgttcttacacaagggtaaatggtttgcatatgtttagtggtggtttttgcgacattattatggcttgatgagtttgtcacttgtggtgtttgaatagggagagtgtagcggcagagaaggtgaaggaagctcaccgtagagtgatggtggctaatcatccagatgcaggaggaagccattaccttgcgtctaagatcaatgaagccaaagacatgatgcttggaaaaaccaagaactctggttctgcgttttgaaaccctttgggtgaggtcgattgatcccaaccacaaagccatgtggcctagtttcgagtagttagtctagatcgttctctttaagcaataaccattagattgattgatcctatcaagccatgtagttccaagttattggtctagttcattttttttatcatgatgatgtataacgtgggtatttaactttttcagcgtgagaaatatataaaccaaactgaaaatgagtctagtcggattctggttttg

SEQ ID NO: 31165 - DNA, 1091 bp, Arabidopsis thaliana landsberg
tctaaagatgtcatcaaagaaaacttgcttcaattcacgcgagacaatgataagcagcaaccacactgagtctatatttgctgctttcaaactggataagaaaccagttaagacaaatccacaagtaaactccctcttcctctaattgaatgttattcttgtataatcagatctccatttctccaagtaaaatggaatatttaacaggaaaagagatgaattcagagattttgtcttgcacagctgcaatgcaacggcacgtgtggtgaatgaacgtgaatcactggatcgtgaccctttttgttaacatgtggccaccataacggcgtaggaccgcgcgttttggcctttatctgatcagactcagtctcgattctcaagtacataggttggttgctgtaactacagagactttagcgagagattagatcgtccgtcttagtcattcgaatcttttcttagagattgagatcagaattttctattcaaagttttgttttatatattcaatgtctacactatactatttctttataatggataggattctattcaagaatcattcaactaacatccattaaagcaaacagtttttatcacatgttgtaatttactgaataaatatcttaacctggtgacttttctttcatcccaaagattaaaatcgtaaggatatatctcctttcttccccttaagcttcgttgagactgaagaagaagaccagagactatagagtttcggacacaaaaagatctcaaatcagacaactttattttattactcttagctcaacgttgtttgacttacaaaagaaaatctcagatagattctgaccggataaatcgtcttccttccagatccgaatttctccatctcctgtagatctgcataaatggcggttactgattgacttcaggaaaataaaagggagacctttctgcttcttttcttaccatcttgaatggcggattctcaaaacggcaagtccgcatttttcttcttctttgactcgcttattttgcttttcccttccgccgtcttattcggatgtcaccgcttccgagtccgatccgattccgtacgagaactc

SEQ ID NO: 31166 - DNA, 1812 bp, Arabidopsis thaliana landsberg
aactctcgttgtccaaaactttgctgttaccaattttttgatctcttctattaccaaacccgtttgaatcaagacccgagccaccaccgggataattgttatgatcctgcgcggatgttctatagtttccatcaaccggagctcttgaactctgatcgctagctccaactgaccggtatgagccaccagcgtaccttctgcgtagatccatgaggtcatcgtttcttcttgaaggttcagtaaatgttggctctttcgccgaactgttttgtgcgccggtcggggtaaaaggatcatctggtccccatgcagtgagcgattctttcttcttggcaaagaaatgccaagccccgaatagaaatagtatgaagaagaacacaggactgctccaaagcattgtgttgaagtctcctttgagagttggcagcttcgatttgtaaacagcgaaatatccgttttctaaaccgatcacaagaaggttttccctgtcgctagctattaacggcctagtctttactactgtggtggttcttgaagatgattcgcgatggctcaagaacgcggatctgatctcttctaatcccgctgagaacaaaagccgaggacccgcagtacgaacataatgctgagtcgatacattgaaagcgaaaaccttttcttcgttgataactagaagatagcctttgattgattgtaaagctactggctcctccatttgaaacttcttcttggatctaaccctacatttgaagttcattatatctccatgaagcaatacgtgaatgatctcgccctcggatgtgaatccataagctttagaccgttccgcagcatcaaaaacataagttctggcaagcgaatggttcagtccttcacactcagtttctcttatcttcatgcttcttaagtccaaggaaccagcaccagactcagtaagaaacaacaatctctgcttcaagaacacgagcggtctactcgatggaataaccgacccataaaccgtcctgttctcagttaaaaccgtgagcttcccgcttaaatcagtcgccaatatatacctaacacgacccacatgatgcacttccaacaaagtcacaggatcagctgaatcatccacatcaaacttcccaacacgttccatagaaaccgaattcgagttccaatcttcgccattcgatccctcgtgaatccgatgcaacaacaccgcaccgttctgatgacccgtaaccacgaaactcgagttcttaaacacagatgaatacgaaaccatagcagtaaccggagaatcaacagtggtgaaaaactcaatcaaaacatcaccatttctcaagaacacataaactctacctttagaatcaccaattgcaaagtacttgcttgaaccttcgaaatctctaaacggcaacacattgatacaagtcgcatcggaattgagtttcacagctgatgtaaactgaaacctctccgaccaaaacggactgtatttagtcactgaaaacgccttagcccttcctctctctttctcttctccgatgtcatcatcaactgagatctcgttcttctcctttaatggagttgcagataacttagcatctagattagcgactaattccgtcagattcttaacgagttcctctaaattatgcaatagaacagcttctcgattggtttcgctaacagacacagcaacatcggtagaaacatcttcgataaccggagactcggtggcatacaacggcgaaatgaaaagcagagtgaaggagaataaaagggagaaacagataaaggaggacttgccgaaagaggatccgc

SEQ ID NO: 31167 - DNA, 1866 bp, Arabidopsis thaliana landsberg
gagtagtacataatcttaggagctctgttactgaagttagcattttgtccacctgcaatggctgcaactgctccaaatctaacaatctccttggttgttccatctcttcaagagaagagttatagtacttgagtaaaacctatatatgaattaacatgtcgttattagattgctcttcaagaagaatcaagaaaataagtgatatgtttctagttatattctcaccttggaatcttctgcggatggaattatgatcccgggcatgtccatcggtgtaggattaatctgaaaaccaagaacataagggtccatgtagaacacaacaccctttgcagatagattcttggcaacagctaaagcttgtttaatagtggaaagcccgaggacgaaacggatagagtagctacatatcagtagattcccacggataacatctttatcgaagctgccatagtcttggcattcacctacatacatgtctttgtctactactgaacttttgttcttcaacgcatcaagagcagagatcattgtgtacttcttgccttcatctgtacgaactagaagaaaacaaaacagaaattacagataagcaaaaactagctgatggtttgaaactgaattaagacttacgtgcaagtcctacgcctggaatagatacattgttgcctaggactatcgagttagagtagtctcgatcgtgagaagcagcaccgacagtgaaaatccatggactgaaggaggacatgctcttaggagaaggacctgtgtttcctgcagcttgtacaacgaatataccggccttaacagcggaaagcatggccatatctaacgggttaaagaacgtggctacaccgggaggacgtcgattaggtgtgatggatagacttaatatgtcaactccatcttgagctgcctaataagattcataaaccaatgaaaaatgtcatggaaagatcgatacattctaattagtcaataaaaggaaaaaggtaaatgatttacctggtctatagcagcaacaacatctgcagcaaatcccccaaaactcttatacaatgccttgtaaacagaaatactggtacatttttaaaaatgtcattagtacactcaatgcaatatgaatgataaaaagatgatatctggctaatgtctatttacttactgcgcacgaggagcgattccactagcacttccaaagttatggccagaaactactgctgagacaccatggttacccgctgcgatggaagctgtgtgcctgtttcatcaagataatgatatttagtagcagaatataaagaagacgccaatgtttcaacattaccaagaagttatacttacgtgccatggccatcgccgtcaaaaggtgaagcatagtcttcagatgaattgaaaatccctctagtaatagctgactgcgcgaaatggcgagctccaacaagcttcctattacaggagcctgatggaaaatccggagtaacttcacaaacacctgagaaatgattagggatcggatactgacgctgggaagtgtcagtgccattgaaactagggtgagttggatcaatgccagtgtcgataaacccgataacaattccttctccagcagtttcatatccaccttctttaacccatgcaccttttggtaaacccatgaattgaggtgtataagttgttgccgtcctaacagaaaaatccaacactatgtttgctacttcccttcttcttgaaagagtctcagcctaagagaaaatgaaggaaatataaagataacataacatagtataagctcacagagatatggtatatgatcaagactacctgttgtgagctaacaaacacagcaaaaccattgatgagata

SEQ ID NO: 31168 - DNA, 2637 bp, Arabidopsis thaliana landsberg
tgtatatcgtattgaaagctgttcatggtgagcttgggggggagatagctgaagagtttgctagagaatatgttagcttgccttttgatgatggtaaagttcctcacttggtctctgtagcttacaacaacatctgatcaaatgatgatgatgatgatgagtttaaggtcttgttgttatgttttaaggtagtgtttgaaaaactggtcttcttgtatgataatgcaagtttgtaacccttgtatattggtcttctttactgttcttgagacttgaaaacttctgtaatctgaatcagaattggcatatttcttattaatttagctaaggttagattactcagaatcccactagaagcattgttaatcttcggtgaaaggtttcatttgtatagacattgtgatacaaatgactaaaagaaacatacatccacaaatgtaacctattacaacaagaacaaaaaggatacctgtaatttttgtttatcccatgtacaaaagaattcacataagggcataactttgaatctggttttttacattacctcctaaagcttcttaagattacacagaagattccaacatgaaataaaagaacataccttttgaaactgtaatatcagagattctgtccagagaaacctgtggtgttttgaggcaacaaaaacaggttcattaaccaaaaagaagattcattaaactcacaaaagctcaagcgccgtcgtattcttcttctctgtcaagtgatttgctcttctttaagccttaaacgtgcaacaggctgttgatgattgaagttaaccgttgaggtgttgtgttgattgtttggtcttaactgatggctgctggttctagcagctggaacatcatggttatgtttaccttcatatgttgttacaacagcttttgggtcagttgctgctctctctacatgtttccttactccgcaatctggtgttgtacacttatagtagctcctgtggattagatcaaagagcattaaggaaacaagaaagaccaatgactatcttgaactagatgaccaggttttagtcttacctcggataaggatttcctttgactactttctgaccatacttgcgccacctatatccatcatctaagaggtcaacttcactcgtcgtttggacaataatcctaggctctgtcacagttctatgcgatgaagcaactggttctgaaacccgaacttctgtatttctgcaacattcaaagattgtttaaatctcatcagaataaccaaaaccacacaagagatgaatgtaagaggaacagtaaagtctcatgagtttttcttatttaccttcgcttgggatcaggctcatcctcatgtctttctcccacactagtctctgcattcccaacctcctcgctatcacttgcttcagacatctgctctgttgttgtaacttggcttgtttcctggtccctcttactcttgttgagactgctattacttgtttgaaactgatttgcaatatcagaacttttacaactcccgttattgttaccgcgcttttgaggaagctcatgattgtgttgacccttgtagatgatttccgttacttgtccatcgagtgacctctccactttcttcttgacaggacaagctggatgcgtacatttgtaataactccgaggaaaatcgctccccttcacttgcttctgcccatatttccgccagttgtatccatcatcagctggtgcacaacaagccatcgagtctcttaaaccgccgagctgtctttcttcatagtcttgggaatcatcgggttctaaagcgatgttagtaggatcaaggccacttcctgaaatggtttgcaaggctaaggatgtggtaatgtcgtcaaataactcagctttagccttatcagaaggtactgatgagagcttcccggttgttggagatagctgagcttacaaatgataagagattttagagcactgattcacgaaagagagagaccataatgaaatgttgaaaagaaaaagttaccaaagggtttgagaggaaaacaggagactctaacagagttgcaggactaagaccaggagaagagatggttaaagatttcgactgaagaatatcctcagtgtttaaccacggtgcattaaacccggatctcgcagcaatcctttcacgaagagctcctcgtgaactttcttgaaaggtaatttgcaaagaatcctcattcttgatgtaatttaaagaaaactctctaccaagttccgctttcgatctcttcctgtggttagtagtactacagtcgaaccattctcccattacagcagctttattatcaataccagccattgcaaacccaagtttcagctttaacttgggctcaagctgaaacgtgattaggtgttacatatatgacacagagcagttaacatggaactaaaatcttaaaaaattattgtaattaaaatggaaacagagcagttttttttatatgcaataagtcttttgatggagatacaagagtgattaataccttataacaatgaagataaaagagtgcttaatacctgatttaataatatacatgcaataagtgacacccatctgactttttatttcgccgtttagacagtaagagagatagaaacatcg

SEQ ID NO: 31169 - DNA, 2475 bp, Arabidopsis thaliana landsberg
agtatgctaaatattattttccatcagtttcatgtaaagaataaagtttaacctcaaagagagtgacaaaagatgcagccatcatcgcaaaagaatcagtgatgtcgaaagttggactcccccattgaaaaggtatggtatgtatatcctagtattcatataaatataataataaaaatagtgaaatatctccacttggaaaaagaaaaaaacatttcaaatagaagaactaaccaaggagtgttggtgattagaccagtacgatctgtacgacaactggtttgagtagtttgaggcttgtggtcataaacaccactcgatgtgagtagctgagcgaacaaccataccactggaatgcataacatcattccataagggtcacatctatttccatcccaaatcatcggtcctttcttcaccttcagaaaacgcggtaagtactacacccaacaggaaaaagaaaaaaaaaaagactttgttaattgtaaataccaaagccaagcacaaaacaaaaacattcttaacaaaaaaaattgatgtaaaattaaaatcaaaaagtgacatgtaaaatgtacatgtaaccaaatatagttcgcgttgactaaattaatgtttttataatcatgtgtatggatctaaaacaaaagaaaagtaagaaacaacggttagatctttacttgagtgataaaaaccagtaggattaaccctggaagtccaacttcaacacatcttgctaactgaacaaaagaaatttttttatcatattataaatctatataattacttaataatcaattaaaaaattaaaaatgttaatggccaaaattagtgtatatacatatacataccaaagggaaaccaatgtggtagagtcccaatccggtaaatgttaccaaaggagcaatcgacagagggcttagaaatctaaacagcacaaacgaaaagtacattcatgtgtaacggtagagtcataattcggtacacaaaatagtaataagtaattttttggtaaagaggtaattaacctcacaatatttctccatacaccgaggaaacagacaagaacttgaaaacaaccagtgataatcagagctccttgtatgcttctcattgttctcacaaacctctgattaattatgttatcaaacaatttgttattagtacaatatagtttgtaaaattgatgataatactaacgttaagacttacttcaaaaggatccgtgtagtaagtgaatctggtggaataaatgatggaagtgataggaatgatataggcataagaagccgaagcgatcacaggcaatcgagttccaaagaaagactggaacaatgttgttaatccagacacaaatagtaatgtttgtattactttaaccttttctgcctgaaaatgttgataggaaagaaaaatcaaaatgtatgtatagaaaactaaaatatatgtaaacgatttagtgttttaatttaatttctagaaatttaaataaatttgctgtcattagtttttattataatttattaattcaatctaaaaatcatgtgctgtattattgctactatattgaatattatatgttaaaataaaataatgttttgcatgaatttatttatatagcaaatttgttggtgtagatgaaaaactatgataaccagaaatttgaaaatatggtaattaactactaacttcaaaacaaaactgaaataatatttaaaaataatcaaaaccatgatttaaaaaatcaaaagctagaagatcatatattgtgtgtattgagatatgttaataattatgtatgatatgttaataatttacaaaatttgttacaatcagatctttaaaaagttatttgaaaatatatatcaaagaatcatatatgtacttacatcaccacctcccatgagtggaactaatagactcggaatgagaactgtaataccaagactcaacaaataatgctggaaacctaacactaccgcttcaactgcaaacacatcaaagtaatccattaacactcaaaaatattaaatagaaaataaggttcatttataaataaaaaaacatacgccaaggaggaggactgttgacacaatattgaattccagggagttgttctttcactgggtggggttgtaactcctccgcccggtttcctgctccgttgtttccaccaccaccattgccaccagctccaccaccaccattgccggctccatttgccatggatgtaaataacttctttgtttccttaatccaaagtaaaccactcaatcaataaacgacttgataaactttttatccttctagtgaaaatattgtctatacattaatacaccattttttaacatcatattattaattgatacataagagttaacgtgatcgacacacaacttcagaaatccatatacataaatatagaagaaataatttttatatttcatactttaaaaaaaaacatcaatactcaatata

SEQ ID NO: 31170 - DNA, 1679 bp, Arabidopsis thaliana landsberg
aaaaatatatataaattttgatctttgctcaacattttttttttgacagggtaacaactaacaactgaaatttgtgcttcatcggcatatttttattggtataaatcactcactatcaatgacgtcaaaaagaaaagaaaatcattcaaccatagttctactgtttagtccatccatcaatgttattgcttgttgagccaatttaatcattacaaaataattatgatattttcacgtaccacatgattgtatcgacgtatctaacaatttactcgaaatcattacacatgtccacgtgggaagcccgtcacttattttggtccgttccaagatttgattgattcttataatttattatttgctatccgtgcaatctgtattaataataacatatgctacgttttgaacactaaaacatagggatacgctggaaaggtgtgtaagatattagaatttcagaataacagctgttcacatgcatgcagaaattatatttataaacagagatcataaaggcatacataatctaagtagcatttataagaactaaggtgatcgatcgaacactgaattgaattatatcagaatgaacttgccgccttatcggtgcttttttaaaaagtcgacgaaatatctagtgaattgatccgatagaaaaaagatgtctttacatcaaatcgttcgacaaatatttagtttgaaagatataaagcctatacaaaatatatatcaaaacgtctggactttggatagttcaactagctagttaccaaattagaatgtttggaaataggactttactatggaatacgttttaaatggtgacggtcacaagatgaatcgtatatgaaactataacacaattgaatgctgttttgttttttgtttttgacagttttcggattcgcaacttgtaaccatctgaaccctaatattaatcatagttaaggactgaaaacaacagcatcgagcgtatttccgttgaacaatctttacgaaatccaaaataaataaataaagttaaaaagcagaaagtttcaagattcaaaaaaaaagttagcgaggagacatagcgagtgagagccacgtgactaagatgtgtaaagaatggagtgaggagaaaaaaaaaacagacaaaggacttaaaattaaattagatacgccagcgtttcacgtgggaagtcacgtgattgagtatccacgtgtcaatcccacaagtgaaataatagacgggttcccattgtcctaccttcgcaccacccccgcgcgtgtctctttgcctctctctcaccggacaccaatcatttgatgcgacacgagcttcttctacgtaattacatttataccccttagcctcctctcatgatgttatgatcacacagcctcgatccaatgcgttttggattgtgtgtgggtgtccagctgttatccatgtgaattgcacgtgatctcgctttgtttgagaaattagatttcattgcactaaaattggtagagagacaattagaacttgagtgatggataattcgtcttttcttaagacgatatctatttaactatattagacttatgaacaaaaccaaaaatttcatttgaaatgtactatcgctcaagatctcaaggccttcatattgatcttttttttttaatcaaaattttaagtaatatcaattataagt

SEQ ID NO: 31171 - DNA, 1168 bp, Arabidopsis thaliana landsberg
tgccaagcccttaagctctgctgcagatggattatgggtttcttctccattcaaatctaccttgtcgttgccatttgcttccacttcaccggttttgtgttcccagcgatgccagaaaacaaccacaagacctccaaaaatcaacacacttgcaaccatacaaacaacaaacagaagtcccttgtaccaccatgttgttatgttgtacttgtttatgtaaaagatgtccaccaatgtgatcattgcaataaacccaatggtggagataattagatagagtccagaccatatgttatcccctgtaccaactaaaaccgacatggaacatccgttggtccatggtgttttgacagaaggatgcaccaccttgtgaaccatcccatctttctgtataaccatggaacattgaagagttcaaaaactaagtaaggcctattgcagctcccaaaagagttatgtaagacttaccatgcaaggctcggattgtcgagtgacatatatgtgaatctcaaggtttagtttcttagacaagaaatggcaaatggaaggtatgtcaattgctgagagcagagagagctcgtctgagtttttaatggcccatacaactaaaaccttaccaggtaaacaatctttcccatctcttttacggtgtaggatatcgcttaagatggcaaaaaaaggcgtaatcccgattcctcctgctactaataccaggttctcatacctgcactcgcaaataaagctttcttgagtaaagctaaagcttactgtattgaaacaattcatgtagacgaaatgcattacgctaagtggtatggagattcatggccataaggtccctccacacaagttgtgattttgggatatgactcaggagaaataagctggtcttgattttctgcctcatatagagttgacaattgatccctaagctttgcagtccatccaccaagaacttttataagaaccgcaacatgatggttcccatctagaggacttgatgaaacactgaaaggatgccactgtaaccaagacagttccttcacttgaagaaagataaagctaagcgcgttgtatcgcatatgtggtagaataagagaggaaaatggtcagtaaatgctctagattggaggtagaggactctcatctacagagaaaaaacagagct

SEQ ID NO: 31172 - DNA, 574 bp, Arabidopsis thaliana landsberg
tgcagctgagtttcttggaattatggtcttctctgtttttttcctttgggctatctatgcttataccttgaggaatctcaacgttcttgactacttccacgtgcttcccaataacagaaggttcttaaactcattttcttctttatcccatcttagctttttgtttcattccaatcattggttttttgtttgtgtgtgtgtgtgtgaacagtatttttctgttggagttaacgggtctgcgttttgggatgattggattgttgtgtatggtgtttttgtttcttccaatctcgagaggctctattcttctccggcttattgatatccctttcgagcatgctacaagataccatgtttggcttggtcatatcaccatgactttcttctctttacatggcctctgttatgttgttggatggaccattcaaggtcaacttttagagcttgtaagattcttgcaacatcatcctagttgatctgatatataagtatagtgtcgataccaattggttttgagatggaaaccccgcatgtcatttctacttttcctctcaatttttgaatggaagctact

SEQ ID NO: 31173 - DNA, 2539 bp, Arabidopsis thaliana landsberg
  unsure (1)..(2539): unsure at all n locations
aagatatataatcgatgcatatatgttatataatcacagtctgtatgtattatggaaacaactttaactaatttttgagattgatgctacttcatgatagcaatgtcttagttcttttgagttaataacttaatatataaatataatggtacagcaacccattacaatcgtcattataatcatcttatccatactcaatagtcaatactctcaccttccctaaagtgtggttgaaatcaaactttactctctctaggcctgattataattcttttttgtctacacatacaacttcatgagacttaattataatttcttagtgttcttttgttgacatgtaaatcgtagctaagtctaagtggtacttttatttgttattggattttgtttcggttacttaaaagtgtaatgaagaatttttttgactatatacatctaagtttttccttggactgattataacttgtgtgttcgagattgatacaacttcatgatagtcgattattcttgtttaacgtaacacattgttagatagtgtcatttaccagaaacaatctaacagtgaaactttgcaaatttatctctctgctggatcttgaacgcggaaaccgaataatgtttctttcgagctaatccgaatgatgttgaaattctatatgttcagattcaggtaatgtaagcttatccaataaccatcatagtcgtcataataaccatcttatctatactaaagtagtaagtactctcagtctctcaccttacccttaattgtggttgaaatcaacctaacgtgacactctctcccaagtacgttactctcacgtgttaatgacactctcatttttttttatagttttttttattgtgtactaggattgttgtccgaaggaatctttcataaatgagaatgatagaaacctcaatggtccagaaaattttacttgactcttctaagaatatcttattagtttatctctagtaacgccaccttaaaagccgatgctgcttctgagccaacttctcatcacaacactgagaagtggaaattcaaataaagatggatgattatgaaacccctcttttgtccaaggactcatcatcatcatcatctgtgattacttcatctttgaaatggatattgaaagttgtaatgtctatgatttttgtgacttgggttgtttttcttatgatgatgtaccctgaacaactcggtgatgatttcctcacatttgtctcctccaagactttcctaggcaccacaggttacattaacgagcagatgctttgctttctacggaaacatgtccaaaaagtgtaactaatttcatcctttaattgtctaaatttgcaggaaccatgttcttgattttcagttgtccgattcttgtcatctctgtcttagcttctctctatctcattatctccggggaagacaaggtcttcactaagtacgtgtaataatatccccaattgcattcttttggttgtatcaatttttgttcttgcataaatgtgtgtgtcatgatgattgtgaaggaagaagatatcgaaattcccgaggtttaggctatggacattccctgttcttgtggatggaccatttggagttgtttctgcagctgagtttcttggaattatggtcttctctgtttttttcctttggtcgatctatgcttataccttgaggaatcatgaccttcttgaacgcttccacgtccatcccaagaatcaaaggttcttaaaactcttcctttttttttcccatctttgtctttttccttctcattccaatcattagttttgtgtgtgtgtattttcagcattcttctgttggaggtaacgggtctgcgtttaggaatgattggattgttgtgtatggtttttttgtttcttccaatctcgagaggttccattcttctccgtcttatcgatatcccttttgaacatgctacaagatatcatgtttggcttggtcatatcaccatggctttcttctccttacatggcctctgttatgttgttggatggatcattcaaggtcaacttttagagcttgtaagatcctacaacatcattgaatcttgacataatagtatagcctagtttatctactatagtatagtgtcgatcatcggttcaagataggtctatactctataagtcacaattttatcttcttattttctattgtaaagtttcatcatcatcaactacttactcctctcagatattttcatggaatgctatcggaattgctatcttacccggagttatcagtctagtggcgggtttactgatgtgggtcacatcgcttcacaccgnnnnnnnnnnnnnnnnnnnnnnnnnnnnntacacacatcaactatacatcgtctttattgtgttcttggcacttcatgttggtgattacatgtttagtatagttgctggaggaatatttcttttcattctagaccgcttcttgaggttctgccaatcaagaaggactgttgatgtaatctctgcaagagtttaccttgtggaactcttgaactagtcc

SEQ ID NO: 31174 - DNA, 1561 bp, Arabidopsis thaliana landsberg
  unsure (1)..(1561): unsure at all n locations
tttacaaaacataccacgtgtcaaacagaaagtaaattacagacagatcaaacaaaaaagccaacaatgtaaacactaggatcgggatttttcgtaattagaattttgtttgttaagtttttaagatgaagtttttggagtttgagaatctttgttgtaattttggatctggaaacttttttttttggtttgggcagaagaaaaataaattaaaggcaaagagaacctctgtgtacgaacggcacaatagatgatgagattctttaaatagatgcgacgaaaagatgccaagtcctaatcaacgatggagatgcgacacgtttaaaccgacggctgagattatgtttatatttaaagggtagagtcggttacggttttctttgatattattattattagttagaaatattttaaatcataaacctaatcacttgataatttggcaaaatattattcaacctttttctgctaaagttaatttaactttaatatcaaaactcatatttggacgttatactttaggtaactatttttttttttgccttttttctcttgatgatggtattttaattataattttagaaaaaagtggactatttccaaaatttggttttgattgcaatcacacattagccccaaaatttggactatattaacaaacctccctataattaatcattcaatggagaagaatctcaacattttaaggtatcaaagtcatttctaatccataagtgttcatgttattctcttattcatatccttgagttatgctattttcttctcctttcttgaaccgtgagttacgttatacgagtttcatcacatatcaagtttcgtataccatggtccatagcacactctgtcatgtttgggtcttctaactgttgtcaaagatacgtcaaagagtcatttcgtacaatttccaccaacaagtgcaacatggaaaccccactcctaattaatgttttaccggcagaagcaatctctgccaaggacaaatgtttggcattcccataatttttcctattgcttctaagcttctcaaaaaaaataaagtgttgcaattgtcaagatcgataggaacaagataaagactgatactgattgggggttgttgtatatcatagacaaagattgaacaccatatatgacaacttccataaacggcctatgacacggaatgagtaataccgagtttccaacatttttgtaacctgagtcaagtaggcttccctcctaggacatggaggaaaccatatctgacgactgacgccatggtgtatgcttcagggcaggaaatgcttatatacccttcctgacattatatgactcacatattagagtgttgctttttttcgtaacacatttgcagtcatcttaaaaacacacacaaaatggtcatcattatcaagaagaagaaaggagcacatactttctcttcctacgatcaattccagtagcacccatattcctagtgtcattcttagaaagcatattattgtactgcattggagaaagggctggagagagagcagcagttgcagatggtgcangtggc

SEQ ID NO: 31175 - DNA, 4718 bp, Arabidopsis thaliana landsberg
  unsure (1)..(4718): unsure at all n locations
gctggagagagagcagcagttgcagatggtgcaggtggcaaagaagttgaaggtgcaactggtggttgtggaggtacaggctttggaggaggccgaggtagaatgtgcttcagtctgttgtttctgtagttcttccaatagtaaaactgttgtctatgcgccaattcctggaaaaatccagattcaaccgaagacaaagttcaaaacttaagaaaacttcaacaacaatagatttcctataagaaattctgacaaaggacataaagtttagaatattaaacaactttctctatctcatgaatagatgggcataaacgcagaatcacagaaccaaactagcagaacgtaagcaaggttttgtactagagagaccctaaactctacaagtccccaaaacacattccaaaaacaccagtaccctaatgaaccactccctattcacaatgctcactaacatgctgatttcacttgatgattcatatcgtattcttgtaccttgtttgcaggatgagccatagcagtcctgaagttggggttttgaagaagttcaaggaaatataggcagtgtgggtacctgtaacaagaacataggaaaccaaagatatattatccaaaccttcacaagactcaacaagactacaacaattccataagatattccaacttacataatgaacttgatgtactctggtcgctgccagtattgaagatacttcaagtatccaataaatgcttcatcttcaaaataccgattctgtgccaggtctgccaaacagtaaccaaaagcagaatgtggtaagtacaaaccctaagccttagaacaaatacctttttaaatctcaatttcgaacactaaaaccctaagccgtagaacgaattctaaacttacagtggatgtaagtaggattggcgagacattgaataaattcaagttccagtaagaatcgttgccttccaccgtcgggatccttgtaagtgttttttggcctgtagagatgcgaattagataataaaagagcagattcgaagaatatgaaagtgtacaagaggaagaagatgcactcacggggatggaatttctgatgcatcatcacccatctcctctggcgaagccatgaacgaacggaacctgaagcaaatttggattctcccaatagaggaatcagacggaggtagacggaggattttggttctgatttctgaattgaattttcgttataaaccaaaggcctaaaccggttctgaatgcaaagagaaaaagagattgggaaattagtacaaaattacggtttaagaagcggtcttttttttttttttttttccacaagaagcggtcttaaaagaaccgttatactcggtagcagatggagaagtctctgcccaaacttggagttactttacattcaaagattcacttggtggcatttttagtcatgttatgaatctctttcttacttatctcaagattatgaatcacaaggacaaatcttgaattttgaaacatggaccggaatctttatgcaatcatacaaaagtttttttgtgaccaatcgatatagatgttgcaactctttgtcatgctaactatggttgaggattatagcagacagaaaatctgaggacatttggctccaatgagttggccctcaaaaatgtatactgtacattgtaatgttgtaatccccgcaaaatgtgacagctaaaaagctagagtttcccacagttaaaaaaaaatcaaaagacaagagccatcagaccctggactgacctatgcaactcccaagacagttttcgtatccagcctgcgtgctgtactcagttcttacttgccaatcaacaccttgtgccaacttgccaagacaagttctgtttcagaagttaatggccttcaaattcaggtgatggctttacaagttttcaccatagcttgtgaatcccaattgctaaatctgatgagatggagacgagcagcggataagaagagtgccactcggctttgaacactcttttcttatgagctttcatcgagagagacgggctcggtgcattgtatcggatatcaaagatgtggatcacggggtctgcagaaccagatgagatgtgtaaaccatctggagaccaagactgattaattagagccgactgcgattcactgctttcttgcttccacccaaaagaaaatagttctgtctgaggcaatctaacatcatacaaccgcagttgccggtctagctgcctgcaaacacaacacaagcaaaagaacggactttaaggcaatcgcttcttctgggatatatataaatcaagagtcagttttacctcgtgttaaccatgacaagattaacatctcgcgggtttggcattatatttgtgcatctgttgtctagtctatgtttaaatgtgactttttcttctcgggcatcaaacccaacaaatctcctatcgtctccacatgacaagacgtgattgttatggcgcattccagtaactcccatcacagccgacgaatgcaagtccctatgcagaagcgtcggcttccacgcattattctcacactgatcccgccataacactactgcatggtcactcccacctgtgatgaagcaaggatcatcccaaggcgtaaacatgattctgttgataagacctttgctatgaggcctgtcctccataaattgcgactcacatctctgcagatgaacagatatccaaaaagaaatgagcacataactaacttccccaaggataaaagactataaccatcaagttagatcttacaactagtagataagtcaagggtcgaatcaaattcccaattattccagctatattgatttttttctttctaacaggttatgaagaccaagttaactttctacaagtttaagcacacactccactcatgaatgtccaatcgcaaatttaatatggtaaaacgctagaatgtgctacagcattcatatacttttacctctccagcttcattcagatatatggctgatatctgagggtgaccatcatctgcagtatacacggagaaaagtgcatttttatgtggatgccaagctatatcttctgcccatttcttctgatctactgctacccgattaaccgtcttaaacaaagtagctgtggacctgctcaatggtgaaagcatgatggataggttagtatccaacgaaattcagattaaaatgttcacgaaaataagagtagaaaaaattgtacaaaactctatctcttaagatcatgtacaactaaatgttgcagcttgttgacaaatataagtgaaactaaatttcgcctacttatcacgtggatggnnnnnnnnnnnnnnnnnnnnaactagaaatacataattaaaatttctgatacatatgaaaatcaaggaattctatatggatttgaagttgaataatccaataacccctcctaaaaccatttaaacccccaagaaatcagaaagaaatatcataatcagtagatcaggcatatttacaggagacttacctatcagactgaagcttccagaaatgaacagccccatccaatgcactgaagcataaccaaaaaccaaaatcaagagagggaaaagaaaaagattaagcacatgagtcgagagtatattaggttagctaattgaccaatgactttcttggttccatgattccctcttatgcatataatatcatttccttagtaaaaaatccagacaaagccccaagcgacagttatgagaccgaagttcatccaggagaatggcagataataatttaggtagcatcttctattcacttttggaaaagagaaaaacataaataatgtaaaaaagcaccttgtagcaaatagctcacggttggaaggagaaagagcaagacttctcattcttttcgtgtggcaacttggtagcatgccggcagtacggccttcaattgtgggacgcaaagagcttctacctataagtgctatcaactcatcatgtcctcggaattctgtaaagaacaaaagaaacaatagattcagagcaatgagaaggtaagatgtggcaaatcgaccaaatgaatggcttttaccagatttttcctgttgtccttgttgagaaatgttagaagaaactctgatccttggctttgccaaatccttattagtgtggttatctggagcttgagcaacttcattaggaatactacgagatctcttgtcaagaccacttttgtcttcctttgggacattagaatcccttgtagccatgggctgagctgcgttatctcgaccttgggattccctcaccacttcatcaggaatactacgcaatctcctggcctcagggccacttttatcttcttttggaacatcataacccctcgtagccatgggttgagtttccttatctcgatcttgggtttcccttaccacttcatcaggaatactacgaggtctcttggcctcggggccacatgtgtcttcccttggaatgttataatcccttgtagccatgggttgagcttgggtggtctcatttacttcagctctgacggtagcagaagctcttcgtttaaaagaaggcggtaagataatggatggcaatttcaaggattccatctcactaggtgattgtggagtagagttttcattggcagtcttcgtcatatttccctcgttccagaactctgctataccaagtatacttccagttttaccaggcgctttggttttac

SEQ ID NO: 31176 - DNA, 592 bp, Arabidopsis thaliana landsberg
tctatcagcatctcttcgatctgatattcaagctctagagtctataatacgcagcgttgatccaagttccatctctccatcctcttacctcagcacatgggacttctctgaagacccgtgtgaaggctcagggacgttcttgggagttatgtgttctttccctctggagaacacaacaagccgggttatagagatcgatcttgatgatgacggttatgacggtttcctctctgatgaagtaggaaacctaactgagctcactgtccttagcctcaacaagaacagattccgcggtccagtaccagaatctgtgttccagctccggaaacttaccaaactctcactagcagaaaatttcttcactggagacataccagcagaaatcacgcggctcaaggagctcaaaaccatcgacctgtcgaaaaacagtatcgccggtgaaatccctccaaggatctcagccttgagaagtttgactcacctggtcctatcaaacaaccatctcgatggaagaatacctgcgctcaacggcttgtggaagctacaagtattagaactcggtaacaatcattttatggaatgcttcctaagc

SEQ ID NO: 31177 - DNA, 4115 bp, Arabidopsis thaliana landsberg
  unsure (1)..(4115): unsure at all n locations
taaataatgcttttaaaggtattaacccccaaggtttggtaatggaaagtcaaggtcaaaagccttagccatcccttcgagtggaaagaaagtggcctaaatgttgacattgaagtggtttttttatttgaaatgaaggccaattattaagtttttgtcggctaattaaacaattatatttgttctatgtatttgtttgtatttactttcccttttgttaaaaattgtatgtatgtgttctatgttgaatgtctgtgtgaaacatcttttacattaataaagctatgattgttaaagatacacagaaaattagttgtctttatgttgattgtgatggggtttaattatgttttattttgactcttttgcactcttgtttttatattgatgaccatcaatatattaagtccctacccccatggttttaatcagttatattttattttgttttttttctaaagggtgttattatttatatgaaacatatcgtacaaaccattcatgatatagagagcatattatacaatccaaagacgtctaaagaaagaaattaaaaagaactgaatcaagactataaacatcaaaagggaaaagtctggatgctcgatgatcaaccatcagagaagaggccaaaccatggtagcagtgtttgaaagtcaatcttcttaacttctcaataagaacagcaaatgaaaacaaagcttcgtaactgaacttaaagcttgcatcttatgcctgtgttaagagagcttcttgcttaccaaagtgtgaagagacctgaacctagtaaaagaagattgatcctatcctagaaatctgccaacttgagaaccaacaaactgcaacattgaaatctaaaaaagactgtaacttgaagcaatctaagagagattgttcagccaatagcattaaacctgataggcactaagtggggtaagcatctataaacatttcaaaaaacagaccttacaccaaaaagtgaaattcacccttatactctggacagcaaggaacagtagtactatggagtgttatccgagtcagagtaaaaccttactccaaagtctttgcgatattgtttctttttcttaacaagagtgatagccagctgcttgccctttctgcgttttgacccttcaccaatctcatatctccctttgtcatgaagagcacttggagtgatagagccatcaaagagtgatttagggctcagcgtggggatacaagactgatgatgttcctcagctggttcattcagatcgaagattggtgaagcaggacttggtggttgagaaataggtctgtgagaagagatagcagagctagaagaatgattaacaagcgggggtggagtaggattgttagatccctcatcttctgcccaaacaggtagcacttctgcttcattctcagccactggaatagcctcattatgatcattcccctgaggagctaaataagggtagtggtcaacatcatgagtaatacgacagcagttggaacagatcctatgaagtctctcatattcaaaaccaatcatagcttcctctcgtgattcaaaacggacccgtctaaagaaacgcagccggtctgatatagagattctcactttcacacgtataaaagctatctgagaagaggtctcatcatcaaaatcaagtcccatgattggtcccaaagtactagtaataaacctgacaatcatagaagagacatagagaactggaattcccctaacttgaacccatagatcaatataggtgagaaagtcagcacgggaaaaatcttcccatctttgtaaagcaacaaaccactgattaaataaccacggacctcgcagcatgactgaagccaagtctagactagagcgaaatcgaaattggatacacctatcatcaatgatgcgtccatggactcttgaggccataccccagctgcgaggcaaagctcttagaacacgtcggagatgttgtgcatgagagttgagtggtctggtgataagactgagacggttacccgcaacaacactagcataagctgcctgagggacaaagagttctggatcatctcggcctagaaccatatactgtatgtcttgccaaatttcatcagccatcacgtaagaagagagagtaaagcaaagaaggaaacgaaaagaagagaaagaagtgtacaaaggtgactctacgtagaagtaattgaaatatatatagaagagaaggattgaagaaagtaaaattatgaggagtaaaagaaaggcggtaatagaagataatttacagaaaaaaccaattttaaaatactaataagacaaatataggatatcaaaccaagaaaagtaatgattaccagagataatcatcgaagaaaacccaaaaaatctgtgtttgaactctgtaaattatagtaaaaatatgaaactgtggactgaagacttatcaaaacagtaacttcacagagtcaaacctggtgagttggcacacttgactcatcacaagtcatatgagacaaagatgcagccgtaaatatctcctgatcaaagagaatttttagccagcgtgaagggccttgtgccacataggaggaaagcctatatccagagataacactagcagcaattctggaagcaccaatgttagactgtataggcccaaaaaccatcatccatctagaatgcaatctgctaagttgaatcagagggaagatatgaccaagaagagaaggccatttaacagatttgtgaagagcttgaataatctcatgtgtggatgcaccaaatagaacattctcaaatttcaagttgtgcatactttcaagtgcccattcccaactcctaacctttgcttcaaaaacagaagccacctgagcataagaacgacgacaatgaagcaaaacatttcccatagcatctctgaccacccaagaagcacctgataagcactgtttctttgaccatgagaaaccaatgttacattttacttcagaccataaagggggagaccagtgattctgatgttgtattggagaaggagactctgtaatgttcagtgactgagcagcaaaccatgctgcagaatcctcataagcctttctaactagcaagtcttgagggtaaagagactcatcaaataacatcttgctcggattcttccaaagaatccaaacaatccatggaaaaactctccgaacttcagatggaagatgcacattcctccctaaagagaaaagatacttaaaatttcccacaactgagtctccaaataccaccagaaggagtaggaaaattagcaacagcccagacctgtcttgcatagggacataaaaataaaagatgattaactgtctcctcctctgcatcacataacagacaaccatcataatttttaatgcctcttgttaggagtcgagctgacactgcaatagcttctttaatactcttccacagaaaaacctgaattttaggtgctgttttaactttccaacactctgctaaaacggaaaataagaaaggagtattaactggttccacgaacttctccttattctccatattaaaaatcagatcataacaagatgtagcaaagtatatcccttgatcgattcccagcccaacagtaagaatccttctttgctaacaacggtttagtggaaaggatgcgaaagacatcatcttggtggaaaagatgtcgaagaagactgatgttccacaacccagatgaaggatcaattaagtcagacacccgaagacaaatgttcataagtgagtgaagaccaataggtcttcttgccagatcatcaaagatccatttgtcaatctagaccaaagtatcttgtccatcaccaataacccatttgagtcctttgagaagcagatcctttccaaagagaatacttcgccaaccataagaaggtcgagaaccgaacttacttagcaagaaggatgttttgctgtaagatttgcttctcaaaaaccttgagaagagacaatgaggatcatataacaacctnnnnnnnnnnnnnnnnnnnagtgcctgattgaacagatatcagtccctaagaacaaaacgccctgcatactttggacgtagcatcttgtcatgacgaatgataagaat

SEQ ID NO: 31178 - DNA, 1086 bp, Arabidopsis thaliana landsberg
  unsure (1)..(1086): unsure at all n locations
ttaaggtcatgtaagtggagcaatcatgctgaaagtttcttcttttaccagcccatttgaaaaactgaatcttgacatttatctcaacgtctatctcaagaatcgaacgaactaatcgatgatcaactttcagtttaagcacctcaagagctttctcagcatcaggtccccatttgaagattttcactatcctaatgaatctctcatccaacatccgcactgacggatcctttctagataatttccacttctcttgaggcttctcagattcctcatgattcggaacactaaacatttgaacaatctcattctctgcaaattcatggataaaacaaaatgttcaaatcaaaaccttttctcgttttcttacttcaaaggaatcgactttaaaccttttttgcaaatcccattactcctaaaaccctaaacaatcaagacatttcgcttatcgacgaagagggagaggaaacanatagtgcagattacctgtttgtttaaatctctgagagagatgaggtagacttgagatgcttcgcttcgcagaaccggatcgagcagatacatacatcatctttataaaacgggattcacatgtaacaattctccggtggcgacaaattccgacgtctatttgaagtcgccgtcggtggttttagacagaacggctgagaaaaacagagagaaattttagggtcagacagacgcacgtgaggttcacgtgttttcttaaaccaggcgaacccagagattgaggataacgaagcaggggaagtctaagctggcgagttttgattggtaagttatgtacacaaagcaccgaactattccaaaattgcagatatgccattgccctcctaaacaaaaaaaggtttcagtctttgatacccaatttcgtaggatttgtagatattttcttcagtaatcgaaggatataactctgagatttgtgtaagcattcttctttgagattttccgaggtcacaagtcagtacacaaagcaagttccttttttgggttttggggtctgctttgtgtcagtgattttaggattgcttcacatgccacacatttccaatgtcttaagta

SEQ ID NO: 31179 - DNA, 400 bp, Arabidopsis thaliana landsberg
aatgcttgcgaaaacactcttgttgcgttcattcaatactctccagtttgtttaagcttagaatcagtacacattatcattgagcggcgtactaccatgtattagcaacagcttgaatggcgggactaatttgcagaacgtaacgtcacaccatgtatgccatatccatgtcaccgcgccgagccttctatcatattgatgcgcaatttgtcaacttgctatgatagttattcacatgtcttggtttgtgcgtcgcccggcagcgtggggcgtggcggtgtgcctgaaacgctgtcctggtctttaacgcccgagccgcgcacgcatgtcctcgatgacgttcatgtaattgatatacgcgtcatacggcgattcgaacgggctgaagtattggtgcacg

SEQ ID NO: 31180 - DNA, 3661 bp, Arabidopsis thaliana landsberg
  unsure (1)..(3661): unsure at all n locations
ttccgacaattttagatatcgttgagttggcaccagtagaagaagctttgatccgtagagggccatcctgaaataggtaaagtgagattcagttattcaaaaagattcatgatcagtgtatgtaaatctaacttagtaactgagcacagttagttacataagtagcctttaaaaaaaaaaaacttttgtttaggttgcgtatacttacccagttaattgttcccgctgaaactgagcagccttcttctttaaacaccggaagtgactctcctgtcagcatagattcatctacaacacttcttccagctaggacactcccctatgaagaaagtgattaatttaacataatatcactactagaatcagaactactcattaaccagtcacaaggattataaccaagctatcttgagcaagaaaaaataatatccattatcacgtgcagagaagaatgtgcaattaaactgaatctcaaaaagaactgaaagatccacatgtttttttctcagcactgataaattgaaatagaactcctaaaattgcagaatgatggttaccaaccatttagatagattttcataactcttttcggaaacccacactattatcttttgctatgatcagacagttcagcatggataagcaactagggaaatttttagatgtcagaaagacagaaacacttacatcgacaggaaatgtctcaccaggcaaaaccaatagcgagtctccaactcggatatcatcaactgacacattgatgcaaattgaatcagaggaaagtacagaatccactggggtgttattgtctgatgaagtaatcacaagtcttgattgagtggagatgagtgactgcaaaaatacgtttcaagtcaaaaaaaagggaggataaagcctacaagttaatcttgggaggagaatcaagaaatgtctaacataccaatagttcattcatatcggtagatgcttgaagctttgcgctttcttccaaagaacgaccaaggagcacaaagccaagcagcatgacctgcatactaaatgacaagagctatcaatcagaaatttactattgaaactgtattttgcatgtagtggaagtaataataaaaagctttcatcctcttgtggatctgctagagaaactcaccggttcatcgaagaaggaagcatcccactccagttctggattaactagtgagatctgcaaaattcagaatgcagaaactgcaggttttcagaataggatactcaccagtcaaatataaattacagggtacaaaaactcaccaaactgatggaaaatgcagccatggatcccaatccaactaacgagttcatattaggtgatcttttcccgaaagcttttatgccatcaaacagcaattctacaatatacatctatctgtttcagtcatttgtgtttccgaacagcctcaaatatcactaccaccactttgttatgaaagtcgcaaagaatagtaggaaccatcactatcacttaagaagtttgaaaattcagagtttctctcttatgacaacgacgactcaattaagctaaacattatccataagaagaactgattcaacaaagctcacctatataatcagagtagaacactagcacttatctaagtctaaacaatagcctaagaacgactactttgtcatctctctcttatgatactaattactaaacttattatgcattagctggtaagaatcatagattcgaactaaaagtttaaacaaaagcaaacctcttcctggtcccaacaaagctccaacggccaaaccacctttcacgtaagagttgtgtagcaaatcccaaatccctcctagtaacatcaggtgcaagagaaagtcataaactacatctcttatccaacaaatgacatctagcatcacaattttttttgcattataatcaatgtaccatgagcaatgtgaattcccaaggaatgaagaatatgcgaagtgtgagacccgcaacacagagccaccaatgtccacgcaaacgccacacggttcctgctcttaacaagcaagtcctctttcttacttaccatctccttccacttcttcacattctccgccactcccatacccgagactctcctcttagcctcaaaaccactctctgtcaatctcttagctaaactctctgccgtatccgccgtcacctcaacctccggtttaaacttcacagccgcggtttcagtcagcatgttaaccacagcagacgcgactcgatcatcagacatcaaaaccgatttaactcgggcgacgcagccaccacacatcatcccactcacatcgaggagaataggcgtgtcgctcgtaatggatttcacagattcgattgaagattcagtagattcaaatgattgagtacttatctcgaccgagtttgatactaaaaaaaaaggtcgcgaacagtgccgccggatacgagaacggcgcagtcttggaaagcatcggttcacgaggaacttacttggacgaatatgaagactcgatggcggaggaagaggaaatcggagaagattgctcgccattttctccggcgagacagacgannnnnnnnnnnnnnnnnatacaagtaagaaactagtggtggactggtgtatggttcgttaaaaagagtatcgctaaacgttgacacgtcggatttggaatatatccaaacattagccatttttgtggaatttttaaaaagccaggctgtcaccagaaaaatcagagagagacataaaacgcaaagttttaataggtaagaccttctaactcagctagaggattacagcccccgggacacagcgatgccacgtgtcatcttcctgaaatattgttttttgtttggaggtaactttatcttctcaagctttcttcttctacaacacatctagagctttgcaacaatggaggcgagtgcgaatgaaccagctatgaaaagcttgaaatccaatccttcaggaccgataccgaactttttcgtatcgctctcttcggcatttacgcaaacacctcttgtgcgttcgaacaaacccaatttgcttcttctaccaccagttgcagactccgtcaaattgattcaagactttcatcagtctctggtttctgctactgagaaatttaaaggattcctccattcgttcgcctctaagaaccctctctttcaggaagcggttcgcctatcttccgaatttcacattttgtgcgacgaggtaacttctcttagcctgcttatgctaaagaatgttatggattaagttaagaagatgattgtgtgtttctcatgaacttgccttggctctgattgttactgtaatgggtgaatctttgtggtttctatttatacaaaatgggtcattctttaacagccagtagattgttgtctagatcatttagcatttattggaaaaccttctcacattgataaccctgagttatatatgtcctcaagttgggatcttttttggttcttttcttgtaaagatgaaacttggcttctggataagtccggttatgattttgtgtgcctttgcttctggttttgggttctttatgtcttaaagatgaagatcattttgttgcattgcagattcgtttgagaaacactacaagggtgaggtttgcgatgtctaatcacggatttgcagcg

SEQ ID NO: 31181 - DNA, 3651 bp, Arabidopsis thaliana landsberg
cgatggagaggcgatcgatggacttttcatggcgacggaggaagctgtgactcgtgatttcctatcagggtttcaaaatcaagacgtggagatggaagaaagaaaaagcaccgaagcagacgttgttaaaactggttcagattattggcgtgattatgaagttaagagaaattttaaagctgcgaaacattttgctcttgaattgcattcagatctcaagattgttgaaaaaacggaggaagaggtagaagaagaagtaataagagatgaagataaaagtgagtttcgaaaagctaaagaatcgatcaagaagagaagacaagagatctctacaacaagtgatatggagatagatctgaatgtacgaaggaaagctccttcgcttgtggagctgagtgcgagagttcttgctcagaattttttagctatcaagtctttgaaacttgttcctgatcacttgaggaagaagctctcgtatcttgttagtggtttaggtgaattcgatacacgtcttatggagcttttgattgaagattctccgagtgagatttgcgctaagaactgtgtccaattagtggaggatgacttggtaaagatcttctgtgactgtgatagagttagcttgaaggtatattagaatccatttgttatagaagaagtacttttggtagcaatctttgtttgtgaaagtttcaatcttttgcaggtgttgattcttgatctttgcggaagatcgatgacggattatacgataaaccagttctttaaacgcgcgcctaacggattcccgtcattgactacgttatctcttcaaggagcgttctgtttaacagacaatgcattgttgttgatatcgaaatcatctcctctgcttcagtatattaacctcactgaatgctctcttctcacttatcgtgcattgaggattcttgctgataagtttggttcaactcttagagggcttagtattggtggatgtcaagggattaaaaagcataaagggtttagtagcagcctgtataagttcgagaaattgaactatctttcggttgcgggactcgttagtgttaatgatggtgttgtcagaagtttctttatgttccgtagttcgattctcactgatctatctctcgctaattgcaagtaagttactctttttaggccttgatataccaaattcattaccaagttttatgctgaaaactaatgttttttttgctttctctataatggtaactagtgaggtgactgatgaatgcatgtggcatattgggagatattgtaagaagctagaagctcttgacatcacagacttggataaattgactgataagtcattagagtttattactgagggttgcagatatttgaaatcactcaaacttacaagtaacagatttaggttcgtacaagtctcccaatttgttctttttgtacataacatccgttgagtgttctgaatatcatcaatgtatgggattactttgacagtgacgaatgtattgccgcgtttcttgaagtctcgggaggttctcttagagaactctgcctaaacaaagtccgagatgtgagtgtttttagtacctaaagtcttgttcatgttcaagttggttttcgaaagtgtttgaggagttttgtttttaacaggttggtccagagactgctttttcgcttgccaaagtttgtaagatgttacaattcttggacctctcgtggtgtcggagactcaaagaagatgacctaagacggattttgcgttgttgctcgtcacttcaatcactcaagctatttggatggacgcaggtatgatattatagagaaacctgtaattcaggttacactggtgcctttttttgtttatgttgaattgaaccttggggtgatctgtgtcaaaagtacttaaatgacagtattatcgttgtaggtggaggatacatatcttgaagaactttcaagatcagacgttcatattaccggattgaaactgacttcactctatgctcaccttgataacttttacccaagtgtaggtgccaagttcttctgatgagtagacaactggcgtttgtatatatagctttgaattgatgacctttcttcattgttagaccaaattatagctgttgtacaggttcatagtaaagaaaaaaagatagtgatatatgaacaatgttactatgtcttttagaatcagctttttgtaaaaagattgaactaatagaaagagaagaaaagttttaagcatatgatcccttggaatatttttagcagtgtgtggtcacaactgttcaccagaaacgaaagaatcttctttctctcttctctttttgagtaaatagcggagggataccatctaaacggctttttgaaacaatcctgcaacttgtgttcagattcttaccaagaaacaagccattttagctcagatgaacaccaaccggggattgtaaagaaagttaccagttgtttttatatattttgtactggcatttttctgatggaaacggcatcatccagcccgatgatggggaggtttactacttccaggaagcttttggccataagcttgtcggtactagccgtgctctcaccactctacatcgacagattatcagaggaagatctagaagaggaagaagaactcttcagctttatgttttccttctctctgcttctcctcttgttgattttagccatagccttgtccttgtacagtgacccgagcttgaccaggtttgatccttactggattcacaggctatgtggttcgtttggtggattgcttgtcatcctcatccttcttgttttcgtcttgatatgcaaagcctctggttagaatctgagcgaaagttgttttgatgccacaaatgaagaagaaaagctcatctcttgcaaaatttttacaatatttctgtatgttcaggaacacaactcttttattcattttctaaagaaaatttatacaaaactcagaaatccaaagatgcagagtaatgaaattactcgaaaggtagattttacatttgaagcgcagaaaagagtagatattttagacaggttcaggtcatagaagctgagctcggtctgtggtctttgtggctgctcaaccttctccttctcatccactttgtctcactagaagctggagaaacggctccatcagctgacgggagttcgcaaggaagtgccatagccgagctggtgaaggcgttgagaacaaggaacgccaaaatgggagacaaatctaatcctccaagaggcggtatgaatccccggaaaatgttcaagtatggatcacataaagtgctgaaacaatggtaacgcatatacacataaataggaatcaactagggttcttgggcagatcaatcagggtttaaccaatctttaatccatttaagagttggacaaaaaagtagtagacagagtttatccaaaataaatttcctctaaatcaagtaaaaagactaccttcaacaatcacgaataggacttctatgatctagattttgttttcatggattgatcgaaaacttttaaacctggataagatataaaatcattgtggcatttgaaggcaacgttttacctgagggggttaacaatggcaggaggagcactcgggaaccaggtgagtactagacggacgac

SEQ ID NO: 31182 - DNA, 3497 bp, Arabidopsis thaliana landsberg
  unsure (1)..(3497): unsure at all n locations
gacattgagatggtgtacgacccacaataggagcaatattttctttactgagtaggcagaagtttagcaggatgtagaagcttctcatcttcttctctggtccattcagtctacattaacatcacaaaattaaactcagttctaattcaaaaacataagaaaaccttcgaatactccaaaactcctagcatttctgcctacactttttatgaatttccagatgcaaatcaatacatatatacaactaaagcacctagtaacaagctaacaaactacctaaaaggccaaatccccaaacaaaaaaatgttcgccagatccatagttttgttccgaacactactagttaagagaaggaatacgcgaacacgactaacctttttgatagatggatcgagccactcgtaccagcgagctttacactgtttagcagacttacgaacgagaagagacgagatccgagcccattggttcttaccatacttcatcacggcggctttgagaatctcatcttcggtgttcttccaaacacctcccttaatcataatcctcatcttcgctcaactgtttttgatccaaacgcactccaattcaaggtctctgaagctaatgctcgtggaaatcggcaagaacgaagaacacaaggaagcgagagagagagtaaccctagattagggttggaaccaacgaagaagaaaagattcaatcgttcactagtccttttctttttatttgttttttctttttaatttccaaaatcataaatatcgggatatagtttgggcctaaccgattggcccacttaaatgggccgttaatttaagtgaaaaattaatggcaaaggtccttttgctgcgtttttatggtatctttagccactcgttgttgtctctttcctctgaatgctaagcagcgagagctcgacgaagcagtaaaaccctagtagaataatggtgaagctcacggctgatttgatctggaaaagtcctcacttcttcaatgctatcaaggagcgagaattggatctacgaggtacacttcttctctttcccattacattttctagggttttgtaaccctaaacgcacctgctctggttaatcgttcgtttttctgggtgaatttgttgcaggtaacaagattcctgtaatcgaaaacttgggtgctactgaggtatttcttttttctatcgattttcgtttcctctttgtctgttagctgaagaatttgttgatgcggttgtattgtatgttcttaagtctgcctgttgggtttcggcattcaagtattttgaaaatcattgacagaaacattgctgaagtagctattgctcctttgtcttagttagtatctgttttctagctctttaggagtatatgtggcttcgtgtaaaagtacctttttcttactgtggattctttacttttgagagccagtcttctctaagaaaggcctcccataaattttgtgtttggcttaggtagattatttgcaggtttgaggttctctaattaacttgtcttggtttgcttacaggaccaattcgataccattgatctgtctgataacgagatagttaagctagaaaacttcccatacctcaaccgtttaggaactttactcatcaataacaatcgtatcacccggataaatcctaaccttggaggtaacatctatctgtgtgttgtaagaaatgtcaattcaaacacattgtttgctttgttggttaactgtgttgtatttatcgtatggttgtacatctgcagaattcctaccgaagcttcactctttggttcttacaaataacaggcttgtgaatttggttgagattgatcccctttcctccattcccaagctgcagtaccttagtttgttggataataatatcaccaaaaagccaaattatcgcctttatgtgattcacaagctaaaatcacttcgagtactggatttcgttaaaatcaaagccaaggtaaggaccttatcatatgctttatcaactgttcatttttgcttaccctagacgccaacttaatgttattttatatgctacaagtcaccgggagctaaccttaatatcatctgaaaattagaatatctgagagcaagaaattggtctgccttttgtcttacgttgtttaagattcttgtgcacagttatatctgtatgctgaaataagaaatttcactaatattaacaacatttagctaaaagggtttgcttaaagtatatatagtttgggtcttgatgacttggttgcctgattatcttaaagttttttgtattagggcataaatataaaccggacttgatgtagggtgtggtggttttatttaatttcctcgtgttataaccttgtagccttggatctgataatagtttggctttatcctttagcccactgttgtatatctaaattttacaatggtgatagcaagaccttttacctgacaatattggttcctaacaggagagagctgaagctgcatctttgttttcatccaaagaagcagaagaggaagttaaaaaggtttctcgggaggaggttaaaaaagtgtcagaaactgcagaaaatccagagactccgaaagtggtggcgccaacagcggagcaaatattagctatcaaggtgcgaaactggaaattatataggaccaaacatattcactgttttgttgtctttataataagtaggtcaacgctgtgtggttgatagtaatttctgtatttcatttccatgttgttccaggctgcaattatcaattctcagacgatagaagaaattgctagactcgaacaggtcccttgctttttcttttgaatatcaaatttgtgcctgatgatgttgcttttgattgattttgacagtcttctttttgtttttggcttgtggttatataggctttgaagtttggacaggttcctgctggcctgataattcctgatccggccacaaatgactctgctcccatggaggtatttgcttatcttttaattttgctccttgttcaagaaatcttagtagctaaaattcattgttnnnnnnnnnnnnnnnnnnnnnnnnncagtgtgactgacaaatttcttgcatattgtctttacaggaatagaatgtgtgactgttgcccctccaatcgttgtagctactgctcgagaatgctcacagcaattgttttctctggcaatcctgtacggtttctgtcacttccttggaactcatgcgcaacagttggaacctgtaaactatttactgctcgaggcatctgtttttgaacccttaaaaagaatggcaaagaggattgtagtctttttaagtctctgcattggcttagagagcgagggtgcacagtatttgcttacgctcttttcgcattagaatttcttgttagtattttgtatcgtgtcactcaatatcatcaattaccgaaaaaaaaatttagaaaagaaatcacatcgctgaaactgcaggccatgttatgcgtagtaaaaatagccgtt

SEQ ID NO: 31183 - DNA, 2464 bp, Arabidopsis thaliana landsberg
tttcctgctatataacagtatagcttgaaagattaagcatgatgatgcagccaaaacatagcactaaaatattttaagtttaggattttcctcaatataccaacttgcagtggaccaaacattattcctttgtcatggttaaagagtactaaatctatagtcaaattaatctactcagctacatctgtagtaccaattctcagtaaattgaaaacttagcattttagctaacaaacatatgcataaagcgtcgcctatattggtcacagggttctttaacctgccttctaaaccaatattccccttcgacatacgtaatgatgcagcagatagagcctatcaataaaatagttcaattccaaagaacactctactcttacctgttgcagttcctattcccatcaatgaagaacctgcatttgccattatcgccctcacatcagcaaaatccacattgaccaatccaggaatctgcaatgcaaacacaacgatattgcagtcagacattttctataaacatggatgtcatagcttagagaataaatactttcaaagccataccgtaataatatcagatattccacggacaccttgacgaagtatatcatctgccagattaaatgcttctgtaactggagtagactgagagactgctgctagtaacttgtcgtttggaataacaatgagggtgtcaacattatctctgagggctgcaatcccttcctgagcctggagtgctcttctccgtccctcaaatgagaaaggcgttgtcacaataccaaccgttaatatacccatcgcttttgcaacccctgcaattataggagcaccacctgtgccagttccaccacccattccagcctagaaaaataacaagacatttggctagaaaagcttaggcactgaacttaaagatctaatcttacagtcaatctatggaggcagcaaattcacacaataacccataactggttgtactttaaacaggaaagtattctatgatcgaagacataaacctcactgctttaaccagatggagataaaagagaaactggtaaacacaaagagaaactgcaacccaccaaaattcaataaaaccaacatgatattgcaaacggcgattctgacccgtaaaacttctcatttgtaatctatatctttatatagaaataagtataaataaaagtttgttactaagaaaaagtgaaagtaatagttatagacatactgtgacaaagaccatatctgagccataaagagcttcttcaataacttctttgctctctctagcagcattcataccgatttctggatttcctccagcacctaaacccctagtcaactccttaccaatttgtaacctattatcaggcaaaacaggagacattctcatagcctggatatcagtgttgacaatccagaactccacacctgacatttcactctctatcatacgattcacagcatttgatccaccacctcccacaccaataaccttaatcctcgcctcattgtagttactcggagcagaaggctcttcaaaatcctcgacaacaggtccagaagacgtttcctttcttggattgactattgtactagtcccttcacctctaagcatagatatttccgggtgaaggttcaagaaaggatcttgagcttggctttggtaatgccgtggagagtttctgattggagaagattcagatttctgagcggcaacaacaactcggtttttcttactgtcaatcgttctaatggagttcaacctgcctaaatgattctccggtaaaacattctttctaagaacagttagtaaccgagaatccgaaggagtaaaacacggtgaaacgtaagttgccatactgagaccaatcactgcaggactttacaaaattcagaaccaaaagaccaaatccaattccactgattacttccctaacaagacctgttcataaaaagctaaatggtcaaacccaaagctctcaatttagagttatatgattcagccacaaagtaaaacacgaaatccacaaagtagccacaaagcagtgtgatttacattcataaagttaacataaacaaaacccagtcgcatctatgctccattgttaaccagcaatagatatcaaatcctcagaaattgagaatcagtggatggtttaagacttagaagaatgaaacaagtgaggaaccacaaaacccaaattaaactaaaatgctttttcccattacgaattgaagaaattgaagatgggtattgcgaagtttgcagcattacatgaaaacaaagtagagaaatggaagaacactgagaaaagcttagatttttgggtaaatacagtaagatggaggacgaaatcaaaaggataaagctggagggaagtggagaagagaaacctgagagtagcagaggaaacccggaagaagagttgggagagaaaaagtgtgaattgaacaaggagct

SEQ ID NO: 31184 - DNA, 3498 bp, Arabidopsis thaliana landsberg
tttgtaaaaaaaataaaatatcgaagcaaaatctaattaaaagagagtactactactacggagattatgatcagagaaccccttggtgtacccgagtcttcattgaagcatgtctctgttcttggcagagggagctttggctctgtctctctcaaacaggattctaacttccgactctatgcgaagagtcgtcttcgttcaatcacataaagattctcgtgaaagagcttaggatcatgctttgtttccacaatcatcctcgcatcgtccaagcctcaagccctgttcttcacttagggatccaacccgaagaatgttacatctatatggagtttgcctccaaaggcactctcttcaatatgatctcccagtttcgtgggaaaccaatgcctgagaatattatcaaaggtgccgctcttatgatcatacaaggactcgacgctcttcactcacatggttacgttcactgcctcaagccagccaacgtcctcgtcttcccttccaccacttttggagagccatgggatcttaagcttgctgatttcggttcatctaaagagccttctacggattctaggtcgttatttcctggtacgctgcagtacatgccaccagaatctcttggacatgatggagtgatgggaccggccgttgatatatggtctctagggtgtgtggttattcagatgtttggaggttgtccagtgatgaccagagactgttacatgtgggggcttcccaaacttatatctccggtggccaacgacttcttgatgcggtgcttggcgttgcagccgtcacgtagggccaccgcagcccagctgttgagccatccttttgttgcgaaagagtcagtgttccattgccagagatgattccgtgtcattcttatttaaggtttccttccgccataattgacaacgtggtggaacaaggaggaatgatgctttgaagaccttaaagctttgatatgaagacataaacggtggagatgagcccccaaaagaaaggagtttcatgctaaggcggatgtttagggttcggtgtcaagagtcgtatgtttagggttcggtgtcaagagtcgtaagtttagggttcggtgtcaagagtcgtattaaggttttggttgagtttgggctttaacttgtttctcaaggaaagaagtaaaagttaggttctacttgctaatttttaggatttttgtgtgtgaatgtgctaaagtttcggcaccttaggtttgaagtcattgtaagacatatcttcatctttttatcgtagactatttttcagatttaatgtcttaacttcgatatttttctaatattacgttgtgattaaacacaatcgttgttcgtatgtcattttaagcttgaacacaagtatactagctctccttgaaggaaaaattattgttgagacgaagtaaagattttgtttggttgtttcttgatattgattttcgtaattaaacttttgtttgtaaatataagaaaagtttcaaaatcagtctaatgtattaccaactcttttttatctaagctgtaaactcggacaaattaccaaattcgaccacaaacaaaactttgttcctaagaatagtgcacaagggagaacaaaggtaagaagtagatcaaaacttcatacatatactacataaaccatctctcgaagatcttatgatttggccttaacctcacccttgccgtgaaacttccttccggcatctacagcttctctgtagaagaaatagacaaaaaaacaacatcatctatctcgaaaacccaataccaaccgataaaaatcaacaccataagtgtttcttacgaacctgaaagcatcaatgagctctttgctttcagggctaagcaatactccctcgtagaaagcattggctgcctcgtcaaaccgctggagattcatgagaaactcggtgagtcatacagtttcaacgttaagagatcaaagatttttagtggcattgtagatgctttttacctgtagcaaacgcagagcagcgccttctctgaagcaacctttaggccaatctgggtttagttctctgcaggctttagcatcagataaggcatgctcagcttgtcctagtcgcaaccagcagaggcttcggtttgagaataaggtatgatccgttgggtcaaaatcaattgcctgtgttcaaacaaaccacaaaatcacatataggcaaaaattaagaatcttgttttgatttcagaagaagttttagagtagaatacttgtgtgtaagcatcaatagccatctgaaaatcctttctgtgaaaggcgtcttgtcctctggcttttgcttctgcggcttttgcctttgcttctggggagacctgtggaagttaaaaatggttatctttaagtactttaaacaatttgttgaaagagaaatgcatattgatcaaagtatgaagtaccacaggaagatctttcttgatcccagtctcttgggatttcgccttgtttgagttttcctcttgttcctgaaaatgttaagttgtttcagacaaaaaatatcgaaatatccgacactaatgccaggaaagatctgatatgcctactttgtttgattccatgtgagcgagaattccatctactgtccagtccgaaacagtttctggttttgttgtcaatgggaagaggatctcaacaacctttctgttgtctctagcagctgcaacttctaatggcctattgccctcctaaaaataatcgagtttacagtagaatcagtatagtaccacaagattgtattcatgtcgtaccatatgaacaagggaacaggttcttgcatatgaactgatttccaagttggttttacctcatctttctgattcggatcagccccggctttaagtaaacagttaattaactcaaggtttccaatatcagccgcaatgtgcaatggagttgcaccaccagcaaaaacgttagctttggcacctgcctgtgattacaaaaagaacaattttttgttagctctgatttaagatatttggcagctgaaccaacgcaatactagaggatgttaagaagatgttaaaccttgaccaacaactctaagcatgacagagaacccgctgccactgcagataataacggtgtgatattatcttcagtctcagcattaggctgcagagtcatcaacaaaaaggttataggtttataagaaagtacggttttagacagataatcaaatagagatatacacaaagtttacattggcattgtgttctaacaagacttccacagcatttttttggtcgtggccagcagcccagattaatggcgtgccagattcactttcagaatcaacaggaacacctctagagagcaattcctttagcaactcgatttctcctaatagatgtatagagagaagctatataagtaaaacagaacacttcatgacccaagagagtgaaataaaaaaagacagagcaattgataaccaacctgtcccagccgcatgatgca

SEQ ID NO: 31185 - DNA, 1985 bp, Arabidopsis thaliana landsberg
aatttaacatcaagaccctacaaaatttaaattgcgaatcttgagaaacaagacgtattatgaaatgtatagttcacttgtcccaacccaaaaataaaagaaagaagaaaccaaataacagactgttatagtttgtcctggttttggcagcacaattatttggttttgttttttttaatcactatccaaatcacacttcacttcacatgcaatattcctttaagctcttgaccgattcactggctacttcacaccacactccatgtcccctcgtgacttctctcaactctcaaaacttacctcagcataggaaatgtattcaagattttactatcccccctcaatcgaaataacaacatttattcaaaacaaaacaaaaattatcagcaagctaattaggtgttaaaactataatgaaatcagcggatatagtgaaccaagtcagaccatttttgagaaaattacgaaagaaaaatattataccattttatctcacacacatgcgaagaagatgtgtagataatagaaaaaaaaagtttacggagtagtagtactattgccagatagaccggaccggatcccaccaattataaatcgaattcgagggacattttcgcattttcaatacctcgctggccatatataaaggccacatcacactcgaagaacattatctaaatatctctacacaatcacattagccaaaaccatggcctcctcaagtctccatttcttcttcttcttgacacttctcttgccattcactttcaccaccgccacacgtgacacatgtgcgaccgccgctcccgatggttccgacgacctctcaatcatccccattaacgccaaatgctcacctttcgcacccactcacgtctctgcctccgtgatagacacggtccttcacatggcctcctcagactcccatcgactcacctacctctcaagcctcgtcgccggcaaaccaaaacccacctccgtccccgtcgcctccggtaatcagctccacatcggaaactacgtggtccgagccaaactcggcactcctccacagctaatgttcatggtcctagacacaagtaacgacgccgtttggctcccttgctccggctgctccggttgttccaacgcctcaacttctttcaatacaaactcctcatccacttactcaaccgtctcttgctccaccgcacaatgcacccaagcacgtggcctcacgtgcccatcctcctcaccacaaccgtccgtctgctccttcaaccaatcctacggcggagattcatccttctctgccagtctcgtccaagacacgctaacgttagcccctgacgtcatcccaaatttctccttcggctgcatcaactccgcctcaggcaattctctaccaccgcaaggactaatgggcctaggacgcgggcctatgtcattggtctctcaaactacgtcgctttactcaggagtgttctcatactgcctccctagcttcaggtccttctacttctccgggtcgttgaaactgggtctcttgggtcaacccaaatccatcagatacactccactcctccgtaaccctcgccgtccatcactttactatgtgaatctcaccggagtgagtgtcggttccgtccaggtacccgttgacccagtgtatttgacgtttgacgcaaattccggcgccggtacgatcatcgattccggtactgttatcacccgttttgctcaacccgtgtacgaagccattagagacgagtttaggaagcaggtaatttcgttaatatcacaattagtataactcaagaaatgggaaactaattacaatcttgttaatgaaggtgaatgtgtcgtcattctcaacattgggagcgtttgacacgtgtttctcggcggataacgagaatgtggcgccaaagataacgctgcacatgacgtcactcgacttgaagctgccgatggagaatacacttatccacagcagcgcgggaacg

SEQ ID NO: 31186 - DNA, 3104 bp, Arabidopsis thaliana landsberg
gcaccccctctccatctttcttcattttcttttccaggatacgcactttctaattcaatttgaatactttgaaaataagcagaaggggggtgaaataacgtctgaaaacagaaacagatcattatttgagcatgaaaatgtgtaagcaaataaaaagtaccctcttctccatccacagtatatgggatttcttttgagatataatattagcaccgtgtggcgttcctggttcaaccagaacctgtccaatcaaaatttatgtaaggaattcataaagctcaatgcatatagcagataaaaaaatgcacagtgcacacagagataacatgtgaagagaagtacacgttctagtataaaaagaagtcattgaggagaatgaaagatgaaaaaactcaaaaacataccaagagatcatctgtaaggtcccagagctggcgaaccacagtaatcctgtctttcagagatggtatctcccctaacacataggacttaaccacaacagaattttttttggaaaacatgctcagtaaaaaaacaaacttgtaaacaagaatcatagctaatgcgagtgataaaagagataacccacagcgatgacaagatcatgtttcctctcagactttttgttgatctctttattaagagctagcaggctagtatacccatggatcagaggcaaatccttaaggcctatcatattcacaacaatggcaaagatcagaatcaatcactacactcaagtgtttagccagagactatcaaagtgaaattaccctggattaagttacgtcctgcacgctgcattgattgagatggttccactatatttactttctccacagacttaggccaaacctctttaaccgccctgcaagatgttacaacgaatcaataatcaaaataaaactaccaaagctaacagggaaacatctatctcctcaccagaaacctgaaccagtgccagcaccaaaatccagcactcttgtaggcgtaaaacctggtactcttcgacgaatctatataagaatttaaccaatctcaagctcaattctctacacaactatcccaaatggtatcaccaatgagaaagtacctcgatgaggactctatagcagacggagaagacggcaggcatacgagaagcaatataagcagcagtctcaccgtctctgtattggagaccgctatctccataaacggtttgtatcttccatcgtttggtctctagcgagttcatagaatcagccagactcttggccgtggtttcaggtaactgaagattggtgtccttgatctcttggaatgattccgataactgacgcaccttcttcctaatgtgaggatcatcttcctcgcggagatatttcttaatagcgcggcggagacggaccgggacgactaggcagcggagacactgtttcgacgcagatcttagggtttctacagtgaagcctttctgggcattcgccattttcagccggagcttgatctgaaatggaagttgcaggaagagccgagaggttttagcctccgaggagggtctagggcttagcgttatgggcctttcaaagagccaaatgtttctataatgggcctaatgaggcctttattatagcagtgattagtgattattcaagatccatttgaagagtgtttgacaaatcgaaatttggtatgtattttgaaaaggaaccaaatttggcttgtggataggatttcatttcattctttggaggagggtctagggcttagcgtgatgggcctttgaaagaccaaatgattatttaatgggcctaaaagccctttattatagcagtgactagcattattggcccatttgaagagtggttgctaatattgcaaaggaaccatatttggattgtgtggatggatatcaggatatgattttcatttcagtcatcagtcatcaacagaaataattttttttttataagagtaccaagattatgaaattctgtgatgtttttgattgatatatgtatatattacataacaaggacctagctagctaggattacaaaaccctacaagtaatatatatattaacaataatgtcaaaccataaccacatattaaatatagggaggcttgcttatatgcacacgtaacacaactacacacacatttggcccatttcatctatagtatatatttttataactatatatattataaagctaattatattactatatatagggcttaagatttacacgtagaaaatatctaggatggtttgttggttaaaaggaggtatgagaaagattggtagtggaattaggtggagaaaccaacaagtcagaagcagtccagagtctctgagctttgagattgcatgacccggatttagatgacctagcttcgttgcagtcggagaagtacttgccacacacgttcctcaatcttggacttgttgccacgtaacatgtcgtagctgctgcctgaggaacagacttcaatagcttggatgtcaagaaaaacactaaatcagtgacgacgccttctcgatctcttgtgagacgggttttcacgataccaggatgaacacaattggccgtcacattcgcatccattttctgcatatatattgtagtttattattagaaatgaggagataaattgttacttcctaccaaatagttaaatttgtataataacgtacatggagaagccgtgatagctcaacagtgtggagcacgttggcgagcttggagagagcgtaggctcgagtcgcgtcgtaatttctgtaaaacgcaaagttaaagctataattagtgggtcaaactcaagtcacaaagtataaactattattattctctctgaaaatatgattttaaataaaggaaaaagacgagaggacgacggcgtttatttttgtcgtcgcatcacctttttgttgtacttattattaaacaatgattaattattcgctatatgattggaatgatattttctagcttatactaattaaaaattacctattgtttcgtgagatatcggcgagatattgcaacatatcaccggaaaaccagctatggacgacggacgtgacgttgacgatacggccttgcacgccggtttgt

SEQ ID NO: 31187 - DNA, 1440 bp, Arabidopsis thaliana landsberg
  unsure (1)..(1440): unsure at all n locations
tatcaatacttcataatatttttacattataattacaaaatttggtgggttttagttttttcttttttgtaatctcgatttgacaaagttaatatggataaattcttgcaaaatttcccaaaaagtgtttacttagcaaggattattgtttttacacttgtcaaacaaatacgacggcgttttgtagttcatctcttgagaaaacgacgtccaatgtagaaaaagtgaaaaagcgttcttcaaagcacaaaccaattctcgaccaaaagatcagaacaaagcgaaggcggattttctggattctcgacggccggagattcatggcgacggctaacggagcaaagagtccgtcgagtatgggccctaaggttttgttttattccatattgctcacacttcagtacggagcccagcctctgatctccaaacgctgcatcaggtacggtctcttgcaacaacctatgcctcttaaatctctgatgttagtgatagccttgttcatattcgctgatttcgtgcgcttttatcgggaattgcgagatttggttgtaattagtcttatgtagcgagtagagatggagttcgatttctgggcatctgttttgttggctttctgcgaattgtggttgagaatagtgttgtaaacttacaatttcgaagttatatgcgacgattgtgatgtattctcgttgttcctgtggaaaaagacatggtcactgttaaactaagccattttctaaagtgttagagagatgaatttgaatctactagtttgctacattgatgccttgaatatagcttttcatcatagtgttttagttgttcatcttggttttgtagggtaccgtgtaacctttcgcgttatctagtactcgatatcgagtcactttgcctaattttgcggcaaaatgccatggatatttagaactagtagacgtgtgttcactagtccatttgtttgtttcttcttaaacagttaatagattgtctctatcatggtttggtcactttaccgcattattgtttttgcagaaaggatgttattgtaacttcatctgttttgacgtgcgagattgttaaggtactggatctttttttttcctttctactttcgaaaattttgcatttatgaaatactgtttcatgcttctgctgtatgttcttttttataggtcatatgtgctctgattctcatggcaagaaatggtagtttgaagggattagcaaaagagtggacgttgatgggatccttgacagcatcaggacnnnnnnnnnnnnnnnnnnnnnnnnnnnnnnntttgctgcagatctcatacaggagtcttgattccttgacattttcaattctgaatcagacgaaaatctttttcacagcattctttactttcataatactaagggaacctttattttttcttgtcttatggncttgttttgata

SEQ ID NO: 31188 - DNA, 4624 bp, Arabidopsis thaliana landsberg
cggggatgcttttgatatcaagtacccaacttttgtttttgaatttgtgtgttccatgtttttgtctcttgcgtagagatttcgacttttcctgcttttcttgcttaccattgtcatatgttcgtctcttgggttaatcctttacgagatcattgagaattacatacaactttttcatgttcgggatcgatgcctatgggttttgctttgatcaggtctgattatgaatctgggtcagttgttctacggaacttggctctgaaaatactagattttatctctttcctaggcttcgtgcttttgtgggttttgctttaattcctgtgtctgtgtttgtttcaatgatcaagtcttttgattgaatcgaatgtatttggtatccctcaacaacttctttcacgatctgaggtagttgaatcttcagtttggtaccgtgatcttaaatatctgagctttattactttaccccgtcgtgttgctctgtacaatgtatgtatttgagctccttgcggttttgtttgtatctttcatagttaatttcaatgttcatacttagggtagtgaatttccaagttgggtcttttatcttcgtgtttttgcttcttagtagtatctatttgcaaggaaactaggattgatttccctttgctgtttgatttagatgatgttcacagtttttatgttcttgaaaggttacattttttcagcagtttgagattcctatgatgttgaaaatgcagttcttttgtgcttgttcaggtttcactacgttgaggatggttcttctgatgggtgccgagaataatcttatggaagaaacaacagctgttaccgaagaagattcctatgatgatgagtttccctgcggagatccacaagttgagcctcgtgttggagatgaatttcaggtcgacattcctcctatgatgtctgcaaccaagcgtgctgtgtttctttcgactcctgttgctttggatgattcgtcatattcttttctcatcggactacctgtccaagtcatgtggatagacaaacatagaagagggcaaggaaatggagatgacaatgttgacatgaaccagtccttgaagtctttaagagccaaaaaaagccgttgctctgccaagatcagaggaaagagtgacaagaattcggaaaccaagaagcaaagatcgaatcttgaggctgttcctgtgataccgtccagttcttgggaagatttggaggtggctagctttgttcttggtctgtatacatttgggaagaactttactcaggtgaagaatttcatggagaacaaaggaataggagagatcatgttgttttactatgggaagttctacaattctgcaaagtaccacagttggtctgaatcccgaaagaagcgcaaccgcaaatgtgtatttggaagaacgctctattcaggttggaggcaacaacaattgttaacccgtttgatgccttctattcctgatgaacctcagaaacagatacttgtggatgtgagtctctttcacatcctaatgcggaatgcttaaccactgtatatttgttttttcattgatcttactattcgcaggtctcaaagtcatttgctgaaggtactatcactctagagaaatacgtaagtgcagtgaagaatcttgtgggtctcaggcttctggtagacgctgtggcgattggtaaagaaaaagaagatctcacggttcctacatcaacaccaatgaagaccaaaccatggttcactgtttcttcaaaatcttctttggtccctggagaaggggattacaattccctcacatcggctggcataataaatcagttaactggctgttctcgtctgagcaaagcccgttgcaatgatatattctggggcgctgtatggccgcgtttgctagccagaggatggcgttcacagcagcccgaggaccgaggctatttcaaatctaaggactacattgttttcattgtccctggcgtgaaaaagttttcaagacaagagcttgtcaaaggagatcattactttgattccgtcagtgatattctaacaaaggttgtgtcagagcctgaacttcttgagaatgaaacaggaggagtggctgcagagaatccttctgaccagtcagatgaagagtcttccccgtctgatagtctaagacaccgttacctcaggtctccatgttctaaccgtggaactctgggaatgaaattcactgttgtggacactagtttggctactggaggaaagttgtgtgatttacggaatctgaatgcagagtgtttagtagtttctgagccaaaggctcgtctagaagctaaagattcttctgtgcttaaaaattctctggacagtcagaatgtggaaaagtctcaagtgaggcctctggatgccaagaaccatgtggatgacccaatgcggttcacgattgttgatacgagtgtggaccactgcgaaaaattatctgggtttaggagatggagatgtttaccaagtgatgacacaagaaggggtcatgtaggggctgattctggtataaaggaagagaagactttagagaaggctaaggatccatcaaagagggttattaagcctcggtctacccctcgagcagaaactaattattatgctgtagattctgcaccatatttgaaacgcagacggctcagtgcttgcatttccagagagagtccagtgtccaaacatttactaggtgataatgacacaaaaatgactatttgtcttgaatcagagcagcaaagtatatgtgtggtccaacaacaaactagcacttgtgaagagatgaatcaggacaaagagattgtgccgttggttgagcatatgaacttaaagtctgatcaatcaaaaaagactggaactgggctatcttcttcgcttgttgagattcaagaaacgacagcgattgaaccaagcggattaaattccaacactggtgtcgacaagaactgttcaccagagaaaataagaactgcccatgaactcatttcggcagaaccaaaaacaaatgggatctgttcagtgtcagagttggacaaaaaacgagcttccagtgatctggaacaaaaacaagtatttgagcttccttccatttcaggctcaaacaatagatctccttccaatgatctgggaacttctcaagaaatgggttcatctgaacaacaacacaaccaacaaattaagacagatggtcctagaagacagagcacaagaaagcgaccattgaccactcgggctctggaagctctggaatccgactttcttataaccaagagaatgaaaagcacaactaaaccagaaccgagaaaacatgaaagttcaacgaagaaaaagcgctcagctaaagcatgtaacagaaatgggagtgcagacttggagcacagaggagaagatagaagcagttttacaaagaaatcaccaacaagtaagcccttggatcaaatagaggattcaaagcctagctatcttctcaatgaagcaagaactgagagtaaggctctggatcaagtacaggagtcaaggccggttctaactgaataccgtaaacttccaccgattgtattgaagcttccattcaggcgtggctaaggagctcaacggacttaagtctgaaagttttgatcgcgggatgtgagaagattggcctggctgtttgctgaaaaataagtgtgtacagaagagcgatattaacacaaagggttttattcctttgttattcttattacttccattattagacagaagtaatgtttctattattggtttgcttaggagttcgttgaagtaactttcatatggtctagtagtagaaaaaattatgtggaataatgatggttatgaatatactatatgaagcatgatatacacagtcatagatacattacaaatcctgaatagtagtagtagtcgtctaaactaaagtcacaacaatgatttttatactactatacaaatcttgactgatttaagtgcagctgttttgctgcggccgcttggttgcctcgtctaagttgtgagagactgctttggttaagttagagtcttcaaatccaagctctgctccaaaccttttgcagccataacgaaggaaccaaatttcaaaaattgtcagttcaaattcacttcatactctttatattagctttggtgtcaatacttttttacttactttggatccaagaccagtttctgaacctctttaatggctgagctagctgcgtataatgatatctttccaatctgatgttaagaacccaaaccatttccaagagttagaagtgaaggcactgagatggttaatggtttgttctaagggaaggcagaatcaaagatttgttacctctagaatctgaagttttgcctcgtggtcgtttggtaaacaccggatttcttcagctagtcttgctgactctccaacgctttcagggcacaagaagtcaagtgccacctgaatattcgactgagaattgtatacatgggaaaaaagtttagtttagctcaagggaaaagaaacttaatggaataatgttgcaacgaaataaatttacaaaaagattagtgatttggaacggacatccagccggaatgaagatagcctcaccacgatgt

SEQ ID NO: 31189 - DNA, 1496 bp, Arabidopsis thaliana landsberg
  unsure (1)..(1496): unsure at all n locations
tttctagacttgattttgctgatgcttacatccgtaagagatccagggattatcccaagaaattctcatcctccagaaccagaagttgttgatggcaacacgggctcgggaacaagccaaactccaagattgcctcgtgttaaagaagtggaagttaatggaaaagtattcaaggtcaagtactgtgatacttgcatgctctatagaccgcctcgctgctcacattgttcgatttgcaacaactgtgtagaaaggtttgaccatcactgtccttgggttggtcaatgtattgctcaagtaagtttctcggtttttcgttttcctgtccgttagtttctgacatcagtctatataattcatctcattctccttgggaatttgcagagaaactatcgattcttcttcatgtttgtcttctccacgactcttctctgtgtatatgtgttcgccttttgttgtgtctacataaagaagatcaaagagtccgaagatataagtatcttgaaagcaatgctcaaaactccannnnnnnnnnnnnnnnnnnnnnnnnnnnnnnnnnntacattcttcgttggaggcttaacatgtttccatctctatctcatcagcacaaatcaggtaccctaatcatttgcctctttctgaaaaaacctctctcattcgatatgcgtgtttaatcgtttgatctttctttattctgtagactacatatgagaatttcagatacagttatgatcggcatagcaacccacataacaaaggagtggttgataacttcaaagaaatctttttttctccaatacctccttcaaagaacaacttcagggctatggtaccaagggaaaatccaatgccgtcgagatcagttgttggcggttttatgagtccaaacatgggaaaggccaatgatgatattgaaatggggaggaagggtgtttgggcaatggctgaacatggtgatggcaaagatggcaataacaatgaacggtttcatgttaacgacaatgagttaaacgagttatcaccagacatggggaacatagtgaatggtgatgagcaaatcaataggccaaacaatcacccgaggaacgcaaactgggaaatgtcaccagaagttatggccttatcagcaagaagagcttagaagcaggttaagagaaaattgaaaggtgttttaaatgtttgatgtattgatgtgttgtgtgtttacacgggaatcaattgtgaattggtgtgatattttcagatgttatgagtatttttagttgttcttcagacatttaaatcgtaaatcattgtgtgtaagtgtaatatatgacttatctttcacagaatgagtaaacaaaatgaatcccgacgattttcatcctgtacttggcatatgataaaaatcgcagaaattgaattttcagacaagtggaccagaagaccagacaactcttattatagtcttcattgaagcacggctctgtaataaatgcaaaagagctcaaaag

SEQ ID NO: 31190 - DNA, 4125 bp, Arabidopsis thaliana landsberg
aaagaggaagagttaaaacagggaaaaatctcttgaggtgaaaccaaagaagaggagaaatctgctgctccggccaccgtagagaccaagaaagaagaggtactggccgctcctgctccgatcgtcgcagagaccaagaaggaagagacaccagttgctcctgctccggtagagactaaaccggctgctccggtcgttgcagagacaaagaaggaagaaatattaccagctgctccggtcaccacagagaccaaggtggaagagaaagtcgttccagtagaaaccacaccggctgctccagtcaccacagagaccaaggaagaagagaaagccgctccggtcagcacagagaccaaggaggaagagaaagcagctccggtagagaccaagaaagaagagaaagcaaccgcctctactcaggtcaagagggcctcaaaatttattaaagatatatttgtctcagtcaccactagcgagaagaagaaggaagaagagaaaccagcagtagtaacaatcgagaaggctttcgcagctgatcaagaagaagaaacaaaaaccgttgaagcagtcgaagaatcaatcgtctccatcactcttccagagacagctgcatacgtagagccagaagaagtctcaatctggggaatcccacttctagaggacgaaagatccgacgtgatcctcctcaaattcctccgtgcacgtgacttcaaggtcaaagaagccttcacgatgctgaaaaacaccgtccaatggcgcaaagagaacaagatcgacgacctagtctcagaagatcttgaaggaagcgagtttgagaagttggtgttcactcacggtgtcgacaaacaaggacatgtcgtgatctatagctcgtacggtgagtttcagaacaaggagattttctcagataaagagaagcttagcaagtttctcaaatggaggattcagttccaagagaagtgtgtgaggtctcttgactttagccctgaggctaagtcatcgttcgtgttcgttagtgacttcaggaacgctcctggacttggtcagagagcattgtggcagttcattaaacgcgccgttaagcaattcgaagataactatccagagtttgtcgctaaagaggtaaagaaattagcattttgatcatgattacaacaagtttgaatctttgtatgaattgtggtgttattattttcagctgttcattaatgtcccatggtggtacattccttactacaaaacattcggaagtatcattacatcgccaaggacaaggagcaagatggtcctttctggtccatccaaatccgctgagaccattttcaagtaattatggttcaactataataataatacatcatataaaatgttaatcttcatacatgcagaagtttatatcctctgtttttggctgaaatagatacgtagctcctgaagtagtcccggttaagtatggtggactcagcaaagatagtccattcaccgttgaagatggagtcaccgaggccgtagttaaatcgacatctaaatataccattgatttgcctgctacagaggtatacattgttttttatgttatttttgcatttgcattatagtttaattttacattttgtgtcattttattcaaatgacccccaattttagcattttctacttaatttatttttgcgctaacatgttacaacaatacataaatgaattggtataatcatttttgcatgttaacataaacgtgaaaactagcgtttggcacaataaatagatggaacattctatttgaataaattggtataatcttgctagagattaatgatgatttattatgtggtttgtgttgttttttgctacatagggttccacgctctcatgggagcttagggttttaggtgcggacgtgagctacggagctcaatttgagccaagcaacgaggcaagctacaccgtgattgtctctaagaaccggaaggtcggtttaactgatgaacctgtgataaccgattctttcaaggcaagtgaggcgggaaaggtcgtgatcacgattgacaaccaaacctttaagaagaagaaggtgctctacaggtccaaaacccaagcataagattatgtgtccgatctttgaatgaatgaagaaacaagaaagatggttgggaattttaattcatttaatttagtacgtttattcatttgtgtatttttgaaacctaaaagaaggtttgtgttttatggatggttttgatttgttttggtgatgggatttttttttgttgatgattcttatatatacaaaatatttgtgtgccaatgtgattaccattcaatttttttgctatgtgtgtaaatttgaacttatattagtctttttctactgtggttgtgtcaagttttgttcctttcggaccgttattcttggttcttttagacaattagttaaagcggttaatacattttaacctgattttgaatgaagagaaaggcagaaagataacttgctaaaaacataactaatagtacaactagatcagaaatacagtttccttttctgacggaccactattcttcattttatatatcacttctagagattatttctgacattttcaaaatcgtctgtgcttcattgacgacatgaaaaagggaaaggcctgcgattcgaccacttttgctccaccgttggggtctccaattattttgcgcctctcaaaaattgttgtaaatctatagtatccgcacaagatttgaggttaaaggttgctagctttttttttgagtcacggactcacggtggacaacattttaatctggtaatataatgtttctgcattaatcaacattttaatctaagatgtgaatgtgatatcatttggttgaaatgaaaaattcgttcttgggattatgatatttggatatactcggagtcgactataagtctatagttatcaatacctttcttcaggtacttacacatttgtacgtccgactctaaatactatagattttgctgaaaacataatttgatatagtatacacgtaaaatgaaacttatcagcttccgatatgtctttcgagaaagaagatctgatctagtgatctgacaactccgtttagtctcacttggccacaaaatgccaaataattaaatgaagcagtattgaaaaatcaggatcttatgtcgaaagctgacccaacaagcacacagtatccaaagaaaaagcctgtctaaagttacaaaaaggacttattattatcacatgtatgcaatttgcgtgtataagaatattaagaactggagtggagtgaccatgctaataatatctagtgcataggtaggggcacatgccatgcatggaccaacaccacaacaaacgaccatgagatatgaatggcacacatgtacattcccttccaaaaagaaaaagcataaggcccaatttatttcaacatagcacatttattggcccattaatcggcccaatattcttcgcctgcacaaaaaaaaaccctccagatcgaaaaaaaatcgagaagcgaatagcggaagaacagaaaaagggaaattctgagaatcaaatcggaaaggtagaagaatcgagtcggaaaaatggaaacgacgaagagtaacagcagcgagtccgatgtcaacgccaaatgggacgcttgtctcgatctcactgctcgtcgctttgtctactcttccctcggcggcgctttcgccggtcttctcttcttcagttcggtgttttccaatatcccccactttattcttatgattcaattccgttcacatagtgttgattactgattaggtttctgggtagagaaactgagaattcatgatcatttagggttttgagtgctgttccgatttgaatcatttaggatttattaggtttaaatggttttttgtgttttgatgattaattgttgcgttgtgtgccctagggagtccggttacgagatgggcgtcgattgcttttggtgctggaattggtattggttctgcatacacagattgttctcgtgtttttgatgcgtcttcttcaacttcagctactttattaacagctcccaagagtacagagacttctgtatctcaggttagtcggaatctagttttgtggatcg

SEQ ID NO: 31191 - DNA, 4321 bp, Arabidopsis thaliana landsberg
agacaataagagttcatgaaacaaggtgaaagttgatacgccttcttcgacagaaaaaacttttctttttgtacaacaagccaaccagagtacactttcccatgaatactcatgtctctctcggtcggtcttaaatcataaggtaaaaagaaagacactggacatttgaaggactttcctagaagcatcattgctagtgttaagatcagaagtcaaactcgcctgctgcctgaaaaagtatacatggcctgtgttagtattttatagttaccagaatagctccaaccttatttggaggcacaaattactttgttgaagagaatgtccttatcgtttatatgcatgatcccgtctttcagactgcacttccacctgctctttgtgcgcgtcacctgattacaacaccaaacatgtcttactgtgattagagtcacgtgcagaaaaacacatccagaacctgtgaatagaggagagtcattaccttgtcaaattgagctaaaaccaggtgttgtgtgttcatatcctcgccactttctaggtcgtccaactcgtcatcatcatcatcttcgttcaacagctcttcatcatcttcaatgatatcgttttgtacagcaacaggagtgctcgtttggatctctaacaaaaaaaagagggaatttagcagataataatcattcacttactctaaaacaatatccaacatttttgtttggctttccttaccgtttggagcaggagttctggcctcgttaaactcttcactgggtccttgataactatatatctaaaacgcagtaaatgaaattcattgaatctagcaaacgtacttgggtgaaagggtaatagatagtatctctagacaaaagttacatgtatgatggcaaatccaaatgcaatatctatgatgggtagtgcggagggatccagttgtactaaggcagaaaagtttctagctactgatttgtgagcatgtcgaagaagtatatatctactgaaacttttgactaaatgaaaagcagcattcttacatttggtgtagagagcatttcatcataagggtcaggcattggcccatcaacctgaggaatcttcgatgatgagctgaagaagtctcgtggtacctttctatcgccaatagaggttatgcggaatgcatcacactcaaagtttgcctgcaaaattgtgctccaatcaggtgtatcaacgagatactaaatacatcattgttgaaagaatataggtgttacaaatactttcatgattttgtttttctgatgtgagctattccaaatgcaaatgcaaatgtggagttctacacacacacctcagggatagcatcgcctgcaccatcctgttgaggtatagatccaccattttgataatgtccagaagaatcatcacgttttcgtttcccagaggatggcacaaataaatcctggataaatgttgattaaagatgataagtttcttaattcaggtatagtcgacttaaaagttatgtacaatgaagaagtacttgagaagagcactaatcaaaatcaatgacgtaagggttgcaaagaacatatgaaacccaaaccaaaaagccaaactcacgattcttgattaggtgttaagaagaaatacctgcgtaaactgctggttagagtttcctctctcaggctcatcacggccatccacataagctagcagcaggccagacatttataccccaaacaagaaactgagacatttttcttttcacggagacataaagtactggtaaaactagtacttaccaacattgacatcaagtctaggatttgtccacggagaaggcggtggctgcaataaagaaaaagaaaaaaaaaatctcagtttatgtaaatcagaagaaccagaaagtaaaaagtcaattatttcagcctctgtaaattttatgaaacaccgaaataagcagttgcgttacccagtttcaaagtttgataagcatagctcaccatataaggactaggtcttgctttaacatcaatgttgactccattctcagttccaggagtgggataatcacttgagccggtagggatgttatacatggatgagttatcagcagtaccgggaagcggcgttggaaggggagtctgcaatggtgtctgctcaaaaacaataaggatttagaggaaaaacatctcaagaggaaaagaagccaattgatacacctaatgctcaaatcaaagattcaagagacttatgtgagttcacttacaggagggaagagcatttcagcagtgggagtctcgtactcctctgtaccttcataaggaacattcaaatcatgagtcagtggaccaccaggtgttggcttctgagccgatgacctctctattggtccattcaagactccggcttgcatcatcttcgtctcccaaatctactcggacaaaaacactcgatccaattaagctcccaaaataatggatttaagcagatgaaatgacgaattcccaaaaaccctagttactaaggaacaaatccaaagccacacacaacatcgaatccactaaagatataaaaattcaatctttattcagctctaattgaaaactcactccttgaagctcgctgagaacactctcgccaggacctccgttgttaatgaactcctcacgaactttgttgacgacatcctcgataacatggatatacacagcgcttgttgtcgttgttgtacccatagcctctcaaatctccttaatttagttccggcgaaaaaacgaatttcgtcctccgggaatctgatttcatcagaaacaacattttaggtgaatttgccaaataaatttcccccagaacaaaaacaataaaccaatccaagctcgttaccctcacctagggtttcgaccggaggcggtaagacgagtctgggagaaatcggccggcgacgaagcgtagacagaagacagggagatcagagatcgagaggagcggtcaagacagaacagcagcgaagaatataaataggtttggatcagatcacatcgtaaaatggacacgtgccatcatctccgcgatagcgattttattttcccacattttgtttatttattattattgctttttaaactctttattaattttcttttttaatttaagatttcttccgggatttttttcattgacatacacatgcgtttttttatttataaattacaactataggatttacgaaatttaacagatttcatagtatcagtttcgcaggtttgttgcattttatgtatggttcaaagcaaatttctgttttacctatatgatctattacacaaagtcgtataatgttttgggcccgtatgggctctaaagcctttaaccttgtgttattccattcgctaaaagactagtttatactcaagtgatttatctccttgttttaacgtctaaaaagatcttgccgcaaggctagtttttgcctcgatcaaaacgaacagtcgccacaaaaatgctggttcatacttagccacttggttccgcagtctccaccgttagatttcccaaaatattcactctaacaaaatccaacgtctctattaacgccacacattcttttttttcgaactcagtttttttttcgctcgtaatacaaatctgtgtaatgtttctgacactgttcactttttctctcttgtacttttgtgtttggtttctcacctgagaagtctgagtttctttctttcattttttttcgcctttttgtgtatattttttcctattaagagtttctccgtacgataaattgttattttcttgcaataattgaaaagggcttttgaataattttgtaacgtgatcacttattttctgattacaatccaaaattcttatgatcatgacattatcgtcagagtcaaaaagagacaaagatcgagtggttcataactttccattggattcttcaatatctcgaattctttttcccccggctataaagatagaagattaatttcattcatgtcagtaacacggaacagtgtccaagtacgtacattcttatacactatatagaaattctctctttaacatatagtatattactataaatttcttttggattcatagatggaaatatttaggttaggcaatagggaatcttccttctatcaaagagacaaaataaataaataaagtaagaaaactaatactgtcacgagatgcaaagagtgaaaaaaaataagttatatgatttatgtaactcatatctctcaacatgacaagatttatgtaaccctttaaagaattaattcaattttcgttggatttttctattctaaatgggttttgttgt

SEQ ID NO: 31192 - DNA, 2700 bp, Arabidopsis thaliana landsberg
ctgcattattcatgaacaagcttttcaacccacaatccacaaacctgaatatcaataaaactgaataacacattgctttacctgcacaccattagttacggggacagaacacaagggaggaatctccgggaacaaactgatactcttgacattgttctgttgacggacatttataatgccggtttgtaaccgccggccatgttcttccaaccaaagcagcatggcatcctgttgctgatcgccgttggtatcatgaaccgatctaaccaaagcatcgggtacacaaggaagcaattggcggttacttgtcccagtaaaaagctgtccggttgtgcagtctaataaaaatattttcagactggcaactacggatgcagccataacaataaggtctaatctactcgagaaaccgaggtcgcgcatgaaactttcctttgtctccctcatcacttccttaagaggtagcaagtagacattaacgtcatgagaataagcggaatagccacctataagccccaaagagccatcaagcccattgggggaagaaagctcttgaccatcaacgaaacggtagagaagccttgtgggcaaaggaagtttcactttgagagaagtctcgaattcttgaagatcatcttctgtgacacctttcctcagtgttgcctttgcttcagggaagtttaaggtcaaccattgtttgaggatgtcccaacaaagtctaactcttttaaccagattccaaggatacattctaaatgactccctccacaattgatatgctctctgatgaattaagaaaaaaatctttactttaaggtagtctcaaattcagggcaaattctaaggcgctaaacaatcaaaaccctagaaaatgtgaaaagaagaaaagagtgcaattgaccttgatggaaggagcaggatctccatggggatcgagaggagtagagatattaagatcattggagcagaagatagaccagagagattcctcggaggcggagaccttaaggcgtttactgacacaagccactctcgcggtgttttcagggccgattttggataagacgatgtggagaaccaaatctccagcatcctctagacccatagctttcgtcgtctcagacaacaacccttgttcgctttctttctctcggttgcttttgtcggctctgtttcagttcagttctttggattgtttcaatcaagaactgaaagaaacaaagcatttttgattacacgtggcacttgatattacagtgagttaatacaaaattcgagggtacacattaaagaagaaacttggggcacataggggccgtaccataatggcgcaaaaaaaaaaaaaagggaccgaaccacaaaaaaatcattttgagtatgaccatgaaaagttgataactgctaggagacatcatcatctgtacagaggaaccattcttattatattttagctaagctttgaaattgtcctttgctcttcttataataacccagagcttctgcttcatctgctgtctctggaatacctaaagctcgacggatatctgtgttctcagtgcggagaaacgggttacaagctttctccatcttcatcgtcgttggaatctgagatttcccagacacgaaattaatcaagaaaatctagaatccgagtccagaagtcataatttcaattactttggatatatattatcaatagcgacagaagaaacatcaatgacagtgaagttactgaaatgaaagaaagattaccgttggtaatttcttgtcacggagttctgcaacgtaggctgcataagactggagcacttcgtttgttggttctatagacaatgcaaacttggaattactctgccagattgaaaatgattccatcagaagcgataacacatgtgtggtatttgtatattaaaaacacacaataaagataacaaaccagtgtatattcatggccacagtatacgcttgtgtcatctggcaacgcaattatcctctgtagagaagctagcatctgcagcaaaagatgcagattgttgaaaaccaattaaaacaactgacacttaataaagtcaagttcagagagaaccaaagattagataaatgatgtttacctgctctggagtaccttcgaagagtttaccacatgataagctaaacaaggtgtccccggtgaaaattgctcgtgcccctggaaagtagaaactaatatggcctacaacagaaaatgggacattaaaatggggacaaggcttaagcatatactgtgcatagtttatgtttgaggaaccgaaaccagcaaatcttcaatagttattgagagaagttaagaacctaatcaactaatcacagggccaagggaaatacagagttcttacttcttagagcatcaaagaatattatgacaaaagcaacacttattagaatagaaacttatttctgtgaatctttcaaaatatacaaattcttgaggctcaaaatgttatttaatactacagaccagtaaactatacaggtctcacaagtaggatatatttctatatttcaagcagtctgagaagaaatcccccaacacattacatactcctcgagttataaacaattctgaattctcaaagcattatgtagaaaaaataaatgacataaaaatatggattggataactaaactttgaactagtctgaaccagaagtatataactaa

SEQ ID NO: 31193 - DNA, 6382 bp, Arabidopsis thaliana landsberg
  unsure (1)..(6382): unsure at all n locations
aagatagcacaaatatgaaggagcatcttcgagtactaagagctgtggtgtgaaattgatcgttgagaaaccgttttggttggtttccatcaagtaatttgagccgtggtcccaattttgttcggtttagccgatccttaaccaaaaacctgattcagaagaaacatgtattcggtttgattccaaattctatagcttgtattattaaatcattccaacgggctgtatccaacttttacaactcttgaatcaaaaattaagtcaataaaattcgagatcaattgaataatgttactatactatacacattcacatggtatttatagtaacatttaccctccttgaacattctgcctcagtgtcataccattcatgtcgacaataaaagttcccatcttaatcaattccaaagtccttacaaagttaaacgtctatacaaattataatgactgttgatcagaacttcaatatcatatatcaattttctcaaaggtattcattcttctggtgatatcatttttcctatctctagtcatgtcggggtatttctgctctaccatttggtaattggtatcaatatgtatgcaactaattagcttagtattaaacttcataaacatatattatacgcccaattatagaaactcttgacatgaatcaatcccattcttgattgtttctcttcaaacaaaaactagccatacaaggaaaagggatctcttgtgacaaatcaatctagccaggaaaggtttaactaggaaatcgctaaactataatacaaatcgtttcccgcatatagttccgattgcgctagccactactagccagtgttctcttggattgaattccaagtatatagactcgataaaaaaccttaaagaaattcaaaagaagcctcatctcccgattctggctactcggtttctcaacttcctattatgcttttcctggaagaaccattgaagatgttgtattggtacaattcagtaacattttgctagacaacaatcaataacatgaacaacaaaaccactttaattcttgaatagcaataacatcgaattttgaagatggttttgtacctgttgaaataccctagccgagctcttctcaacatcagaagccaagctctcgatcttcgccagcattctctcatacatttcttcaatcccgcctgtgtaattcgcagcttcagctccaaccaaacgtttcaactctccaacttgaaacccctctgctaacgcatcgatctccttctgatctttcgctgattgtttcttcgcactcaaggaactctcatcgcaatccacgctcatggctgagctactcaactcgcagatcaacggtggaaatcccgatttcggactaaacgaaccgtaatggcctcgaaacgctggtccaatgttgactataccaacggatctaggttcgagccgttgtttcgaggatcggaactggtacgcacggtactcgtgcgtgtgaatgcactgatccgtcaatggcatagtaagaagaaagaacacggatgaagccatgttcatcgatctagggttttgcaaatcctcgattggtaagtgaaattgagacgagagagacgacgtgacggctaactctctcattgatggacggttagcggttttcctgcgggcggagaaccacccaattaggtggtccggtgagtcgactcggagggaatcgattcgacgcgagtcaactcggccaagcggatcgtagaaggagacagttttaccagagcagataaagcttgtaacggtggcgacaatttgatcagatgaggaggaactcgaggcgatatccgccggagaatcgtcggatagattagaagagacgattcggtggatttggccgaagatcaagccatcgacgtcactgggannnnnnnnnnnnnnnnnnnnnnnnnnnnnnnnnnnnngacccgaaatctcgattttctctagagagagatcgtccatggcgacgagaagaacaccaaaaggaaaagatgtgacgtcactgaaatctctctctgtgcaaataaaaacgagataaaaattgtatcagcacattaggacgacgtggcgtttcgtgttctaacgagtagttagcgtgtcgtttttgtgaaagaaaatgggcataaatgtccacactcgaggcccgttattcaccttaaagcccaatcaaacagaaaaacattttaaaagggaaatatgaaaggtcaattagttccttaatcttctgcattgatgtagcagcaactagcaacggtgtttacaagtgtcgccatgttgtttcttagttgcaaattaagaagagagcaaaatatctttttacagactacaaggaagaaaacaacacttcttagctcagagttttttgaaggacagaggaaaaaaccaagaagatggtgcatcctttggttgatagagctacaagcgatatgctcattggtcctgactgggccatgaacctcgagatatgtgacatgcttaatcatgagcctgggtaagacctttttcactaaaatgtatttgaatgactgtaaaatccttggtccaatgctctaggtgatcaatccgaatcaatgttctaaaggaaaaatggtaattgttgacattgtgatttcctaaagagaatcaatggtaattttgttgatctcggttatactacatttgtgttgatcactgaagactcggatggttcagatttggttttgatgtttttttttttggttttattccacttttctaatgatatgtgagtgtgtgtttgtaggcaaacgagagaggtagtgagtggcataaagaagaggcttactagtagaacttccaaggttcagcttctggctcttacagtaagttctactaccagggcttgatattcatgttttggtttggtttggtttgattttggattcagtttcggttttgcatagaatgagatgttcttacattattaataccaaacttcacttcagtatgatatgtacacaaccaatagtattcagatatttacttttattttcttcctttttaaaaatttatttatgagaagattaacatattttggttttgttactttgtagttactagagacaataataaccaattgtggagaacttattcatatgcaagttgcagagaaggatatacttcataagatggtgaagatggccaaaaggaaggtcaggctatgtttcttttaaacgattgtttaatctataacaatagttttgtgtgacacctaacttatcatgttgtttgttaaacttatagcctaacatccaagtgaaggagaagatattgatacttatagatacttggcaagagagcttttcaggtccacaaggaagacatccacaatattacgcagcataccaagaattgttggtatgtttcatttttgctgtgacatgtccattttaatcgaaccgatggagatatggtttgaatgttagtatttcgtttaatttcttttatctgttttcagcgtgcaggaattgtattccctcaaagacctcaaatcacacccagttcaggacaaaatggtccttcgacaaggtatcctcagaattctcgtaacgctagacaagaagctattgatacttcaacagagtcagaatttccaactctgaggtgtctatcttaattattgctcattattttctaggaatattcaacataaaaagatttgatcaaatagcatttttttggttgaagtttgacagaaattcaaaacgcaagaggaattatggatgtcttagctgaaatgatgaacgcaatagatggaaacaacaaagaggtatatcttttaacacctagattctgaaaattcatataacatttttcgttaacattgaatctaccaaatgaatgtattttcttttcacctttgcagggacttaaacaagaggttgttgtagatcttgttagccaatgtcgcacctataaacaaagagtagtgcaccttgtaaactcgacatcgtaaagatctgaaacttttacctgcaaaatttgttttgaaactctaaacaattttgacgaatatatgttctttatacacgttttggttcatgtgtcagagatgaatctatgctttgccaaggcctagccttaaatgacgatttgcagcgattacttgcaaagcacgaagccatcgcctctggaaacagtatgattaaaaaagaagaaaaatctaaaaaagaagttcctaaggacacaactcaaatcatagatgttggttcaaggtaagaaacagttctagacttctagttattaaatgttttattttgaaatatctttgggttcttgactaaattgtgtaaaaacttaagaattattttgttgttgtattgtgtgttatattttgatgtataggcattggtttagtggttaaggattgaaggttgaaagattaaaaagattggccttttacactctaaaatatttttgaacttcttttgcagtgagaccaaaaatggtagtgttgtggcttatacaaccaatggtccaaaaatagaccttctaagtggtgatgacttcgagactccgaatgcggataactcattagctcttgttcctctcggacctccacaaccaagtagccccgtagcaaagccagataattccatcgtcttaatcgatatgttgtcagataataactgcgaaagctctactccaacttcgaatcctcacgcaaatcatcagaaggtgcaacaaaattactcgaatggatttggacctggccatcaagagcaatcttattatggtcaagggtcatctgctcctgtttggaatctccaaattactcaacaaccatcttctcctgcctacggaaaccaaccattttcgcctaactttagcccgcccgcctctcctcactatggtattcattttggacctgaaactcaagactgatatcagtacctatagaaaactcaaactaatcctaacttgttttccctttgcatcgttgtctcttgtggtctataaggtggacaaaacaacaacgttctggcattacctccaccaccatgggaagctcaatctccaagctctagccctcaatactctcctacacatccaatgcaagtgactcaagtggtcatcaccacacacacacatcaacccctcggttacaaccctcaaggcggctctcctcatgctaccaacaacaacaacaacaacatgttcgggatgttcctccctccaatgacaggaggccacatgccgccaccctttggccacaacggacacgtcacaaacaacaattataatcccaacatgtacggaggctatggaggacaagctcagccaccacaacagtatcttgtagaacaacaaatgtacggaatgtctcttcaagacaatggaaacaacaatactaatccctaccaagtttcttctcatcagcctccaccaatgatgaagcctatgaataagaaaccagaagacaagttgtttggtgatcttgttgaactctccaagttcaagaaacccacttcaggacgagctggtagtatgtaaaatccacacttttctcccaaattatagatttcaaaaatgttgactttattttttgtttgacttcgataaagaacaccgaatttttaaaataaatatcttttgtcaccatataataacagttcagagtttctcacttcttcttcttcatgacttcatcaatggaggaagacgactcgatttctcctgaatcaatctctctcgacactctagcttctattaggtcactcattatcaacgccgacacttccgactcggtgatttcctcggtgttcgatttccttactggtcttctgagccgagggaactcggcgattcttcaccatgtcctcaagctactctccgaccttgctttccggcgaaaggaattagcaccacaaatcttcgattcaatcctgtccaacttactccgccttcataacaccgtcgctgaggcgagccacgaacgcgccgccgtggaatcgcttgcggtgcttgcgtcattatccgaacgaacccctagcatcgccgccgcgctttccaaaatcgacggcgaggtatttgcgtcgatttgcctcggagcacctatatcttctcggctgtggctacttaggaacgcggataggttcaatgttccgtcgtctgtactattcaccttgtttttagggtttagtaaggatccgtatccatatatcagaaaagtagctctcgatggactgattaatatatgtaacgctggtgacttcaatcacactcatgccgtagaaggttgctatactcgtgctgttgagcttctaagcgatgctgaagatagcgtcagatcttctgcagttcgtgccgtgagttatttctctgattgatgaaattgcggttgaaataattgt

SEQ ID NO: 31194 - DNA, 1139 bp, Arabidopsis thaliana landsberg
  unsure (1)..(1139): unsure at all n locations
tcgctgaggcatccacattagtaatcctagccgaaaatatccttaccattaacctcggtattaccggagaccgaacataattcccaattattttaaacaaagagagttcttcttgtctggaaatctaaatgataatgcaaaggaaatgacaattatgccctcgtacctaaccactactaccccagagaaggctcagtgtgttatgaagacaacattctcgagacaacttaaagatagtttttgtctgaaaagactagatagatagatgatatatgacaatggagcaacctaaaaaatgttctcaaaagatgcaagaacatccacacaaaaaaagaagaaggataaaacactcagctcaggggctcgaatccgttttatcctatgttacaacagagattcacacagttcgcaatctgtctagaggagctatgtagatgggtcatagtattagggagattaaagctaaataaaaggcgaagggcaataagaagtaacctggagagatgtttttagagcctttattgtccattagcattgttcttcttgagttcctcgttctcctgacgcagcgcatcgatccttgactggagaatactgatcatagcttctgcactcatcatttcaagcttgaaagtttctctttcaacagacatctggtgaatctccttctggagatcattaaccttctcttcaggagatgcaagtggagtttgaggaggcaaaggttccttgtgaggacgtagcggttgctgcggcttttctttcttgtcggagatacccatgagtgagaactcaagcaatgcagagatggcagtgttggtggcagcggcagatgatgagattaaagtggttgtattgtcgannnnnnnnnnnnnnnnnnnnnnnnggtcctgtgtgttcctgcttgagttgttgttggactcgctttggcgtctacgtttgtattgcagaagaggtaatggagcttctttgttgagaacgcatacaggtcgaggaggacgctcctcttcttccatctgctcgcgtttgagtgtttcctcgttttcatcataattattattgttgttatgctcctccggcttgaggtcattctcatgatgattctgttggtccgattcgatatccagtggagctgtctc

SEQ ID NO: 31195 - DNA, 1018 bp, Arabidopsis thaliana landsberg
gtcaacaatttcgacattgacaggctgagtggagatcaactacaaacattgattcaacaactctcatctcgtattcaaacttcagagcctttggctccttctccatcaacatcggcatcaacatcaacagtcacagaacatggtataatggctgttcaatcgtctgctggtacaattccttttccttcatcttctcttcgttttgaaaatgaaaaactcactttccagcatcaatgcctttcttctctatacacaaatcttcctcatggtagttggataattgatagtggtgccactacacatgtgtgttctgatctagcaatgtttaatgaaactaatacagtttctggagtaactgtttctttaccaaatgatactagagtgcagatcacacacacatgcacaatatcattatcgcattcactcattttgcatgatatgttacatgttccttcatttaaattcaatttgatttatgtgagtagtcttttgaaaacaaatctttgttcaactcatttctatgttgattcttgcattattcaggagtttattcagggattgacgattggtagaggtatacttcttcataatctctacatattacaacttgatagaccatccacacatgagcagttttcgggatccttgatagctgatggcattctttggcaccaacgccttggacatccatctgctgacaagttacaatgcatttcgggtaatttttctttgtctaagtccaagtctagctttactcatccatctcattgttctatctgtcatttagcaaaacaaaaaaggttgtcatatgagtcacataatcacttgtcttcacttccttttgatcttgttcatttagatgtgtggggtcctttttcaatagagtctgtagaaggttacaagtattttcttacaatagtagatgattgcactcgtgtaacgtgggtttatatgatgaagaaaaaaaaaaaggttacacagcatttctcagattttattaaacatgttcttacgcaat

SEQ ID NO: 31196 - DNA, 4548 bp, Arabidopsis thaliana landsberg
atagaatgattggaattgtagttaatggtataaaaatatttcagaatgagtacattgttttggggagtaaaagaacttcattagaagtgttattaaggtgtatagcccaaagttactaatcgtgggatttagtgtattgtacagatataatgggttgttataaagttttaggttttgtttcagtagattaagataaagcaaaagcatgaaatggagattttaagctagaataagagagaactgaagatataagatatggtgttgaataaactttgagatgtggaaaagaattttgtggtgaaggctcagaaatttgtgtgaaagaacagtgatagtcagataagtaactaggagccttaccttggcgttttggcctagcaacagaaagtgaaacacatgctgtctctgttgtaactgcttctggcaaaaccggtatgatactagagcttgaagtggatggttgtgatgatgttgtggatgacgatgatgcagatgatgcatgagaatgttcattatgtgcattaggtgatgatgatgtatggatttcatcattaacatgaacaggtaatggtaagatagcatgactaaaaacatcagaaacaggtgagattggattatcatggaaaggaaagatgttctcatgaaatactacattcctagaaactgaaacacaatttaaatcaatatgcaagactttatatcccttataacttgatgaataacccaagaaaatacacttttcagacctaggagagaacttattcctatccttttgcaaagtagaaacataacaaagacaaccaaaagatcttaaaaaatcataagcaggttttctctttgtaagttattcataaggtgatatatttttcaacaaaactgatggaatcctattaataagaaacacgactgttaacaagcaatcactccaatatgcaatcgggacattagactgaaacaacaatgatcttgcaacattcagtagatgttgatgtttacgttctactactgaattctgttgaggtgtgtatgcacaagaaaactgatgtaccattccatgttctttaacaatagatttaaaagcaagttcaggagcattatcagttctaatcattttaataacaactttttattgtgtaagaacatgtttaataaaatctgaaaaatgttgtgtaacttcacttttatttctcatcatataaacccatgttacaagagtgcaatcatctactatagtaagaaaatatttgtatccttctaaagactcaatagaaaaaggaccccacacatctaaatgaacaagatcaaatgaaagtgaagacaaatgattatgagactcatatgacaatcttttctgttttggtaaatgacaaatagaacaatgaaatggatgcatgaaactagacttagacgaagaaagagtacccgaaatgcgatgcattttaacttgtcagcagatggatgtccaaggcgttggtgccaaagaattttcatcaactaccaaggatccagcaaattgatcatgtgtagatggtgcatcaagtcgcaaaatatagagattatgaagtaggatgcctctaccaatcgtcaatccctgaataaactcctgaataatacaagaatcaacatagaagtgagatgagcaatgatttgtttttaaaagactactcacggaaatcaaattgaatttaaaagaaggaacatgcaacacatcttgcaaaatgagtgaatgagataatggaattgtgcctgtgtgtgtgatctaaactctagtatcatttggtaaagaaacagttaccccaaaaactgtattagtttcattaaacattgctagatcagaacacacatgagtagtggcaccactatcaattatccagctaccatgaggaagatttgtgtataaggaagataagcattgatgttggaaagtaagttgatcattttcaaaacgaagagatgaagaaggaaaaggaattgtaccagtagacgattgaacagccattataccatgttctgtaactgttgatggtgccgatgttgatggagaaggagccaaaggctctgaagtttgaatacgacctgagagttgttgaatcaatgtctgaatttgatctccactcagcttgttaatatcaaggttgttaacttctgtagctggtggtggaatgtatagactaggaggattagtcatgatatttgcaactgaatgaggtttagatgcagcatttgcagaatatcctctaggctgaaaggttgatggagcaggagatctctgagattgatagttagagatggtgctcttaaaccttggaatataccctggaggataaccaataatcttgaaacatttctgtactacatgtccagattgaccacagtgggtgcaaactggtctaggtggtctcggacgatattcattttgtactgcaaaagctgtattatccatctgaccttgatatgaagagacatcttgataacattgaccagaagattgattaggtcctgaagcttgaaacactacagtttttgatgaaggtgtcttaatacttctctgcctttcatcttgagttaccatattgaatgcatcctcaatagttggaatcggcttcagcatcaaaatttgtcttcttgtagactcaaatgactcattcagtcccataagaaacttagtgactcggctcctctgctgcaatctttcccacaacactgcagcattgcactcacatcttccacaagtgcaaacaggcaattccacataatttctatattcttcccataatgtcacaagttctgtataatatgaactaacatccatagcaccttgttgaataatactcaaacgatgttctatttcatagactctaggtgcatcatcttgtttgaacctagctaaaagatttttccaaattccctcagcagtagatataaacagcaagctttgaccaatcttcttgcatacagaattcattaaccatgttgctaccatatcattgcaacgagaccaagatccaaaatcatgatgatcaggtgaaggtttagtgatattaccatcaataaaaccaagcttgttacgtacattgagtgccatacgaacggatcttctccaagaatgaaaatctgctccagtagtgagacgatcggaaactagaaccaatccggcatgatcggagctgtgaagaaagaatggattctcatactgatcaatagactgtcgcgagctatccacatttgtattggatgatgtcgtcattgaaacaaatcaagaatcgagagatgatactgaaattgattagaacgacgaaccgaaaaacgattagagttgaatcgatcgtgatgtagaacgaatcgatctgaaagatgaaggagattcgagcttgagcttcaactgttagtgaaaatcgcgaatgtgattgcgattggtgattttgagacctctattgatgaatcggagctcagtaaagaaaagaaatggaagatttagggtgataacgatggtgattccatagaaattggatgaaatcgaagaagaagatgagttttggcggaacaagaagctctgagatttctgttatagtgagagaaaatgtcttttgtgttctgctaccatattaactatagagagataaagtgaattttccgtatattcttcttaatgatcaaatgaatcatacatgttccttatatacacttagagtaagctaaaggaaactttactctaattataaacatcatatacatatgttaataaaaaaaaacgtggactttaatttcttcgacgtcattttataggaccacgaattgagttcctaagttcaactagcaaatcgttttgttcttacttgttttttctttgtttggtcaaacttgttttctctaacaaaagtgcttacaaaaaaagctaactttagaggttgggctttatacccaatgaacataaacgaaattagcttagattgaaacacataagtgtctagaaccaagttgaaccaaagaaaggagaaggcccatcaggagcccataatttgccgatagttgcgtcgatttaataatctagaagaaaaccgtgttaatatcggagaacaacttttcccaaaaaaatttggtcgtaagatcctttcccaatttggtttgtgaattggcttttagtcggtgtaagtggtggtgtagtaattttatggaagaagtctgtggtaacatgaattaattgtaaaaatatacatgaattatatattgtcatcatatacagagactattttctgtggtaacaattgttctgtacaacgacaatttgctatggaaactgtttctttcagcgggagagatagagagagagagggagagagtaagcagaaggttctggtttttgtagtacttacaacggttttaaccaaggtagggcaacattgggtccaagcctagtcctgaccctcccaagctaccagggtctgcatgcttaactctcccgaaatagcgtatgtggcgcaacagtcataaaggaacgtgttgtggcagattgtggagctgtcacataccactgccgacgtgcttccg

SEQ ID NO: 31197 - DNA, 4212 bp, Arabidopsis thaliana landsberg
gtcacacctttatcctctaaacgaaacggtcacctttagttgtcacatgtcagaaacacgagcgagacacttttgtttctttaaccttatcaagagccacttccgtttgaaacttggttaaagacacctctttgcctcccatttcctccaatcccaatttttctcttcttttcaagtttcaaaaaatatgaatgaatcacttatatatcgagtatatgaaaaattccaacggtcaggatggggcgccgcctcatgaccaaagaagctgccgtgaaatgggaacatctcatccacccatcattcaagattccattctctttcttatttcttctatgaatcttcttcatagagatctacagccaaaaatgaattatttcagacgtgaacttattaaaccagactacagtttcttggaaactgttgtaacgttttgatttcagaagttctcagacatctatacctagttaaactcttcacaaaccaatgtcaatatgcttgcatgtatttggattaaacttttcgacttactaaactcctctgaataaataaataaaaaagtttaacaaaaaaaaaactcctatgaatatacatgcgtatataatgtgaataattcgacgtaaataaatgagatcactaagaagatactcgtaaatattttcaagtgacatcattctgttttaatggtattcaagttcccatgtgtatggttagtagccaataaacgtttgcctgattgactggaatcaacatatcagagggaacaataactacataaggcgtaagccatgacagctttttttgaatatttgtatgtgaattttgattgggttcaaaaagatcaaattagattgcgcgaccatgaaaaataaaatcattttaaattatttgaaataacaacgcaaagctgttggggggagagcaaaaaaaaaagggggtttaatataccacaatcaatatcgttttgctaaaactcaaaatgagagtgtttgtacgtattatacgctatatcttctacaataagatagttatgtacgtcagatatgaataaatatgcgatttttaatgaatacgcaaattaaatctctcgtgatatgctgatgtaaacaacaaaccacggaaaagtaaaaggaacaaaccatcttataatgtgcattttaatatgtatgaaaaagtattacagtataaaagataattcagtcaaaaagttagaagagaatagtaaactatttgaattacaagcgaatagtttgaccccacacaaatcttcgaagtttgatcgagttatttttttggtgaaatatatactcgcaagggaaggggaatttgtttcttggtcggctatctcacgaatctgcttagacgacatgtgctttattctaagttgttatgttgtattccatacaatcagaatggttgatatttaatccactttcttataatattcttttgcctaaattcttttatgtgcatatgaactaatttaggaaataagacgtttatatttgttgatcaagtaaaaaaaggtaaactgaataatgaataatattcaaacgaaagtgtgaagactgaaatcgatttttcaatgacatattattagtatcagataatcagataaatggtacgtaatacatataagtatgttatgtttttcttgattctatttttattagtgcgtcaaggtatttattggcgttggaatcgttggatcatggatggcaaaacccgtttaaatgtacatatgaactttacacagtataattcataaatactatttacaagtaaaattagtgtacaaattaaaggttaatcatgtgtaaaactaaaactttaagtacttttaagactcaataatttaacttggttgagacttagtttcctctggagccgacgtccaacattgaaacgaaaacaaaatctcttctactcttctaccatagctttgatgcatgtgaggatgaaatgcaagtaaacaattagtgatataaggttaggacagaaatttaagatatactaaaactcgttttggagaaattgtagatccataagatgcattataatctcgaaatatattatttagttttaaaactaataaaaacagataaatatctcccgttatatagtattttgtgcaatatataatgttctttaatgatgttatagataaataatgggaaataaaaagaattcaaatctcagattaaaaaatacatctaaccgtccaccatcttgcatgtccatgattcccatttatttgtaatagaaaagtataccaacttgaaatattaaataccaaaatttttgttataaatagtcccacagttttctcatccctccagaaaaacaaatcatcccaagtaatcctaactatacaaaacacataacaatatggctccttcaacaaaagttctctctttacttctcttatatgtcgtcgtgtcattagcctccggtgatgagtccatcatcaacgaccatctccaacttccatcggacggcaagtggagaaccgatgaagaagtgaggtccatctacttacaatggtccgcagaacacgggaaaactaacaacaacaacaacggtatcatcaacgaccaagacaaaagattcaatattttcaaagacaacttaagattcatcgatctacacaacgaaaacaacaagaacgctacttacaagcttggtctcaccaaatttaccgatctcactaacgatgagtaccgcaagttgtacctcggggcaagaactgagcccgcccgccgcatcgctaaggccaagaatgtcaaccagaaatactcagccgctgtaaacggcaaggaggttccagagacggttgattggagacagaaaggagccgttaaccccatcaaagaccaaggaacttgcggtaattaccaattatgctttttcctttataatcaaactgatattattaacgaacgtctatatttacacatggttcgtaacagaacaaacttttatgttatattttgtgtaacttaacatgtaacacatgcagcatgtgtattgatgttaatatttgtgtttgtgtattgatcaacacaggaagttgttgggcgttttcgactactgcagcagtagaaggtataaacaagatcgtaacaggagaactcatatctctatcagaacaagaacttgttgactgcgacaaatcctacaatcaaggttgcaacggcggtttaatggactacgcttttcaattcatcatgaaaaatggtggcttaaacactgagaaagattatccttaccgtggattcggcggaaaatgcaattctttcttggtatacactcaaaaacagagttgctctgttttcactttattttcaagaattgcaaaatctgattatttttcctatctctttgtgtttttgcagaagaattctagagttgtgagtattgatgggtacgaagatgttcctactaaagacgagactgcgttgaagaaagctatttcataccaaccggttagtgtagctattgaagccggtggaagaattttccaacattaccaatcggtaagcgaaccgacattgatttgtgtattaagtaacaaaaccgggtttttggatttttattaacctgattggttttggttggcagggtatttttaccgaaagttgtggtacaaatcttgatcacgcggtggttgctgtcgggtacggatcagagaacggtgttgactactggattgtaaggaactcttggggtccacgttggggtgaggaaggttacattagaatggagagaaacttggcagcctccaaatccggtaagtgtgggattgcggttgaagcctcgtacccggttaagtacagcccaaacccggttcgtggaaatactatcagcagtgtttgaaatcaagacgctcgataaacatttgggattcttataactgaatttaatctcgtattgttattattgtttgtatgtatagtatttcaacaacaatttcaaaaattagttgattcatcataaggatataaaatttataaatccttatgtcgatcaatttcttttttattcaaagaaagattgtttgcttgttttatgtattaagagaaatataataaaatgatatatttcttaagagccattggttttcactccttcatccaactaacaacataacaaaagtcggtttcttctacttctcctcaatcttcttctcatcaattttcattatgcacctcaaaa

SEQ ID NO: 31198 - DNA, 6176 bp, Arabidopsis thaliana landsberg
  unsure (1)..(6176): unsure at all n locations
acagatagaatgaaagaaaacatatcaagggccttaatcctaatgctttcatgctaatattaagcaaactcatgttgattattctatttgtgatacacagaaaacaaatttgatgccgtcaacttcaacaatccagagtttagctcgaagaccaatgcttcagcacgataaagcttctttacaatttaaaagacaaagcatgggagactccaaacacttcaagttaacgttgtatcacaaaaaaaaatctaagaaaaaagaagggaaacaagtaatgaagctatatatgtaccttccaagctaagagaaccaggaacacttctaggctccaagaacctcgaccaatgtaattaccgttgaatacaaagcattgattctgtgaaggccttcctgattgatcaaagattttgaggagatcgtgtaactgaccgtggagatctccaaccacaatcactctagaatcctcactacagccattgattttaacacaattggcttctttttctagaatctgcgaagcacaatccaccagagaaacagccacagaatgtggcaatatcaacgagaactcggaaaccgagttcttccatgtggactggtttagcaaacccatcaaagtctcaacccattcaagagttagctgtgactctaaaggccaagagattggctccaaaacaatgtcaccaaaatccccaccatctccgtttcccaaataaatctccatttccattggctcagtcatgtcctctagatgatcaacagcttctggttcgtattttctactacccattccttgtacgcttgctatcatcctggtcacctgttgcttctcttgatcatccaatgtctcatattgaaacccacgaagagactttaaagaacggtctgagttactcacctgcacaaaattcaaacttttaatcgatttgtggttcacatttaatgcttcaccaaataaagatgtgtacttaccacttgctttagaaccgaacacagtattcgagttacactattctccggatcctgaaacaaagattgtaaatttgacgttaagggtaataagcaaaacagtgagagatgctaaaaaacatggagactgaattgtttactttaagaaagtctcgatcagcaccacgtcgagatatttctttcaacataagcagagtacgcagttgcttatagttcttcattctcgtcgttttaaccgcacttagcttcaagaatgcgaatttgcaagcttcaagcttcgagtctaaaacccttttcgaaatttctacagaaaaaccagtcaaatgttattacattactggtttttgcacggacacagagaaatttgtcatggagatgagccaaatcaaattgactttataatatcaatcgaagaaacagttacctggaggcggcatatcgaaagatttgaaatttacacggtgagattgacagttcggtgcggtcgtcggcacagttccggcgtcgatgtcgattacaaccgccgcttcaccaccgaaaaacgagcgttttcgtgttaacttcttgccggttctagggcaaagaaaccacgcgcatttcgctgcttagaaagcgaaaaggatgttgtttcattaatattgggccggcccatatttaaaaggcccaaactgaaaaacaaacacagtcttctcagttctctctggagtctctgagatttgtgattgaccaaaccggtaaaatcagtacttccgataaacccacaacaatggcgaaagagaaggcatgagaagaagaagcttttaatggcgggagtgattagggctaagcagctgtttctatgctcgtcgattctctcgagcaacaacaataaggttctatcacgccttcctcggcgtagtatcaatgtaattgcgggaaatctcaattcgagcgagactaagaagaaggagaaagagaagaggaagaggaggaaagagattgaggtggaaaaagctactgcggaagcagtggtcaataaggaaaagagaaggacacggtcgagcagagagtatgaactcgccgacggtgacgaagttccgtcctcacatgtgcctgtgatgctcggagaagttcttgacattttctcttccgttcgcttgcgaagtttcgttgattgtactcttggcgcagctggtcactcttcttctgtaagtttcttcttcattgttgattaattagctcaaattaggatgaacacattcttgtgctttagatgtttctttgctattgaagaatttttgtcgacgttaggatatgtaaatggattgtgaatctgtaatttgtgtttcagatcattcaaagccactctgaattgaagaattttgttggaatggatgttgatcctgtggcaaggaaactgggacactttcatattgattcgctcatgcatccaactttgaaggcttctatagtgttgaagaacttcaaatacatcaaatctgtgattgctgatacgcaaccggagttgttagatgtaggtgttgatggtattcttatggacctgggaatgtcatctatgcaggtacattttgtgattttcacatgcaactgtttctttttccttgtattgtttgcatcactcacctatgcttgtatccccacaggtaaacaatcctgaaagagggtttagtgttcttcaagagggacctcttgatatgcgtatggatcctcaggtgagggtacttatatctccttgtagtataatgaacctgagggtttttgaatctcttggaatttctgctgaaattttgttataacctatccactgacatgtgacaggcgactctaacagcagaagatatagtgaattcgtggccagaatctgaactgggaagagttctacgggattatggcgaagaaagcaattggtatttacttcaaaatagaattgttaaggctcgacttaatggcgggttacattctactggtgaactggtggatctcattcggggtacgtcaccagcaagcagaggtatgtctatctatctttcgattctcttttcttctttttgcttctgtgctagtaatttatattgggatttcttgatttgcatttgcatctcaatgcgagttttagttagtgttcctagttaaagatttggttgccaggtacaaaacacagaagagtaagcaactattaatgagtgatccgaaacaagatcatgaaaacattagacatttttgagttttcacagttgacagcaaagttgaagaagataatcctttttaatctttaatacttcgacttcgtttgaaatgttgtaggaggcagacaaggctggataaagacagcaacacgtgtgtttcaaggcctaaggattgcagtgaacgacgaactcaagacactacaaaactcactctactcatcattcgatgttctcgctccaggtgggagactagcagttatctcctttcacagtctggaggatcgggttgtaaaacaaacgttcctcgacatcttagggtttcaaagagaagagatcaacggagagggaagtagtgtaaaaccggaaaggcaaatcgaagaaagagtagagaaggaattaaaagagaaagaagagtggatcaaacagacagtaatagcgtcgaaaggagtaatactgacaaagagaccaataacaccttcagaggaagaggaaagactgaatcgcagagcaagaagtgctaagttaagagtgattcagaagttgtgattactttatgaaatgtttttttagttgacaatcaaaatttcaaagctctaactaagctttcattcaaaatagtcgaggtttttagaaaagaaagttaggaacatggaaacagaagaggattgatccaataatagttgaaccaaaaccaattaaaccaaacggaatagtgttcaattttcgaaccagaccggttaaaatgcataagtgtgtgtcgtcgtcgccgcaaaaacccagttggagctcgaaacccttcttcatcttcttcttctcctccacctaaccaatgggagcaattgatctctctttctcacagagtcttctcttctcttcgtcgcgttccaatctttcctcctccacacaccgttccgtctcttttttgccgccgggaagcaagtcacggtgtctgccgccgttgcgttcaatgagtcatgacgacgacacggcctcaaaggaggtgaagctatggggtggaaggttcgaagagagtgtcactgagaaagtggagaagttcactgagtcaatttcatttgataaggttctctacaagcaggacattatgggtagcaaagctcatgcttcaatgcttgctcaccaggttttacatttgcttttactttatgcattttcttaatttcttaattcagttgtgattctatgtcttctaagtaatgcaaatttgtaaagtcaggacatttttggttatttgttcttacaggggctaataactgatagcgataaagatagcattttgagaggtcttgatgatattgagagacaaattgaagcaaataagtttgaatggaggactgatcgagaagatgtgcatatgaacattgaagcagctcttactgatcttattggtgaacctgcaaagaaacttcatactgcaaggagcagaaatgaccaagttgctactgacttcaggctttggtgtcgtgatgctatcgatacaattattgtcaaaatcagaaatcttcagagagcacttgttgaactggctttgaagaatgaggctttgattgttcctggttatactcatcttcaaagagctcagcctgttttactcccacacgttctcttaacttttgtagagcaggtttggaatttctactttgtttaagttttggttttctgttacatcgttttgtttagtttctggttatgttataaaattgagcagcactctaatttgctttatgaggttcatcttttagatactatgtcctccttttcctgcctcagaacattgtagggttcttacatttacttaggattttactttcttagctggtattttgnnnnnnnnnnnnnnnnnngaacgtgatgctggtcgttatgtggactgtcgagcaaggctaaatttctcccccctgggagcttgtgctttggctggaactggtctgcctattgataggtttatgactgcaaatgctcttggatttaccgaaccaatgagaaacaggtatgttcctagttcttatattggttgcatcaactctctctaattatatgtctttctctttagttttatggtttctcatttattaactcttttctcctctgtttcaactagtatcgatgcagtctcagaccgagacttcgtgctggagttcttatatacaaatgccaacaccggtattcatttatcacggcttggagaagagtgggtactgtgggcttccgaggagtttgggttcatgactccaagtgattctgtgtcaaccggaagtagtataatgccacagaagaaaaatccagacccaatggaacttgtcagaggaaaatccgcaagagtcataggcgatctggtcactgtcttaacactgtgcaaaggacttccccttgcttacaacagagattttcaagaagacaaagagccgatgttcgatagtaccaagacaataatgggaatgatcgatgtatctgcagaatttgctcagaatgttacattcaacgaagacagaatcaagaaaagtcttcccgcaggacatcttgatgcgactacttttgttgattatcttgtgaagaaggtaatgtggtgttgagtttatcatatcttccatttttgtaactgaagtcagaaagataaatactgttttggttttttgatttcccaggggatgccttttaggtcatctcatgacatagttggaaaactagttggagtttgcgtctcaaaaggctgtgaacttcagaacttaagtcttgaagagatgaaaaagctgagccctgtgtttgaagaagatgtgtttggatttttgggggttgaaaattcagtcaataagttcagttcctatgggtcaacaggatcaaactgtgttgctgagcaacttggctactgggtcaacaagctcaacattactaccacctgatccggaccaaaccattagcaagatatttgatgacatttgtgtaattttcatatttattgaggatttttgtcattaataccaggaagacttcaagcaacatgtt

SEQ ID NO: 31199 - DNA, 3217 bp, Arabidopsis thaliana landsberg
tttgtcacagtatgtcctcaaatctttattattactattgcatttgttcttcttagttataaactttgattgtagaaaaagaggtatgtgtcatttgtcaatcacttatcagctagttctggtctccatctgtccaaaagagtgaggtttatatgtgtcttcatcattttataggctggaatgggcggtggaactggcactggtgcagcccctgtaattgcaggaattgccaaggcgatgggtatattgacagttggtattgccacaacgcctttctcgtttgagggtcgaagaagaactgttcaggctcaagaagggcttgcatctctcagagacaatgttgacactctcatcgtcattccaaatgacaagttgcttacagctgtctctcagtctactccggtaacagaagcatttaatctagctgatgatatactccgtcagggggttcgtgggatatctgatatcattacggtatagcttttcttatgggcatcctgtgatcatttttttgtgtatggcaaatgatttaccagctacgtttgtccttgatttgtagattcctggtttggtgaatgtggattttgctgatgtgagagctataatggcaaatgcggggtcttcattgatgggaataggaactgcgacaggtaagtttggaatgatggataagctcatttagctgcatagtttcataagcagaaccattagtcactagatatgtgtcgaaatagtctaattgaactaatgagctagtagattggtgtggcaaagaaaccagtctagtgactgggatactgaaaatgaccatattatattcactgttactcaactattgtgcatctatgtcatgatgtaataatcaaagtcatgaaccttgaacttcttttgcgcaaggttttgttttgtttgcaacgtgctgattctttcatgctacttgtaatcattcaggaaagagtcgggcaagagatgctgcgctaaatgcaatccaatcccctttgttagatattgggattgagagagccactggaattgtttggaacattactggcggaagtgacttgacattgtttgaggtttttgtctctctctctcatctttgtttcttatctctatgtcgatagatccataaacaataactggatcttgagagacgcattgacagggtgttaaaatcatttattttcttccttccatagacatcttagagcaaagcctgattttgcttcatacccctaagatgctctatagtttttcatacactttggtcttgtgtaggtaaatgctgctgcggaagtaatatatgatcttgtcgatccaactgccaatcttatattcggtgctgttgtagatccagccctcagcggtcaagtatgtcctttataatgtttcttctactaaacataggtaagacctctagagatgatagaattgatgttttttttggtaaaaggtaagcataaccctgatagctacgggtttcaaacgacaagaagagggagaaggacgaacagttcagatggtacaagcagatgctgcgtcagttggagctacaagaagaccctcttcttcctttagagaaagcggttcagtggagatcccagagttcttgaagaagaaaggcagctctcgttatccccgagtctaaagcccaatctaatcactaccctgcacactgcagcaataacaaacgtgtgtgtactggtagtctggtactgccttctgggatacagcaagatgtgttgatgtatgatcaagaatctgcgggggtgtgtatatgttctgtcactgcctctggtcgtgttcttgaataggttgttttagaaatcggagtttctctctatgtcacttccaaaacaaaaaaggagaagaagaatcacacttctcgaaccataaacatacttataagattatgagagttttagcagaaattattgtcatttttcattcagttaataaaaaaatcaatagcgatataccagcaaacaactgtgactttcgaataaaaaaagttcatctccgacgcatgattctgtggcaatgtgcagcaaccaaacaaagaaccaacttggtttccatttcatatgttcaaaataaaatttgttgatacatagatatagcttgggtctagtttacacagatcaaacacaggttacaacatccggacttgtttccttgagaattttccagtgcaggacaagccatccatcaatctattatatgtaaagatatcaggcaacatatctttatccaacatctcgttcactagaacttctcctcccttcttctcctttctttcgtgaaccccgaaaccaaaacatggtacgttgtctcatcgggttcatatcctttgcttgatgccaaaagtctcaatctgtttgcatcagtagaatgatcagaactgcagagatcccgaagaagcaagttaaatgtcacactatcgggaagaattcctgcattcatcatcttctccataaaccctgacgctttctctgttcttcctgatttcctcaacccttcgacgagtgtagtacaagcaatgaaacatggggtttggcctttcttccacagctcctccatcatctccattgctctaaccgccttgttttctccgcagagtttctcaaccaaactaccataatcaaactcactaggtaaaaccctcttgttcaaaagatcgagcaccaatccacaagcatcgtcaacccgaccttctctacacaacccatcaacaagaatctcacaagtagcttctgagaatctacaacctagctcaatcatctcataagccattttaacaccttcctcgattttaccgctgctcaaaaaccctctaataagagtgttgaagctaaccacattcggttcacaacctttctccttcatctccctgaacaaatccaatgccaaatcaaacttagagcttctacaataaccattgatgagaatgttaaacgtgcatacatctggctttgctctttcctttcccatcctctggtaaaaccttaaagccttatccatatctccagatttcacatatccattcacaacagtgttataaactccaacatttggtttaccatcgatcaatctcttcatagtatcaaacgctaacaaagcataatccattttcctagatctacaatacgcatcaatggcggatcggaaaataggttcaagctctggacaagagaatatacctgaagaacaaggacag

SEQ ID NO: 31200 - DNA, 2366 bp, Arabidopsis thaliana landsberg
  unsure (1)..(2366): unsure at all n locations
acctaaacccctagtcaactccttaccaatttgtaacctattgtctggaaaaaccggagatattctcattgcttggatatcggtattcacaatccaaaactccacaccaatcatctcactctcaatcatacgnnnnnnnnnnnnnnnnnnnnnacctccaacgccgataactttaatcctagcctcattgtaagtgtttggagtagataactcatccaaatcctcagtaatgggaacactggaagtttcttttcttgggttgagcatggatatctcagggtggagattcaagaaagagtcttggctttggaaatggcttgtactatgagaattcaaagagtttctgattgacgaagactcgtacttatgagaagcaacaacacgatatcttttagtagtaccttcactcattcttaagcaaccaaccctcgtgcctagatgatgatcaggtaacacactctttctaagaacagtgagtacccgagaatccggaggagttaaacagggagaaacataagctgccattctgagactacagaagcaaccaaagatctattaaaaactccaatttcactgcttcaagagaaagaacaagaggtcaacgtcaagtcctgaaccaagaagaagattaaaaaaaaaaaaaagtggcactcacattctacagtactataattggaaaccagttgcatatcagcagcatatggatcaagttcaacactagaagctaagatactacaaagaaaagtcaatgctttaattaataaatttccgaggagtatcaatttgaatcagaaaactacaattggcacatcgtactgttctaaagtaacgaaattgaagatggggaattccagaaatttgtaaaacagtagacgaatacaaaaagctaagacatttcgacgattgagtacagaatttccagagggagcagttttagagattgtagcagaagtacattaacatgtaaaagacgaagagtaccttacgagtagtggcagcagagaattcgagctacaaagaaaaaaaaatgggaaccaatgaaaatggaaggttttggtgttttctgggcttagaatctctttctcgatcacataaaagtggattatgattttgattttgctcctaatttttatctgtttcagtaacaactacagctactaaattcatctgttaaataagttggtgaaagagacaaagcgttagccgacgagagtgatgaagaaaattaaatgtttaatataaatgggcctataatgttggtcttaaagcccatacaacgaattctgggctttagccggataataagcatacgaaaaatttgcacaattttatgagtcttttgcttgctcatgtagaacagtgaagtccatggaaccatgaatgatgatgaacgtaaacaagccacaattctataattcagattgtttgtttgcgtttagatttgtttcgaacgcatcaattgtgattgagacaatcgaagtatgatagtttcgctatcttatgcaatgccattgccaggccaaagctcgtcatgtgtatcttctgatcaactactttctcgcttatagaacaatttcaagccaaaccattcacacttctccccagtcacttatttatcattggtagttgaagcaacctaagatctttaatcaaaacatcttagtgactcgcttctacgttcggaaaatctacactacaactgcaacacatgtacgctaaaaatgagcaattgatactctcaccaaatctaattcaaagaacagttcatgtcaaaaactgttcaaacagaaccacaaaaggttgtatatggcataaacgttccgagaattccaatagtaagagatcttagaacatcatcttcaattacttaaaccacatcaataacaacttcctctaaagttatcaaaaacctttacaatgtctcagctatttcaccacaaacacttataagatatcacattaagctactcagtaatggcaccggaaagttcgtcgatctatcaatattcgaaagcaaggaatcaaaagataacgagaagcgaaaacagagtatagattaagaaacaggcgtacgaaatcaatccacggtgctcttctcctccatcagcaagagacaccaccagattagaacaagctctagtagcccacaacacgaaagccgcaccgagcacaaaccgaacgggaccagcaccttgtggcacaaacaaggacaccgcggacaaaatcacaacgggaagcagagagtaaccaagtaaactcgtacaagtatgacgattaagattccatgtctaccagcaagcatattgaagacaatgctacagaagatagcagaacaacaacccaaccaagttatacacaaactgtat

SEQ ID NO: 31201 - DNA, 7600 bp, Arabidopsis thaliana landsberg
agccagctttgttcttaatttttcattacaataaacagtttcaatcatcactgaaactgacagatacacaaaatgtatacttttgtgccttaactacatagcagaatgaactagaaagagcaaagaatgaagatacttacccactttagtggaagaaacgcatccactgattcttaagaaggaattcttgattcatctcgcgtttcaggtggatccagtcccatagatttgagaaaagaaagctggtttcggaatttcgtcgaacatgtggtaggctacgtcatgtcaaaccaaattaacgaaagatcgcctctcttgtgtcggcaaatcattagaataacgatgacgaccgagagaagagagtctcacttgtgctgtgctattcaatgaaaattaagtgcactcttattcgttagttaagacacaaccgtattgcaagatcatgtgaagatgagcttactctctcactatacttgctagttttttaactctaactccaatatatatcaattttagttacatgagcttatgactactttagttgtacttcaacttcttctgtccatatacttctctgagaatctcttcaagttcttcacagagaggttctggagttagctgaatcatctcatcactatccttatctggatctgtctcctcctcactgcttagccatccacagtgagaactctgcgcacctacagaatgattttgacctcagttaaagaatgattcatgcattgagattgttatggagattagtatacctccaacagaatggtgtgcataatctactggtggtgcttctacgaattgaaaagctgatggtgatgagtccatgactgcttcgttagtgatcaataacgcatataggttcaagaaaccactgatcgttcaagcaaaactaataccaaaaatgaaaagaaacaaatttgtaaccaagatgaacaaatcaccttttcttcttctggttcttcctgagctgtttcttcgtgttcctcggccgccaatcggtaggcttgttcctcttgctttttaagggaaatattaaggagacctcatagttagcatcttcaatcagaaaccattggtcctcaccatacacctgaaatccaaattgagtaaagtgtcacttttgaagtttgaagtaaagtttttttctagcaagggcagatagagaactctaaaactaacgaacaaacctttagcacttgcttgatactcgcattgataacaggcttcttaaacccaaactctttcatgcggtctcgtgctgcatcctcacgcctcaatccaatctgcttgcaaaacaagaagaagaaagtagcaatttaataccctctaaaggcgagaaaatcatagttgaagaaaaacaaacttatcaaacagatatctatttctcattgagaatcaactgaaacaagcgaaaattcaagaacaaacgaagcaaaccagaaacctaagtatgaaacctagtggatcttctattctcctaaacctccaccacacttctgtttaatcctctacgtaacagtaaagcttacttaagtatgaaacccaagtcccgaaccacactgatctgtagtgttcaatcgtctatgctagcaagaaagcttacattttttcttcctttgggacctttgggagccatttctatcttctctgatcgtttctgaagaatttggaggagaaaaatatcaccttccagtctttggattcaaaatcaaacaaacaaaggttacacaagagtgatcagttttcaaacctatgcaacaaaaagaaaaacaaaaaatcttgaaacactataagaagaagacaataaaataaggaaatttgttcactaacattgagaaaacccagaaatttccacagagaagtccaaatttttgaaaaaaaagatgaagaaaaaaccaattttactgctcgtttctaacaaattcaaaagcattagtaacacaatgctatatcgaaatgttccaaatttcaaacatacatcacaataaaacccattacagacgttagtcatgaataattaaccttttattttgtcctcggaaaacatggaaagatagagttgggtaagacgaaatacctaaagatagtatttgattttacaccggagacgaaacgaatcaacgaaaaactagggttttgcaggtgaaattagggagaatttgagcgacgaagtgggagagaatgagagtgaacactttcagttttagtaactaaaaaatcaaaccgaataagtcggttttggttcgcttcggtcatcggttaaattggttcggttatgtatttattctctatgcaaatgattaatcccgtttggtttggttatcgaatttagaggaattttactttgatacatacataaatttcagtacaaatgtttactttgtgtaactgtcggttcagtgaaccacatcaaaccgactcggttacctgatccgtccgaaatgaccaaggttcggttcggtttgggttatagtcgcttgcctagaaggctagaatgctgtgttggcacaggtcatagttttggcactcagagaaaccaaacaacacttcaattcttcaaaattggtaactccaagatcaagaaagtacattttgaggtttaatagcgacaacgacaaacaacaacgagaaacacacacaaaattctttgtctaaataaagcaaaagagattctgatgatcctgtgtatgtataaaacataacatatatggagagagcttacaatataaacgatgaaagctcttctctattaagtctaattcaactaaaacacctaagtgggatgtcatttatctacagaaactaagtatgatggcattgattgattcaccaaggtccagactctgtcctcctcagctttttctttggacctccttgcagaagattcctcatctccgtctcctgttttatacatagcacggaaacaaacaaccaagtttacaagttcagctatgaaatgtgcagtttagagattccagtgttgttgcattggcataagaattattacctgattcttttgcatttccatgatccttgcctgtaaaacatgaggcgtacaatgagaaatgaatgtaacgtatgagcaactgtgatgctgagacatggttttgtgattacctgctttcgttgtaactcgtcattctcttcctttaactttgcaacttcagcttcaagctccacggtgtaagcctatgaaccaaaacaagcacgactgagaagcttatgagataaagactagagtgccattcaaaacatttagaccctcaaatggagaactcaacagtttggtcatagtacatgtcagatgtaacaggtttttgggagcaccaattacccattaccttgccccaaaagaaaaaccatgtcgccactactcaggttttgacgatgaaccctcactactcagttaaactctgagccacctcatgacattagcaaattacattccagtatattgtttggtctgccgtgaatatctgcggatgggcaacatgtatatacaccaaaaccagaaggttcatatttgtttgcgagattcattcagccacaagtactgatttcaagtcccaataattctgtttagttgtttactacactacttcacacaagacactttacgctttgaattcaacgcttcattgtggttaaagaacttaactacaagataagctaaccaatttactttacatatcttttggcttataacacaatcaagagtacatagatagatggtgatgaagagattaacctgtttcctggcccgggaccttgcagctgattctcggttctttatcattctcctttgccttctctctacaactttctccacagtgccactctttctacctctcataccaccattaaacatgtaaggagacggagagagtgatgaagaatcaccattactcttccctatcccttctgatgacaatggcgtaacaggcgacacagcaccaacgcctaaagctccaggaattgcagcagaagcaccttggacaaagcccacattgttcgttaaagactgatctccaagtcccacaagaccaccacctcttatcccaggactattaagctgacccatttgtgttccataaccaaaaccaggctgcttaggcatgattggctgttgctgttgcgattgctggtatgttgttctagctccattcacattcagaggcaaactagaaccttgaacctgcaaagaatttgcagtctctgcaccaagatttcccattacaccagcggcaacaactcgtggagaaggctgctgaaactcgacagagaaacctgtgttggcatcattaccaaagtaaccgcctttattgttctcagcaatctgagctcttgcagcaacctgagcttcctctctcacaacaccagcacgaaccaaaaactcctccaaagttacttcacctaatgtttgctgcctctgactctgactctgactctgagcctgagccacctgagacaagttacttccccctactccactacttccaactttggatagatctttccaaacttgatcaaccgtcttctgactaagcgttcgaggcagagtcaacgagccttgcctctgcagctgcaaaccctcttgacctccaccaagaactggaaccacaccactagccatggcttgtgtttcttcagcactccatatattctttaacaactcatccatgttcattgacccaaaatctttccctacactgctctgaaactcatcaaacgtcaacgagtatatcgaaccttgtctagtcaaccctccacctccaccaccatctcctggtggctcattccccaaattcatactaccatccatttttctacaaaatctgcttccacctaataactggatctgaaccatgaatacaaaaaaaaatccaaactttagtttaaaaatccaaactttagtatcagaaccctaatctataaataaaaatcaagaaatctgcaaaacccaattcaaaaacactaacagatttcaaaactttaatagtcaaatggataaaaacagattaaaccaacaggagaatatgaatgcgtttatgacaagtattaggcacaattagtaattttatccaaaaattaagtgtggacataaatggaaagaattaaaagaagatgaacaaaaaccacagtttcttctatacacacaaagagaagaaaaatctattacctttttgctaaattcgtgtgctttgtaattttcccaaaaaatttcaaaatgtttggttcttcgtttgggtgattaggtagtttgtctggtgagccaagtgtctctctgtctcctaacaatcttgaataaatactacttttgctaattattttaataaaatggtatatactctgtatctttgtattttgcgtcactttccctcttcctttttattttactaatttcacttactagttgttttccttttcaggataataatttcactcctaacaattgtgctaattaaccaattaatatttatttgtttaggtacacatggttgcggtggttggagaacaaaatgggtttgtagattagacaacttcttatttatcattcacaaaattataatttgtagtggtatatacaaaaaaaaaagaaaaaaaaactctatatacaaaataattcatatagttcttacataaaaaattggtattatatatgggtatagtcctaaaacttctaagaaagtttacgtatcaaaatagattaaagtttaccaatcaaaatgttcgttaaaaaagaaaatattggtataattccaaattttaatccgatttatccacaatatccattcaaaaccttaattctttttttaaaaatcagctaatattttatttccccggtgaattgaaaacgcttctccatcctgaagtgacaaaggtccaataatcaatcacctgagtttgttatttatgatcggtccacttacttctttagtcctctgattacaaaagtttttaaaaagaaaaaagtagttgtaacgaaataacgtgtcgctccattactgtcacaaccaacaaaaacaaaaacacgaaccaacctcgatgagacagacacataatgaaaccaaatctcagccgttgattgtcgatgtaacgtggacgaacactattatttgctttcacatcgactttgtgttttgtgggggaagatgtcagaaaccaaagagtcttcttactttttttccattggtccacgtctctaatttttagttgagctcaccttcacattatcaaacccatcttattattttttacgtttaaaaattaaatacaaggacaataatactctcaattcactaattatagtagtgtttttttttttctgctaaagtacatcattgactctagcatatagtttaataagttttgaatttgcttggaaaaattctttaagaatattctcttaacacaaaattatatatacttatgttttaactggttgctttgcacacaaaaaatggttttaactggttgctaatagaatattaaagccctgctcacaagtgtgtactggttctctctacctctgcacataagttcaatgtaacagatatcatcatataaacgctaaagatttcaagataatgaacatattaaagacttgtgatggttctaattcctcatatctcctgcggaaaccatattttctagaaagttccattcgtatttccaactcaaagaaaaacagtgactggatcttctgtgtctgagttctcactccaaaaccttgtagtggatccgagtctacgagcatttgagtttgagaatctacataaggcttcattcatctgttctgcctacgtttgcgaaaatgtctgaggatgaaactgtctgcatacagaggatacttcttttttataagaccttttatgcatttccaatacgaaaagtcgactacttctccatcttttcgaactataaacatacatcgagagctctcaaaatccgggtgatgccctacctgcaaccacaaacccgaaacaatcaacatatcatctctatctttgacatgtaaaacatgaaaatcaattatatatgttgatcatactaacacaaagaaaacatgtaagaatctgtgacctgtttccactatgaagaatgtggaagttgaaacaaagccaagaaaagattgagaatgcagacaaacattcgaaaatgaaaatgtaaaacctatgcctgatttgtgaaaggatgaccataatgtccacataggctaatgttgtttccaaatctcgaaagcatgatacataccataatatagtctataccacatccgatcttcttctcacattcaggatgataaggaagtagcatctcaataattgttctctcatgctcggggcttagcctatctcggtttgcatatctgcaattcaaaatgcaacacagagctaccaatgaatcaaaagtataattctctgaatatacaagcacaacattcaaaaatcttctttgccatatcacatcttaatccatactgaaagcaactaatctctttagactcattcataaagcaaatcaagaaaaaagcttctagttatgacttatactgactcagaagaaccaaatcccagggtaagaa

SEQ ID NO: 31202 - DNA, 1159 bp, Arabidopsis thaliana landsberg
atatcgaggcgtcctagtccaccccggtcaactacaccgactcccactctttcaggactagccacaccaaaatttgtagtggatgatactaagagaaccaatgataacctaagccaagaggtcgttaagctaagatctcaggtatatttctcttatctccaaaatccttcccacattctttgctgcaaaaagatgtagttggtgagattatgctttgtttcctgtcacggccaagtacgttctggattttactttgtggtgaaatcatgctatttgtaggattggagaaggcttggccgccaatttacttgtgttccttatgaaacatttacttctttttgaaatttaaatactgcttcagttagtcagtttctctctatgattgcttctttgctaaccagtaattgatattacaaggttgaaagtcttacaaggaaggcccagcttcaagaagttgttctggaaagaacaaccaagcagctaaaagaggcgttggcaatagctaatgaagaaacgacaagatgcaaggcagcaaaagaagtgatcaaatcacttaccgctcaagtaatttcctagtttaaaataaaaatatggtttatgcaattattggtgatttcttatactgattttaacacatcaacataactatgcagttaaaagacatggccgaaagattacccgttggatcagctcggactgtgaagtctcctccttctcttaactcatttggttccagccctggtcgcattgacccttttaatatcttaaaccaagcaaatagccaagaatccgagccaaatggcatcacgaccccaatgttttctaatgggaccatgacacctgcatttgggaatggtgaagcaacgaatgaagcacggaacgagaaggaatgggttgaacaagatgaacctggtgtctatatcactcttacagccttagccggaggtgctagagatctcaaacgcgtccgtttcaggtataatagtttcttatctaccctaaaaagaaacaatcagtttttttatgtctgaagattggactgaaattactgttttgttttctgacagacgaaaaaagttttagtgagatacaagcagaacagtggtgggcagaataacagagggagagtctatgaacaatacaatgttcgcatggttga

SEQ ID NO: 31203 - DNA, 2774 bp, Arabidopsis thaliana landsberg
  unsure (1)..(2774): unsure at all n locations
aaactttatttagaaagaattataatagactctcataaaaaaacttgtacaagatacatttttctatatataaatgagattaatctaattttctaatgtaaggtaaagataaaagtaaataatatatttagaaataattgtaaatattcataaactaagatatgacaatcttctagatccttctagatcttcatgattttcatagtcttggacaatcatctcgaccgtccatctccagttctcccaataggtataaaggaaatcatgctttcaagagcgaaaggatcatgtgacgtcccctaggcaacctccaagaaccttgatgaacaacttgggatacataagcaagaaaaaagaatacctgaccctcgtggacttgcgtcacccataaggtttgattaatatggcccaagagagttccaatttttgtgtctgaacagagcctcagaaccacataccagctgataggcatgaactatttctatatccagctcccacccacaaaaatcagcttctcaaagtctttcagcttttatataaaaacattaattttatattttaatatattctatatgtattttttggtttgaggctttaacatgtgcattgtttattctgaggtgttttcctttatattgagtgttgaactcatttgttgtagatgtaactttctcagagagatgaacttttttttttttaactcgtaagattctgatcatacaaggaaagagattgtttagctaaagaatcagcctccatacaaggaaagatgaacttattttctattttaaagcataccgttgtttaagtttggttaattcattctagacagaccaaattttggtgttaaacctacttctttttggctggatcgaaccatgcattagttctattgccggtaagcaaaaatatccaagactagtgtagtgttgtaggacaacattagaggtgaatgaaattttatatgaaaattatatatttacttgaaaatatatttcgaatgtttaaaaataagttctgaatgataaagaagttaaggaatcccacttttttaatgcgtaaaaggtatcatatgttgatatactgaagaacaaagggacatgtgactcttgccttccttacttatatgtatgtccaatagccaccatatatattttgaagctttttcattcttctctttttcgtggaatttaagacaaggaccatcaaattttgattcttatcaaaacgtctgcacattttatattaccgaagatgaacctggtcgatgttttggacctaattaaaagacattgaaattaagaataacttgtgccatgtgttaaacaagttgctcgatatattctatgtttcattagcacacactagggattggaaaaaactacattttaaaatggaggcattacccctaattacaaaaaaaaaacacaagttataaactccggcattagtaatttaaccttttgtttaaaaaaccgtttgagtgagttaaacaagttgtggactcgaggctcagcgatagaatgtggattactcacaagaatatctacttgatgcggtttcgacctgatgaaactatatattagcactaataatcacaactaatggtatgtatgccactcatttaatagttgactgataatataaaccaatctagattcgaccacccagagatcttgtatagatgtacgtatgttttgtagaatcaaattttctgtctcgtgaagagacagaaggaaaagaagtactaattctcttgtcacaactcttaaacccaagttcacgtccaggttcaaacactctcccctcacactaacgtacatgagattctttagttctcgctataaattagaatgtcacccatcctatcttcctcaaacaaaaatagatctaagatcttatatacctacattctaaccatacaagaaatatttatgttcatggtggtaactagcaacaacacaataataattcgactagatgtcctctagagttctcctgaacacttcattggaaatttgttattcagtaagctaacagttaattccactgaagtgtttgggggaactcccgatgtcatttggtgatgccaagccatgtatgtaaaatggtaactttatactctctctactaccaactatattgttttgaatatacttttctttttgttttaattattaatttgattaaacgatccacaaaaatgagtgatcggaaaaattcgctctaacatcggaatggttagaaaaatgatcggaaaagatgaaaatcacaaaacaactcaaattaacaaattacaggttaagaggatcgaggttgtatatactttttagtttgtataaacgattgtattatctttaaactcaatttaaagcacacatacattttgtttataaacatgaaacaaaataatattaattaaaataaatctttaactttctaatgaaaagattaatctctagttttattacattttttggatgtttagaaaagctatggacttttgatcctcataatcttaagtaacctcttatcaattctgtttccatatcatcttgcaatgtattaattgtcaatttgattagttcttcaatttggctgcatccataaggattaaattcagttacctattaatatatgtgttgttttattgtttaattatgactcatctttccttcaaaaaaataaatctatagcaatatccccttcttatgaacttgggtaggaacttagatttctttactttntatcatggtatctacgtacatgacatg

SEQ ID NO: 31204 - DNA, 2963 bp, Arabidopsis thaliana landsberg
catatagcacttaatctgcagaagcacaatacattagatgaaaatcaaaccacataatagtaatgcatatattgtggagaaataggattacctgtgcctcagagaagttaatcccaggggttgtagctaggccagcaagatcgtgttccatgtattcaaatataagatacatacttcctgatactcttgaagtgatcgaaccctcaagcttcataacattaggatggtcaagccttcgaaggatgattatttctctagccatgaaccgaacactgtcgggatccatattagcaaaccgcactttcttcagtgcaactaattggttcgtctctaggtcccgggctttgtacacaatgctatccgtcccttgtccaatctaacagtaacaatccaacaatgtacaacttagacaagacaatcaatcaaaaatcatctcaatagttataatgaacaaaaagaacttaccttttccaacttctcgaaagaatcagcctttcgtggaatccatccattgatagcttcgccagcaacagaagctaaccatgaaggccaaccagccataacctgagctcctctttctccattactaacactgcatattctagtcatcttaggttgctgcaatgtccctatgttgttggcaccaacctcaataccggtgggccgtctctgaaacaccaatctagaagactttctctcgagattcaccttcttctcggactcatcatccttggcatcaatgggtatcaacaacgtcaaggaggcttctttattgtcgttgcttcgttcctcgaatcctacattgttgtctttgctcgaagaagcagattttgattttttcttcttcttgggggttttcttaggcttgcttcttctctccttgacattgacattgctgacaatgctgttgctgttatcgacgttatcattatcaggccgtgttcctttggtgcaattgcagcccataattctccacggcttcgtgattccgtcaatgctccacagtttcctgaccggaatcaggaaactgtatgttttgattagcttcctaatctttccttttttcttcttctccactgaaaatgaaatcttcccacccacaccaccaacaaagaacaaagatttgagcttttgatctttagaccttgttggaacttgttggattagacgctaatcttaaaatcaaatgggagacaaaaaaaaaaagagaggagctttttctgtagatgtaacgaaactggaaaatttgaggtcaacaagactgatctcgaaatatggattaaatatgtgtctcaatgtttttgtatgaagaaaacgaattgaaatcaaagaatcaaaggaagacttgtgggtcagtagagagaaagagatatgctgagattaatggagagagagagagagagagagagagagagagagagagagagagagagagagattctctataacatttgcagtcgacatggattctaatgcatcaaaagtcatctccaataaacaaacacttgaaactcacatggctaatagaacaagatcaaagccttaagtattaagcattacagacactactggctaacttttgacacatgttcttaagtaacatagtatcaatatccgtgaatcacatcgaacacacacaacaagggcttaatgcatcaaagtcctgttatttccatataacaacatatttcatttacaaacagaatgcagcattcaggcagtccaaatggaaaggttgacaaaaaaatataatcttgtaactctacatatatggcagaatgtaataaccaggcaagaaaaaaacagaataaacagatcaatgagtatgatataaaaaaaagtcacaaagaatgtgccacagtgaacaagagggccatgagaagaaattttcaaagaaaatattagcattgttagaattttttgggtcaatggatctgtcagctgcttagttggaaaacacaaatcttacaggaaggaaagtccaagaaaaagaaaataagcaaagttaatagccaccacaagaaatttcatacagaaataattaaatcgttgcacttatcttcttattcaaactaaaatcaagagaacttaataattttcagccacacgaaccatgtgttcaaagccaaaggtgagaagccaaaattatcagcttatctccattaacaagagaaaagcaagactagatttaagagttctctgtaactaaaaactgcaggagtgagtaagtaaataattcaccaacaggaaaacaaaactcaattatttatagctgaatacacatgtaaatgagaatttattaactaaaacatcttcctttgtaactgatgtgacatttacaatttttcattttgaggtgtaagaaccgtgtgacaagtgaaaaggttaaaataagcaacctttgtgatattttctctccactttttgaaattgggtctccaaaccacagccaatcaatattctttataaatacaaacacacaaacagcatctttctctcaaacacaaacatatcttctatcaaacaccaacagctctattctctacctcatttctcatcataacaaagagagagaaaaaaactatggaattgacactgaattcctcgagttctcttatcaaacgtaaagatgccaagagttctagaaaccaagaaagttcctccaacaacatgacctttgcgaagatgaagccgccaacatatcaattccaagcaaagaactcggttaaggaaatgaagttcactcacgagaagaccttcacgccagaaggtgaaacccttgagaaatgggagaagctccacgttctctcatacccacactccaagaacgacgctagcgttccggtgttcgtcatgttaccgctcgacacagtaacaatgtcagggcatttgaacaaaccacgagccatgaacgctagtttgatggccctgaaaggagctggtgtggaaggtgtgatggtgga

SEQ ID NO: 31205 - DNA, 1336 bp, Arabidopsis thaliana landsberg
tataaaaaaaaaaaaatcattagcaatcattcgattcggcttgcaataatctaaatggaccattttatcacttctctattaagcaactctacagtgtttaattttaaattaagaatttaattatctatatcgtctcttctttagttaggaagtggataagataaagtctaatccaaattaaatcattaatacaaataaagttaagacaaatatttaatttaaataaataatcagaagaagagtgatgatagtgattcttcacgcgcctctctctcttcttcgtcctctacaaaaacacttgtctctcttctacacattgttcttcacgaacctctctgtatcatcttcatcttcttctcccgtaaagctctcgcgtctatggcggtcaaatgtttctctctttatctgattctggcggcgattgtaatcggcggcgtcacctccgagtacatagagtacaacacaaaaccgagaatcgtccctgagaaaatcaatgttcacttagttcctcactcacacgacgatgtaggttggcttaagaccgttgatcagtactacgtaggctccaataactccattagggtactctccctcttcacacatctctctctctgtctctttccatggattctttagggatttgatttttgttctcaatttgatttgaatcagggagcttgtgttcagaatgtattggattctgtaatcgcttcattgcttgatgatgaaaatagaaagtttatttatgttgaaatggtaagattcagatattaccaaatccggagttttcttttgtcttgcttgatgaaattagtattgttcttaggctttctttcaagatggtggagggcacaaagcaatgctaagaaagttaaagtcaagaagcttgttgactctggtcaacttgagttcatgtgagtttgatttttctcttaccttttttgttttgatgacttgtgtgtatctgtttgtgttgatatgtggtttttgtagaaatggtggaatgtgtatgcatgatgaggcaactccacattatattgacatgattgatcagactacattaggccatcagtttattaaaactgagtttggtcaggttcctagagttggttggcagattgatccctttggacattctgcagtacaagcttacctgcttggtgctgaggtataatttgttcatcgtttttgatcctttcgtttcatagtgagtttagatgagttcagtatgtgaatgattagcttatatcagctctaagttattttgatcggacaacccttcggtttcttctacagtttggctctgattcgctgtttttcgctagaattgactacc

SEQ ID NO: 31206 - DNA, 2120 bp, Arabidopsis thaliana landsberg
agctttcaattctttcaagaacaattatctccttgtctattcgctcatgatgggtacaatggccttcccttctctcttcatctttccctttgtttgtctagttatgtctgtcaaaacttatttatatcctgtttcgatccgatctggttgttgggaagatgttgttaattagtgggtttggttggagatttagatcctctctgattttcttgccaagttttgtcttttatatagagttccatatcacactagaactttaggattttcaataagaagaaaatgttactacattactttgagtacgcgattagtaactaaagtttcaaactttataacattaaaagatccgtctggacttgctaactgactgttttgtgattgcagcgggtgattggttgcagggtccatatgtgtactatctttatagtacttatggatttggtaaaggggacattggacagcttttcattgctggttttggttcctctatgttgtttggtaccatcgttgggtctctagccgacaaacagtgagcattctctcgtatgcttttaagtaatatggaaatcttaactcttttagtaatgttgcataatggtgttctgtatcaggggtcgtaagagggcatgtgttacctattgtattacctatatattgagctgcatcaccaagcattctcctcaatataaggttttgatggtaggccgtgtcttgggaggcattgctacttcccttctgttttcgtcatttgaatcatggctagttgctgagcacaataaggtaaagaaaggtttatgctgtattaagctcttaagctgccatgtttatttataaacttagtgtttttattcgtgatgtatgcagaggggctttgagcagcaatggctgtctgtgacattttcaaaggcagtgttttttggcaacggtctcgttgcaattatcgctggattgtttgggaacctgcttgttgataccttctctcttgggcctgttgcgccatttgacgctgctgcatgctttcttgctattggaatggctgtcattctatcatcatggacagaaaactatggagatccatcagaaaacaaggacttgcttacccagttcagaggtgctgcagtggccattgcctctggtgagtagaaaatcttgttgccccttttagattttacttcctgttttgcttctctgtctattgtgatggttctgtgttttgtttctcattgtcctcattgaagaatgtatgatggtaacaaaatttttgtatcttttatcagatgagaagatagcactattgggtgctatccagtcgctctttgaaggatctatgtatacttttgtattcctctggactcctgctctaagtccgaacgatgaggagattccccatggtttcatttttgcaacatttatgctagcttcgatgctaggcagttcccttgcatctcgtctgttgtctcgttcaactcccaaagtagagagctacatgcagattgttttcctagtttccggtgctgcactattgcttccaatattaatgactgtaagttaaataaagcttcttgtgaatcctactttgcgtgctttggtactgactttactttaattctgtgagtgattaattgtttgcaaccggatgtgtgactcagttgttcatagcaccttccaaggtgaaaggtggaggaatctctttctcgggttgctttcagctccttgggttctgtatattcgaggcgtgtgtaggactgttttggccatccataatgaagatgagatcccaatacatcccagaagaagccagaagcacaataatgaactttttccgcattcctctgaatatctttgtctgcgttgtattgtacaatgtaagtccccccaacattctttttctgcaccatagtagctgagatttcgtgtcccatgtctctgtgttgtggtactgactagttttatgtgctctgaaggtaaatgcattccctatcacggtcatgtttggaatgtgctcgatcttcctctttgttgcaagtctcctacaaaggcggctcatgatgattgttgacaaaccaagtatgttgtctctatgtccatttggctcagggttatctatttgctctagcacg

SEQ ID NO: 31207 - DNA, 1193 bp, Arabidopsis thaliana landsberg
tcaaactaatgatgtcatcagctccagataatatcttcaaaatctttagaaactagaaagtaaaatgtttcgccttaagaactcactctcgcgaaaactcctaaaaaaagttcaacaatagttaagtgatcttggtgagctaagcttttatctccaagtaagtttcaatatctatcttatgctcttctgacttttgcctcaagctagcaaatttgattttgtgggaacgtcttcttttttttgaatatttagaaaccctattagttgtgtaaaagacaaaacatttttactcatgtctttgattttcaggttgtagtaactcaacggtattgaaaaagatggattttggtaggtctagagatataatcagcggtttaccagattctcttctttgccacatcttgtctttccttaacaccaaagaagctgcttctacatcggttctagcaaaaaaatggcggtatctctttgcttctgttcctaatcttgatttcgatgactctgttcatctacgtcttggaaaaaggaatcctgcagttagtggtgaggattatttgaaaatgattaatgaaagaagtgatcagctttcgacaagttttatggattttgtagatcaagtgttgagattgcaagacaattctcctctacacaagttctctctaaagatcagagattgtgttgatatagtccgtatcatttgttggatactcaaggttttggaacgcggtgtatctgatcttgaactagacatgcatttgaaatggaaatcttcacttccttcaaagatctttttgagtgagacactcgttaggctgaagctaagtgtggaacgtggcccgttcattgatgttgaagatgttcatcttcctaagcttaagactctccatattgtgtcagtcaaatttgaaaagcatggtattgggcttaaccagcttctttctggttgtcacatacttgaggagttaaatcttgaatatatatcttggtgcctatgggattttgtctctgtgtctctcacaactctcaagaggctaactttttgtggggaagtaatgcaagatgagaatccaataagtgtgtcttttaatactccgaaccttgtctacttgatgtttactgatgctattgcggacgagtattcaacagtgaacttcgattcgcttggtgaagctcatatcaatcttcagatgtca

SEQ ID NO: 31208 - DNA, 2089 bp, Arabidopsis thaliana landsberg
gacatcaacgataagtacattatcagctgatgtgcaatcacgcgatgtaagacatattccatctaaatctaaaacacggtctattttgacattctagcattcacatgttaatttgtgaagacgtaacgaactaattaatatatatcatgtgcaacgtttcttcatatttttcgtacgtattcaattttagaccgaattaaatacagaaaatggtacgtattcaatcgttgttgaaataaatgtgcttgggtcgttttcaatgcatgcaattaatttctagcatctatatatatgtgcaagattaggttctttaatagaatttagcttaatgagtttaacaaaaccatttgatttccttctctctttttgtttccgagctcctacaccctctctaacctttgattcttatccttctcttgagtcttgatcaccaccaaattattctcgcaatttgaccatatgacctttcaaaatggttaaacttcgaatttttttaccttctttatctccttttgagtctatgtaaatcaccatcccttaaggtattttgagccaaaaatcttttaggaaaaaatcacttagacttttatgaatcaaaaccaaagaatttttacgatttggccaaattgtaagctttttcaacctatataatcacttcctttgatcattgctaatgtaaaatcacataggatatagcatatagggggaacatcaactaaatttctacgatatagggacctataaatcttgtttttttacaagtagcaaaactaggtttgatatatgttaatttttaaggttttaaaccatgatttaggtatagtttttagagtccttttgttatttgtagagtcttttctagtctttttcaggtccttacatgtttgagatgcatttggagattatggagcattctggagcaaaaccgtgtaaatattctgcaagaacaatccggtgatctataacaatacctaattcgtggttataaaaccgttataatcaatggaatatcaaagtttatacaataactttaacatagatgttgtgttctagaatcgtaattctttcttaaagtgtgtatttcgataggaacccttaaagttcattaactaatggtgctatgcatttgttaacattttcaatattgctatacaataaagttatgtcctagcatcataattatttataacaacgtctttcgttacaaaatctcattaacttatggtgctacatgcattggtcaccaacacttattttttcttttcgaagataaacaaccacaaaagttcacattcactaacacaccagatcagacagataaacaaaaacaaacaaaccctcgcatatcgtaaacggttcctattagttttaagtccctcttatgatctttctacttttattcacatgccaatttagtatcaaaggtgctcagggaaatggcaaacgcttgaaaggcagagagaggataacgatagtccatagtgaacatatccttacccactttcccaaagtgtagtattatcttatcatggtttgattgctctggctgctgtggtgataacgatggcctcgtagccaatgctccaccatcactaccactaccgggctgaaccgttgcagcggacatcaactggaagttcttgacagaagctacagtcactctccctttgaagttaaggcaccaacatcgcaacggttggagccaccttggcggtttagttttcagtaccaaaggtcgcacctttccttcttcctctttcggtcgggtgaaatctcccgagtggttgactatctttgaggaaccgatgctgcggaaagattcatcaagggaacgttgtagaaactcaggttggctagggacagtacctccgggttctagagctaaggaggggatagagtgcataatgcagttcattctacgaggtccacgggttccaagcaagttcagctcgtatgtaacttgagcaatgttgtaacttccagaagggactttgggagacactttcttggagttgaactacgactccggtttggtggggacaatatctggctactgttgtacgcaggagccgtatcatactctataaat

SEQ ID NO: 31209 - DNA, 2095 bp, Arabidopsis thaliana landsberg
  unsure (1)..(2095): unsure at all n locations
gaggtaaactgtatggtcggcaatgcaacagattttatagttggactccgcaatgttcgggttctctacttatctcccgaaactctcgaggtttgtattccactctcatctttcttctaatctttctcattctatgctattttgtataaggatttgagtcaatgattgcatctgagtgatgatgatatctagttgatcatgagatggttttggtttcaggtactcacatattgttgcaaacaaataccgatattcgaaaacttgagtcatttaactatcaagagtgacccaaatgttggatggaaaacattaacaaagctgcttaagaattctccaaaactcgaaactctcgtcttccaagtatgaactaaaaccctttaaagcatacaaacacaaagattaatgcaacttaacgttgaaacctttcccttttatgtttcagggactccttcacagagataacaaggaggacgtcgctatatcatcaagttcagtgaaagtgttaaaaatattccttagtggtgacaaattaaaaaagcaaatagagaaggtcaagcactttttgaaaacaatgcctcgtcttgaacaactggttttctactatgatgtaaaagtgtatcgcaacttcacatgcttagtaggtagcttcaccaaagtgcaagatccacctaatccctagtcgcgaaagcgtatgatcgaccgttccgacttcggtactcatgacgaaatgaggtcctcttctttgattatggtttatggctatatgtggtcatatatatcaaagccgtatatggatgtctctacaatacaaaacaagttctttggagcaccttcatccattattgacaagtggatgaagagtatcttcacaatagtatattattatttctataataaataaataattaaattttttttttaaaaaaaattaagccattaacaaaatgagaagtgggtgaaaagtttcttgtaaaagaaatagttgcacgggaaaaacaaaactaaatttgagattgagacctaccttgtcattgccatgtaagttacttcaaaaaaaacaatcaccattcgttttcttcgacgagaaactatggtctgatcacaatatttgatggataatgatcactttcttattgaacatatggacgattgtaaagtagaaaatttacatcaaaataacttaatcttggtgaagtatctgactgatcaacagtttatatgtcaaatctctagacagcttgtttccttacacaaatgtgctttaatgttgagagttttactactattgttgtatcggagctaattcataaacaccacaattaccgtttagatatctgcaatattataacatgagttatttgacctcttaaattaattttttgaatgattagaaaaatatcttatcgaatcatttcaaccccaaatcaaaacaaaaccttattctctttactcgctttaacccaaacacaaatcaaccatactcgtagtagtaatttaagcataactaagaagctgcttttgtccctaatcttgctttcgatgactcggtttatctgaatcctagggaagagaaaaagattcttattactcctagagatctcatggaaatgatggatgaaagagagaataagatttctacaagttttatggattttgtggatagagtattggcattgcaaggcaattctcctgagtaaacatagaaggcgatggatacataaaagtttcaagctttttgtgaatagattaatggctttgcaaggaaatgctccgttaaacagattctctctcaagtgtaaagttcgctgtgattcagcttgcgttgatggttggattatcaatgtattggatcgtggtgttttagatcttgatctaaacatctcttcggaaagtgattataagctgccttcagaggtcttcttgaacaagacattggttaggctgaaactaggaggtaaagatgagttcatcattgatgtggaagaagtttttcctccgaagcttaagactttgtatcttcatggtttcgtttgtttcgaagatagtggtgttgcgtgtgccaagctaatttntggttgtcctgtgcatgaggagt

SEQ ID NO: 31210 - DNA, 629 bp, Arabidopsis thaliana landsberg
aaacacttaaactaaatgtagatgataaaaagcgtgtgaagaagttgaaatctaagaaactagaagctgaggaagagctcaataatgttcaagaaatcgatgcacatgatatagtaatggagcagaagagcgataagaagcgtgggaagaaggtgaaatctaagaaagcagaagctgaggagcatgaagaagagcttaagaggcttcaagaaaaggtgagtcatctatgaaacatgtttggttgcgatattgtaatgatatattagtggaaagttgagttttttttttaactttacggatttttttgttccgcaggatcctgatttttttcagtatatgaaagagcatgatgcagagcttctaaagtttgatgctactgaaattgaggtgagttttgttagtttgtatatgttgagtttgtgactcgacttccagttgtgttggaagctttttgtcttagggattcacattttgtaggatgatgctgatgttgaacctgatactgacctggaagacactgaaaaggaaggtgatgatgaagcaacaaagatggaaattgcaaagaaagtgcacgtgcagaaaacgattacagcatcgatggtttgatgcattggagtaaaatcaaatcg

SEQ ID NO: 31211 - DNA, 5962 bp, Arabidopsis thaliana landsberg
  unsure (1)..(5962): unsure at all n locations
aacaaaaagggtattttttgtgttcttctaccaaattactttaaacaatatccaatatggtaagcatggaaacaagattctgtaggaacctagtagaaaaatatactagtttcactccttaaccagagcattgaaccgagcttttcgggaatatagtgattgaaatttgaaccacagcaaaaaaaacggatagaatccacaactactcacctttgcatatattctacgtatggtaatggaggactatgtgcgtttttttttgtatgtgtgtaatattggtagagaggtctatctcaatgactattccattttaatttatggggctccagttggtgggcgatgtagatttgtcccatcgacgcttttcgaccatatgagcgcgtgccttgactcttcctgttctcgttgattttgtatgtatacgcttgtaagtatttagaaatgttttgattcctagcctgtatcgatccaacggtcgagctagccgcatgcaacccgacgtgaattagataatgctcataatccgtagtaggtttgcgggaaattgttgtcaaggactcatgttggtttggtatagaggaacatccatcatataatcatttcgagtgtaattctacatttctacctaatattttaccaaagtcgttaactcaaccagggaatttttggttatccgaaaagaagagttttaaagatcccgaggtcgagtattagtaacgtggaagtgactatgaatttcgatacaaaaacttttgctacttaaaaacaaaaataaaataattaaacaaatcgagattaagaaagaaacaaatatccgtgaaaacaaaagaaacaccgacaccgttaggtgagtagaaaactctttcaaagcactaagtgttgatataatataatatcacaaaagcatcaatcagttgatcgcaaatagacatttgcgattctataatagaaatgaataaaggtatattagttactatatttgctataatgaacttcttatgaaaactaaaacaaatttttagtgatgcagtcgttatatatgcgcattacacctccaagaatactcaaatacatcgaccatgtgcatattatatcgttagagacttagagccatcgacacattttgtttgtttgtggtccttttgaatactacattttcaattaaatatgactataatattacagctatcaggcataatatatattgaaattgacacatacatatatatagttttatacagaactcatgacatttttattcttaaatagctccttctatataataatttatagagccttccacatctcctttgttcccttaacaaactctaaaccaaaaaaaaaaaaaaactatgggttacgacaggctcggtccatccggaccatcaaacccgaaccagaaggaccctgccacgtcactcccggaactacagaagaaaactaaaacgaagctgattctcttcactttggccgttttggtagttggagtagtctgcttcggtatctttgccggcatccgagccgtagactcgggtaaaaccgagccgaaactaacccgtaaaccgacccaagcaatctcccgaacctgtagcaaatccttatacccgaacctatgcatcgacacacttcttgactttccgggatctttaaccgccgacgagaacgagctcattcacatatcattcaacgcaacgcttcaaaaattcagcaaagctctttatacttcttcgacgatcacatacactcagatgcccccacgtgtacggtcagcttacgattcttgccttgagttacttgatgattcagtggacgcgctcacacgcgctctttcctccgtcgttgtcgtctccggagatgagtctcattccgatgtgatgacgtggcttagctctgcgatgactaaccacgacacttgcactgacggattcgatgaaattgaaggtcaaggaggagaagtgaaggatcaagtgatcggagcggttaaagatttgtcggagatggtgagtaattgtttggctatattcgccggaaaagttaaggatttatctggagttccggtggtgaataataggaagttacttgggactgaagaaacagaggaattaccgaattggttgaagagagaagacagagagcttcttggtactccaacgtcggcgattcaagctgatatcacggtgtcgaaagacggtagcggaacgtttaagacgatcgcggaggcgatcaagaaagccccggagcatagtagccgacgattcgtcatctacgttaaagcaggaagatacgaagaagagaatctgaaagttggtaggaagaagacaaacttgatgttcatcggggacggcaagggtaaaacggtcataaccggtgggaaaagtatcgccgatgatctaactacttttcacaccgccactttcggtatcaaaattgatctttttgttctgtttttcttttaaagattcttcattattgagttatttatgtatatttgttttattgtagctgcgactggtgctggatttatagtgagggacatgacgtttgagaattacgccggaccggctaagcatcaggccgtggcactccgtgttggtggagaccacgcggtggtttaccgttgcaacattatcggttaccaagacgcgctttacgtacattctaaccgacagtttttccgcgaatgcgaaatttatggaacggtcgattttatattcgggaatgcggctgtgatcttacagagttgtaacatttatgcgcgtaaaccaatggctcagcagaagattactattacggctcagaaccgaaaagatccgaatcagaatacggggatttcgattcatgcttgtaagctactagcaacaccggatcttgaagcctctaagggtagttatccgacgtatctcggccgtccgtggaagttgtattctagagttgtgtacatgatgtcggatatgggtgaccatattgacccgcgaggatggttggagtggaatggtccgtttgcattggactcgttgtactatggtgagtatatgaacaaagggttgggttcaggaattggtcaacgagtcaaatggcctggttatcatgttattacctcaacggtagaggctagtaagtttacggtggctcagttcatttctggttcttcgtggttgccatccaccggtgtgtccttcttctccgggttgtcacaatagattgtctcagccttgtatgttacgtatacgaatgattttatgtacaaactcaagatctgtaatatagtccataagccattttaagtgtacttattatatgacaggacatcttcttgaatgaaataaagatatgatttgaatatgttactgtattagatctttgctcagatcttaccatgtgaatatatacatttatggaaatattcaatctttggaagttattgcaacttttgtgaccttctgcacatttctggcaaatggaacaactctttttacttctctaaatacacttttgaatgtaaagaagctatctggattctggaccaaaacaacacacaagcccgaaacaaaatcgaattgaataaatcgaacgaacaccttaagataggtttgaagggttggctgatttgattcagctactacacatagaggttatgcaaacaccagaatctgaattctgtggctctttccagattcttccagtgactctaagtttcagttctttcttgtctccaccgggaaagaagagtgccatgtttctttggattataagaccgtcatgactgtctctgactttcctgtgactatctctgacacttcttggtgtcccttcccatgtctgttttctcccactgcctccaacttctaaactgtatgtatagtttcgtgcgtcatcttcatcgcccatgaatctcagaaacgccatgtaaactggagccataccgagctgaaacgcttcaaaatgaagacaaaagtattgaccaaaacattgaaacacctacaaaacaatataacaaagaaccccctcagaatctcagacaactgaagaactcgtaaatcataaacaagaacaatgctaaccgttagcatccaagtagcgttctctacttcgcgtggattagatttaacataacgatgattaaacgtacatccagtatgcatatcgactttatgatcatctcttaaatgagcaacaaggaaagtaatgtcacctacagcagcacactccgagccagcatatggacaactataaggtctaaagttacattgagactcatgctttagtttactgtaataagggaaaatcccaaggcatccaagattgtaatacttgcacggtaactcaagcgactcagctactttctcaagagctaaacatctaatatctccaagctcttgtctacacgttggacaccgattatgcactcttgatttacaggttgaacataaagtatgtccattatgacactacaaaagaagaaactttttcactcatacatatatcaaaacatccataaaccctcaagaaactcaatagtaacataccatagcaatgataaacaaatcagatcatttgaagataacgatcataaaaattggaactttatattcgtaagaagcaataagatctttctcaaccctccaatgttaggagatgatgagatacgaacctgatggattggtgggtacattgaattggtgcagacagggcattcaaggagctcgtaaacgcttgtagccggagagattaccacggtggctcctccctgagacttggttgatgagaattggtgtttttgatggatctcatcgtcatcgatcacggaatcgatactatctgtttccattaacaccaaaattttcgaaaatcaaaaagtcctaattttaaaaattgggacttttctctgtcgggaaaataaaaattctttcttttcacgcagatcaaaagagcaagaacgagagagaaaagggaagctggaatttccctcctttctctctgtctctctctcactgggtttcgccaaaattgtgcttttcttcgttggctttgtttcatctttttttgttcttccagagaagaagtttgaggaattaattatacccgtccagatttaaagctttttggttggattttaatccgacggttattagaatctgacacatgggtgtttgaattttcctaataagattatttgttacaagagcgttttcttgttgaatactttgaattataagatacatcaatgaaaagatggacattgcatacgataaaaagtttgttacatcatcatttatcaagttgtgcaagttgtgcatccttgtgttttcttatccaactttgtttttctttccttcannnnnnnnnnnnnnnnnntaaatattacgcatacaaagatacattcaccacattttctgatgatgatgatgatgatgatggtggtgatcattacatacttgctacaacagatggaatctctgcctccacttcagtttctccatccgatccctcctttgtcgtctgcaacaattaagccaagcaattcagataatgaggttatcaaacaaaccagacagttgttatcggttaagtaaaagctcggtttttacctgtggggaatctttggaattggtttcagagagataccgagccaatgctcctttaccacggagaatcttagctccagagcctcgacgcccttctccttcaactgcttcttcatccaccacaaccgcttctatcatatcgctgcctgtaccctcgtccggaatctgagaaaaacaaatgttttgcagaaatgtgaaaagagtttgaatgcggatttttagcaaaacggatttgaaagtaataagaggtgtatttacctcgtacatagagtccatgaggatgctttctagaagagctcttaagccacgagcacccgtgtttttcgttattgcttttctagctataagccgcagtgcgctttctgtgaaatgcagct

SEQ ID NO: 31212 - DNA, 1533 bp, Arabidopsis thaliana landsberg
ttttaacggggacatttacgttttcgatccttattcgttggaacagactctcctatgccctcagagcctctgcgctcgagcaagtatctgattccaaatggcagtgatgagcttttcctggttgagaagttcaacccatttcctgaagctgatgtattggatttgagtcggttcgcatgtagagtgagtaggctagatgaggaggctggtcaatgggttgaggtgaccgatttgggagaccgtgtgttgtttattggacactttggaaatgtctgctgctcagctaaggagcttcctgatggttgtggtgtgagtgggaactcaattttgttcaccaatgagccaggctatgtaacgtttgcctataaatacggagtacatacaggaagggtggaagacgaacttaatatttggagattctcaagagaaatacgagtaatgatcgtcaacacatttcctgttgtggctcttcggcttgagtggcaagctgaaaatctcgctttggatacctgagacgtactgttggttctgtttttattagattttgtgatctttaatggtaccctttgttctgaagtgtgtatgttgtgtcactgtgatatgatgatgactagaatacttgtctttgagttttaatatttgttttgttctcaactttcttgttatcaacatcagacaaatatgtctataaaaatggttgtctcatgaactctaaaagctgtctggctgtgtttttgctatcacatggccgtgtgttcgaaagaaatccgtttttgtcccaaagtcagatgagtagtccaactccatatagtcgatatatgcagcagatgcacaatgatggcctctgacacatggtgttccaacttccaagccactttcatggctataaacttgaaagactgtacattctggataataagatgggtcatgtccatctcttatttatgccttggagccgaagttgagccgcacaagagattgaatgagcttcagccatttctttctcagtggaactttgataaggcattattttagtgtagtttaagcatagacatagatttgttgggaattgttgctttgtttgacagcttaccaactgagttggattttgaaaggaaactaggggaaactggtaaatttctgctaaataatgaaggaactcgattgttttttattccaaacttgtgcagctttcatatcgtcccctctgccataccctttagacagcttctgttcttgcttttgactctgtttagagcctcttgcttgttgtagattgattttattttgtgactatggctacattatggttcaaagtagtgctgcgcctgcctagcatattcaatgggtaaaaaatccagagtcatcttcatgtttaaactggtccaaaagctggaaagagcaacacttctcctgtagttgtattctgaagatggtaatgattaatataaacttggtaggcttgagttgtcttgtacttttagatttgtagtgatgtaccaaatctgatgtttaggcgtgggagctttgacc

SEQ ID NO: 31213 - DNA, 695 bp, Arabidopsis thaliana landsberg
gttaaaacatataaatagaaaacagagctgattgataagtttgtgtgaaatttgtgtcgctgtggagtttggggagagatcaccttggaaagacttctccaagaagaattcatacatgattaaagggaagtaaaatgagtttacttgttaaccttagttcatgttcttagatacagatgtattggaatgtactgtaaaaattctaagaatatattttacttcttgaagcgatctaataaacttttgatgcacccgaggactaacggttggcttgaaagacaaccaaccgatgccttgttaaatattgcgtcgcttgcgctatcgctctattgttctaaatcggcttccgctatataattattctatttagaatatcttaaaattttacaataatacttcaaaatgggcacaagacctgcaaattgtatctatgtagcaagaacaaaaaattaatatcgatttaagaggaagagtgtaacaaagctagtctctgaatgctctcctttttcatgtaatccttcttgggattatttctatagctatatggctcaaaattaggagtcggatttgaccagtctcctaaaccctgataggaccactaccggtatagctatatggcttaaaattaggagtgatagattggaccagtcttctacgccttgtagggaccaaacttgtcttaatgtatgtacatg

SEQ ID NO: 31214 - DNA, 2319 bp, Arabidopsis thaliana landsberg
  unsure (1)..(2319): unsure at all n locations
tatgttttgacctgaaccaagtacaaaatgtacctcagaaatattaatatagatgatataatgtacttttcttttgttaaattacgtatttatctaagatatatacaataatttaatttcaattttttttttcaaacaaaagaattaatttaatcaaaaagattttggtggattcgaacccataattcgaatttcacggaaaaatattgttaagctttattggttggtaaacatcttgctttatgctcaagtggagtaatgatattctttattcgtcaagagacacaaaactacttatagaggagttgatattcaaaagtgcatggtttttttttgcatcttaaaacttcaccaatctatatatatacttgttgaagaacccacaagaaaagaccctttctaaaaggttatcttggacccgaggggtaatcgttttcgataagggaattggaataggggatgagccagtcagtgctagcatgaggataggcttgataattaaaatcatgtattggcatctcctccttttgccattcttcccatctctcagctaaaccatctccttccagcattctcactacttctgacatctttggacgttccattgcagaactttgagtgcagagcagagccatttgtatcagctgctccacttctgtttccacgtactttccttcgagttctgcatccactaggctttccaacttcttctctttcaaaacctctttcacctaatcacacccacaaaagaaacactcctattcattgcaaaataacagttttggactcaaaaacgatgatctgggaactattaaaaacatacccagtcgagtaacatgatatcatcatcatttgcaagccgagcaagatcgaaagccttttgtccagtgattagctcgagaagcatgaccccgtacccaaaaacatcagtcttctcagaagattttcctgtcgagaggtactcgggagctatatggccaatcgtaccgcgtacagcagttgtcacatgggagtcattgtaattcattaattntgctagcccaaagtctccaacaacagcttcaaactcttcatctaacagtatatttgcagctttcacatcccggtgaatgatcttttggtcgcaatgatcatgtaaatacgcgagcccccttgctgatcccagagcaatatgctttctttttggccaatcaagtgctggattgccttcaggacgctctataatagaaaatcaaggataagatgcttaccaacagaccaatcacaaaccagtcgaaacaaaacaaaactatatgacaaataacctttaggacaaagaatgtggtacctcttaaacaagaagcaacacttccattagccatgtagggataaacaagtaatctttcagttggagtcatgcaaaagccacgaagccgaagcaagttcctatgaacggccatactgatcatctcaacttcggtttgaaactgcagttccccacccttggtacgttcttcttttagccttttcacggccactagagtgccatcagctaaacgtcctttatacactttaccaaaaccacctctacccaatacatttttattgctaaagttatccgtagcaactaatagttcacgcaaggtaaaccttttgagttgtcctaaatgaacctctgggtcttcttccgctgcaaaatttggtccaccaaaacagataaaaatcagcaaaagaagcttcaatgggaaaatagatgaagagagttgactaaccaggtacatcaaaaaagtggtcctgtggttttcttttgagccaccaaacaaacgcaatggctggacagcaaaaagaagtgctgcacctgcagcaactccccctgctattgctgcagtcatttgcccccctgatagtatgagataacacacaaagtttagtaatacagaactcattcgcagtgaagagtttctatgggaaaatggttaattaatcaaccaagtggaacgtttgagcaaatgtgaaagagctaatacatttttcagatcaaagagcttcacaagtgtcaaatagatcttcgtgtcccacaaattgtctataaacactatttttcttatagtgtccattaaccctttgtacttcagcaaattagcaagttcacacttgtttcataatttcctttttcagcaatgtccatgaatttctgtttctactaagtcaagctgccaggtttaaatctttgtcacacttatcatcttcaacaccgatcagtgtaaaatgataaaaactctagtaagaagtcagatagaatatatattataccaaatcctaccgaagacatgtgaaata

SEQ ID NO: 31215 - DNA, 3407 bp, Arabidopsis thaliana landsberg
atcgagaattttgttcataatctatggttaagctcttttagaaatttcacaattgatttactgtttgattcaatgctatttctctgataacgacatgtaaaagaaactgtatttatgtcactagcaaacacattaagaatgaggaactgaagaagtattcaatgcaaactgtttggttgtttcatgtttgatttgtttggtaagtatttcctctttgcgaaaggcttaggcttttgtttggtatattaacaggtgatgcactgcacagtttgagagctaatctagttgatccatataatgtcttgcaaagctgggatcctacgcttgttaatccgtgtacttggtttcacgtaacgtgtaacaacgagaacagtgttataagagtgtgagtgtctctctgcttatacctgacctgaccaatgttctttgtttagcttatttaatctctgtttgttgttgcttcttcagcgatcttgggaatgcagacttgtctggtcagttggttcctcagctaggtcagctcaagaacttgcagtacttgtaagtttttgctttgatatctaaatggaagatgaatcgttactctgtagataaacgaaaagttgatggcattgactatgtgtagcataactactttatttctagagacttgtagtttctcatacatgatataggcgaaatggcgattacactgaatcttgttttttcattttattaggacttattcaatacccatttgtcattgtacattgttaattttcttctgagggtgtgatactcttaatggcagggagctttatagtaataacataaccgggccggttccaagcgatcttgggaatctgacaaacttagtgagcttggatctttacttgaacagcttcactggtccaattccagattctctaggaaagctattcaagcttcgctttctgtaagaacacttagtctgctcttctcatcatgcactggctaaatgttttgctatattagaaatttactgaggattaaattctcttttggctaaatgttattacttgttggacatttgaatagaagtaaaagaaattggctttgtctttcaaaacactgaataaacttgtttgattgaactctggtatgggaagatggtaatgtggtgtgagtttttgttgcaaggatagtcggctcaacaataacagtctcaccggaccaatttccatgtaattgactaatatcaccacccttcaagttgtgtgagtattacttttcaattttactttctgctcttctgaacttctcactcttaatggatcacctgagttttccttattatcttgcaaactgcagggatctgtcgaacaaccgattatctggatctgttcctgataatggttccttctcgctcttcactcccatcaggtttgattgaatccatactatgcaaacattagttactcgcattatgggaactgaggctataagttaagattaagcacaagaggcaataaaatttaaagtctgaacctaagtttcttttgatcatcttaactcttaagtaaatttactcaatagacatactacattttccaaattctattactttaattggtggatatgaaaagaatcagcagttgactatttgtgttcttctgcacagttttgctaacaacttggatctatgcggcccagttactagccgtccttgtcctggatctcccccgttttctcctccaccaccttttataccacctcccatagttcctacaccaggtaatgaaatgaagcagacagtgaagtttagatcttttacgctcactcatgcttggaaactctctgtctcacagtttaagaagcttgtgatcaacttctctggtagaatttttggttgttaactattttggtaaaataaattttaaggtgggtatagtgctactggagccattgcgggaggagttgctgctggtgctgctttactatttgctgcccctgctttagcttttgcatggtggcgtagaagaaaacctcaagaattcttctttgatgttcctggttagtcaatgagtctgcagtatccaagctttgtttcattttagaattggtttagtatgtaacacttaaaatcccggttctgtaatgcagccgaagaggaccctgaggttcacttggggcagcttaagcggttctctctacgggaacttcaagtagcaacggatagcttcagcaacaagaacattttgggccgaggtgggtttggaaaagtctacaaaggccgtcttgctgatggaacacttgttgcagtcaaacggcttaaacaagagcgcaccccaggtggcgagctccagtttcagacagaagtggagatgataagcatggctgttccagaaatctcctcaggctacgcggtttctgtatgacccctacggagagattgcttgtttatccttacatggctaatggaagtgtcgcttcctgtttgagaggtaaccttgaaattttaattctctgtatcataaagtaaaaagaccaacaatgatgtgttagtgttgttttagaaacttttcaatgcaattgagtgagctttcttgaaatgaacagaacgtccaccgtcacagttgcctctagcctggtcaataagacagcaaatcgcgctaggatcagcgaggggtttgtcttatcttcatgatcattgtgaccccaaaattattcaccgtgatgtgaaagctgctaatattctgttggacgaggaatttgaggcggtggtaggtgatttcgggttagctaggcttatggattataaagatacacatgtcacaacggctgtgcgtggaactattggacacattgctcctgagtatctctcaactggaaaatcttcagagaaaaccgatgttttcggctacgggatcatgcttttggaactgattacaggtcaaagagcttttgatcttgcaagactggcgaatgacgatgacgttatgctcctagattgggtataacacagatcttttagcacatatcttgctatctctcaaaaagctgatttatctgttcatttggtcttctcaggtgaaaggacttttgaaggagaagaaactggagatgcttgtggatcctgatctgcagggcaattacacagaagcagaagtagaacagctcatacaagtggctcttctctgcacacagagctcacctatggaacgacctaagatgtctgaggttgttcgaatgcttgaaggtgacggtttagcggagaaatgggacgagtggcagaaagtggaagttctcaggcaagaagtagagctctcttctcaccccacctctgactggatccttgattcgactgataatctacatgctatggagttgtctggtccaagataaatgacattgtaatttgcctaacagaaacgagaaactgagagcac

SEQ ID NO: 31216 - DNA, 5000 bp, Arabidopsis thaliana landsberg
  unsure (1)..(5000): unsure at all n locations
tgttgtgggcggcttttttttttattattacaaaaagaaaaatatagagagaaggagagatttgttttaaagtaaatattttgattgtttatgggaatacctgatggttcactgctagatctaattgataaggttaggtctnnnnnnnnnnnnnnnnnnnnnnnnnnnnngttcttgttgtcttcatctaaacaagactttggaattatgcctatcgtttccaaaatgtgtcatgactgtggaacaaaggtggaacaaggatattgttgtcttagttgtggttcttgttggtgcaagagttgttctgatacagaagagagcaagatgaagttgtgtagagaatgtgatgctgaggttcgtgagttaagggttaagagctatgataaggttcatcctcgggatagccctgatccgccttcttctcttgctaccgaaagcgagagtcttgcctcgagtcttgaaatccgtgattgtaggaacatggcttctattcgttgctatcctagcaggtaaagtttcgatttttacattcaattatgtgtgaaaaagattcaatttttatgttcaattatgagtctttaaacatgttggagtaagtgaatgatttgtgtttgcaggggagaggaagaagaggctagatattgtggccaacagttgctaagcccttcgagtgataactatcaggacagttcagatatagagtcgggtagtgttagtgctagacatgagctttttagttgtcaatcttctgctgggtccagtcctcacgacagtccattaaggaacaattttagtcctcttgggcgctttgtacagcacgcgaaagacctaagaagccctactgtttgttcttttgataatcatcaagaacaactcttggctgataatttagttaagccaggtcagggggtattggaacaggaagatcacgaggaggaagaggataagttgcaacagccgttggattttgagaacaacggccgcatctggtatcctccaccaccggaagatgagaatgatgatgctgagagtaattactttcattatgatgacgaagatgacgatattggggactctgctaccgagttttcattgagtagtagcttttctagccacattcctaccagagagaaattgggagaaaacagcaatgaacctcttcgaaccgtggtgcatgaccacttccgagctcttgttgcagagctattacgtggggaggagctaagtccatctgatgatggcagtgccggggagtggctggatattgtcactgctttagcgtggcaagctgcaaattttgtaaagccggatactcgtgcaggcggcagtatggatcccgggaattatgtaaaaataaaatgtgtagcatctggaaatcaaaatgagaggtataactagttgttgaaaccttgtttaaatcgtcctctgactgatgattactaatttgggtgatagttactaaatgaataccttgtttctgcagcattctcatcaggggaatagtgtgtagcaagaacattacgcacaagcgaatgatatcgcagtacaaaaatccaagggtgatgcttttagctggttctcttgagtatcagagagttgcaggccaattagcatcctttaacacgttgcttcaacaggttggtgtgttactgtttctttatgatggctgcataaaatcnnnnnnnnnnnnnnnnnnnaactgaattatgtgtgttggacaggaaaatgaacatatgaaggcgataatagcaaaaatagagtcccttcgtcctaatgttctgctggtagagaaaagtgcatcttcatatgcccagcaataccttctagagaaggaaatttcattggtgctcaatgtgaaaaggtcattgctggaccgtatagcccgttgcactggtgctgttctttgcccctcactagatagtattagtactgctcgattgggtcactgtgagctgttccggactgagagagtgttggagcaacatgaagctggcaatcagtcaaacagaaaaccatcaaggacattgatgtactttgaagggtgtcctaggcgcctaggttgcacggtatgctcctttattggtttcacagttcttgttttgcatagcttgaacctttgtagctaagaagtctgctatcttaaatttattaacttccttactgacttttctgaaacttgtgcaggttgtgcttcggggaagttgtcgtgaggagctaaagaaggttaaacatgttattcagtacgctgtatttgcagcttatcacttatcgttggagacttcattccttgcggatgaaggtgcttctctgcctaaaattagactgaagcaaccagggatggtgcggactgcatcacaaaggaggataattgatgaaggcatttccttaataactcaatctcctacagaaacagatagtcaagctttgcttgaaacagctgcacatgaagatgaacatacggctcctatgcctgagcatgaagtttgtgaatcattgtgtaaggattttgatcctactcttatattcccaccgtcttctgtatgttgagactgaacaatctgataccctgaatggagattttgccaataatttggtaacaagatcatattcttcgaatcagttaaatgatttgcatgaacccactttgtgcttaagtagtgaaattcctgaaacgccgactcaacagccgagtggtgaagaagataacggcagaggtgaagaagagaaccaattagtgaacccccacgatttgccacaacatgagagcttctatgaagatgatgtctctagtgagtatttctctgctgcggactctcatcagagcatattggtctcattttcaagccgttgtgttttgaaagaatcagtatgtgaacgttcacgactcttgcggattaagttctatggatcctttgataaacctctcggaagatatttgaaagatgatcttttcgataaggtagctctttcatctataaagttagttaatccactttttcatctttcttaaattttgaagtctaatgcctttctgttccatttctggacagacttctagttgtagatcctgtaaggagctggttgatgcgcatgtactctgctattctcatcagaatggaaaccttactatcaatgttagacgtctcccttccatgaagcttcctggtgaacaagatgggaagatatggatgtggcatcgttgcttaagatgtgcacatgtagatggagtcccacctgctactcgtagagtagttatgtctgatgcagcatggggattgtcttttggaaagtttctggaacttagcttttcgaatcatgcaactgcgaatcgtgttgcatcttgcggtcattcgcttcaaagagactgccttcgattctatgggtaaacgcaggctgtataatatcattctcttacagttatctcaatgctgttacactaataatattatgatttgctttgtagatttggtaacatggtggcattctttagatattctcccatcaatatacttactgtactcctcccaccgtcgatgcttgagttcaatagccatcctcaacaggagtggatacgaacagaggcagctgaggtagattttaagaaaaacttaaggctcttttgcttcaggttttggatatgtaaatgctaaaactcaaatacttctctgtttgcattttacagcttgttggtaaaatgaggactatgtatacggagatatctgatatgctcaaccgcatggaagaaaaaagcagtttgcttgaacctgaacaatctgaagcatgtgatctacatagtcgcatcatcggattaatagatcaacttgtgaaagaaaaagatgaatacgatgtaagcttcttctgtttctgaaatcttgatgatgcttgttgaatatgtatttgatggaatattcctcatcatgaacaggatgcactgcaacctatttttgaggagaatctgcaaattcagggaagtttggatatcctagagctgaatcgattgagacgagcactcatgattggtgctcatgcttgggatcatcagctttacttgttaaactctcaactcaagaaagcatcagtctttaaaactggtgatgacaatgctcctcggaatccagagatgcatgatcctccaaagattgaccgtagaatgcaggaaggttcagatgagagggatgaacaatcccatactgattcagaagctaatggtgataacaaagatccggaaaacattccctcccctggcacttctctatctgagaggatagattcggcgtggttgggctcgtttcaaaatctagagaaagccgagactattgctgagacggaaggcttttcagctgttaattcttctctccggaggcttgccaggccaattcgagtccagtcttttgattcagcgatacggtttcaagaacgtatccaaaaaggtttgccaccatcttctttgtatctctcgaccctcagatctttccacgcttctggcgagtataggaatatggtgagggaccctgtttcaaatgtgatgaggacttactcacagatgttgccactggaagtacagaaattggatctgattgttggttcagcgccaacatacatctcttctgcatctcaaatggctgatggggcacggatgttgattcctcaacggggccttaacgatatcgtggttcctgtatacgatgatgatccagctagtgttgtatcatatgctatcaattcaaaggaatataaggagtggatcgttaacaaaggtcttgcttctagtagtagtagcagcaatttgaataacagagagtctgaaccttccgccttctcgacttggcgttctctgtcgatggatgttgattacattcaacacgcggtgtatggatcttctcaagacgatagaaagtctccgcatttgaccatttctttcagcgaccgcgcttcttcttcctctactgccactgaaggtaaaaaaaagttaaatgtgacgtgttattggcaactcagtt

SEQ ID NO: 31217 - DNA, 700 bp, Arabidopsis thaliana landsberg
ctcctgaagaaattgcttattatccttcgtcttgagagaaggattttgttttaccatcgtcactcactgaagagagagatgaaatcatggctagcctttgtgaggaaggacaaagcttgagaaaaacccattgtctaaaaccctgttctacctccatcgatggctctgtagccgatcttccccgtcttgatgatcaacaacccatttatgattattgtatgcataataccttttctgggttttgggctgcagatcatcatttcttcctatcatggcttggaaaaatgcatgctttgtatgaacccatttggaaaaaagctgggatttttgaagcaatcaaggcatccgcttacaaaatcataaaagacacgtccttgattctctccattgccgagaaatggtgttttgaaaccaaatctttcatctttccatggggtgaagcaacaattacgttagaggatgtgatggtgcttctagggttctctgttttgggttctcccgttttttctcctttagaatgttcagagatgagagattccgcagagaaacttgaaaaagtaagacgagacagtcttggcaaggctaagcgagtgagccaaagatcatggacttcgagcttcatgggtagagagaggtcagatggagcatgaagcttttcttgtattgtggctttcactttttgtttttccaggtaaattta

SEQ ID NO: 31218 - DNA, 4992 bp, Arabidopsis thaliana landsberg
  unsure (1)..(4992): unsure at all n locations
aaaggtatccaaggatttttaaaaatataaaattatatttactagttatataaagatttttataaaagttgaagttctaattggtttattgcttcttttttttatgcactcgattttaggtctggtttatttgggttgaaaagataaattatttccactattatatttcaaatttcagatacattttttttagtatagttttaattcattttggaacagttaaacaaatctatgatagttaatgacatttctttttcttagttaatgaaatttgtatgtgtatatgtgagattagcatgaatcacgtttttaaatcccctgttttttctcttataatatatgaaacagggcataatggttgcctcatcagagacctccgctttgacaatagagtgggcgatggcgagtttgttgaaccacccaaaagttttggaaaaagtaaaattagagattgacgagataatcggacaagaccgtttgatcgaagaatcagacatagcaaaccttccttacctccaaaacgtagtatcagagacacttcggctacatccagcagcgccggttcttgtgccaagatcaacagcagaagacatcaagatcggaggatacgatgtgccacgtgacacgatggtaatggtgaacgcatgggctatacacagagatccagatctttggaccgaaccggaaaggtttaaccctgagaggttcaacggtggagaaggagaaaaagatgatgttcgtatgctgatagcgtttggaagcggacgaagaatatgtcccggtgttggattagcgcacaagattgtgacattagcgttaggatcgttgattcaatgctttgattggaaaaaagtaaacgaaagagagattgatatgagtgagggtccggggatggcaatgcgtatgatggtgccgttacgagccttgtgtaagactcgatccataatgaataagctcccggcctacacgaaggtttagttatgttttttgtatttttttatggaaaagttgttacattatgttgtgtaaccaagactacgagtgtaatgcgcgaaaaattgaaataaagtgctatatttagcaaaataaaccaataaatgtgtgtttattttattttaaatcatgattaacgtcagccttttcctgctatttttatggggttaagaatttttctttcttcatccaatcttttggctgtcgaaattttgttttcagaattgaaaagactcacataatgtaacaaatacaaaaactaaaaaaaaaaattgatggatttttttatatggctacaaaagaagattgttggatacgtaatcgaaaatgacgttatccttcaagacttgttcttcttcttctcctcgattaacaccaaaatccatcgccggagcaggagacgatgcttctcaattcttccatcacaagacaagttacagagcacacacaaccacactcttcttcatcctcgtttctctttctctctttggtttcatctctctttattattcccccaacacgatttatcgagctgccttctttgccacgacacgcccagctaaatcaagattcgttagttacgtgatcaacactcaagattcaaatcatcatcaattatccaacggttcacgtaggatcagagccgaagctgttctctggccaggatgggagattctagtgatcgtttcaccggaggagaaagctaagccaccgccgtttccaggagagaattacacatgtttttaccctaacggagagaaatccacggcgagattcgccgcgattctccctttctcaaaccgtgcatcattcagatgcagtcttcccggaatttatcgccaccaccatccaattccgactccgatcctcgcctcttcgaaaaggttccaactttcgccggaaacacgttggcctgatctccctctatggaatttcgtcgttttcgaagccatttcaacagaaaccgacgtcgttctcttagtcaaggggccgaaccgtggattaggttccaataaaccaccggagtcgtttcggtgtgtgtttggtgaggagtccgatacagccattagaaccgccgtgactagctcggtccaagannnnnnnnnnnnnnnnnnnnnnnnnnnaacgatcgatactccggtcaaaatctaccttgaggcggtggcaaccggtaaagaagagacaaagaccgtcccgtcggtggcgtattatagccccaagcgcacgttagtggaaccacgtgagaaatcgctattgtgcgcgacgacgatggtgtacaatgtagcaaagtatctgagagagtgggtgatgtatcacgcggcgatcggaatacagagattcataatatacgataacggtagcgacgatgagttaaacgacgtcgttaaagggcttaatagtgaaaaatatgacgtcatcaaagttttatggatctggcccaagacccaagaggctgggttctcccacgcggcggtgtatggaaacgatacgtgcacctggatgatgtatcttgacgtagacgagtttctcttctctccggcttgggataaacaatcacaaccgtcggatcagatgattaggtctcttctaccgtcggatcagagcatgattggacaagtgtcgtttaaatcacacgagtttggaccgtctaatcagacaaagcatccacgtggaggtgtgacacaaggttacacgtgtcgacgagaagaagatcaacggcacaagtcgatcgtgcggctaagcgcggtagagcactcgctttacacggccatccaccacttcggtttgaagagagagtacgagtggcgcgtggcggacacggaggtgggagtggtgaaccattacaagtaccaagcgtggcaagagttcaaagccaagtttaaacggcgtgtgtcggcttacgtggtggattggactagagtctctaatcctaagtcgagagatcgaactcctgggttgggctttaagcccgttgaaccggaaggatgggctcataagttttgtgaagtcaaggatttgagattgaagatattaaccagaaaatggtttgggtacccagttaaaaacggttataggatggcatggcagagatgattttttttttattagatgggttcttttgttaatagcatagttgttttggtaacagttttttttctgtttttgtgtacaggtttgaagttttttgttaggtgaaagtacggaactcaaaatagtttgaaatgtgactagagttatttttgtctagtaatcccaatgtcccatttaaaatatctgaaattcggtttcaaaatataatttttcttcgtgatacaagacaaaagtaaagtataaaaaggtacattcagaggcctggctaccttatctgtaacaatcattgtattctaatcaatgaatgtattttatgagttcaaagaaagaaagaaaaaaagaagattggaaacgtacgtacgtataagtttctgtgatttggtgcgatgataatagtttacgtaattataaaccttttaaccatcttggacctcatcaataaaattcagaagacaacaacttcaaaggatatgaatagttgactaactgaaaacgtacgatgaagaaaatgcaaagcaaacaaaagaatgttatcaagagcggtggaaaagaaatgctttaatgatgtgattcaacatcagtacatcaccatactcgtgtacgcaatttaaaagttgtcaaaaaaaacagacatgtgatcaaatatgattcgcaaatgcatcgtacacatgtgacatgaacaattatatgacagaattttgtttttgttagtgacaaattttcttctttttttttttctctgtagcggtagattccaattagtatgataagaaaccacatacatatatatacacctttttttcacgaccacaagaaaatatattattgtttccttcttctgcctccaacattgatatgctttcaaaattctctaatatgagttgtcttactgtttaggtgacttttgattcaatagaataattttcttttaaatcaatttatgaacacctcacggaaaagcatctaagcccaatgatgtatgaaagaaacggttgaataattcttgattttatgttctaaaacatataagcacctcgaccgcagcaagcatgggagtgtgatttgcacgtttcatatattctcctagtccaattctctaagagaaagatatcgatctatgagatgagttctatttattgttcggtgagttttaattgatcaaataaataactttctttgttaattaattaaacaccatgcgactatagtattactccatatacagagatgtatgattagtgaacacgattgtagtatcctcgatttctttttgttatcaatttcttttacaccttgatcacaatctgagtggttgttactacttattagcacgtttcatataaagtaaataattttatcaattaataatacatatatgcttcaagttgagagcaattaacgctgtcaaaacaacacaaacaaacattaacaatgaattttgggaaggtgtctctcatctatgattgattttaagatttgtttttccttctatatttgcaggaaggaatagttctatacaatcatcagctaaacttcaaaatctttgtaatcgtagatgttaatagtaaactcgaatattccccaagtcatactaataaacaatgaaaattgaagaaaataaaagtcataaacaatgaagaaataaacaaattgcaatataacaatttcttacaattctcgacttttgcgcctttgagacatggtcaattaagattatgtatagtcatggtagtggacgagtggttgatatgtgaatccgaatttaatcccacatcacgaatttgaatgttttcgaatttctatattaaaaagttttaaaatggttgccaagttgtattggttcgagtatctttattccgagacaaacatatggaaaagattaaagaaagaattcaaagtttagttaga

SEQ ID NO: 31219 - DNA, 1147 bp, Arabidopsis thaliana landsberg
ttgtggaagtggagaagcaagaacattagggtacggatctattaaaggagaccgaattccggcatgtgtctataaaaaccccaattcatgtgtcaaacaaccagttaaccattaccatagaggttgtgaaaaaattaccaggtgtgctcgtgatgctgctcgttatactgaatccttcaatgtcgatgacgatgaaagtcccattattaatctccattgaaatttaatctttaatttactttcgttgatactacaaagattcatgtatttatacgtcgtgtagcttgaataaattcatatacctaattatcagtctattaaaatgtgaaagattatattttattaatttgtgtttttatgtaaagtcactaattgttgtcttaattttttatgtattctatgcttttcctgagattatttatttatttgtttataatttttttttaattaaaaaataaattatgtgtgactactctttctctagatatgccttaagcaataaaagggggaaaaacattttttgatgacaaattagtttgtcatatgaatgaaattgtggtttagatgaatttcacccaagaattcttaatagaaccgaaaatctctttaagttttaacataatcaacaaagataaattctatgaacattcctaatatttcctttaagattactcaatgaattccggtccgagcgcttgcatttgtctaatcatcaacatagacgaatcatacatttgcttgcggctaacgtcaccttcctttcctccttcatcttcgaagagcctaccatccaatatactcagcacatagacaaaaatctatatgagttacaaaaattcatccattgagttgttacaatttaatttgattgaaaattgttcattagacattaggtgaggaatgcaatgttgtatgagttaaatttaagttactactgctactattgattcaagtccgtcatacaaaattctagagaaaattaatatatatatcctctcgttttcccatatcttaaaattgttaaattgaaatccacagggtaagtgagagaagcaatcgacctcagcaagaggtgtagtattcataaaagttttacgttgtatatttaatgacactacaaagtcattggaaaatatatttttgtaag

SEQ ID NO: 31220 - DNA, 3685 bp, Arabidopsis thaliana landsberg
  unsure (1)..(3685): unsure at all n locations
accgtgtggcaccagaagtgcatctgcattgtgaagatggtcatttcatatcctccatagaatttgctagcggtgggactccaagaggtagctgcgacggcttttctatcgggaaatgtcatgcatccaactcattatcaatcgtctctgaggtaaaattatattnnnnnnnnnnnnnnnnnnnnnnnnnnnnnnacgaaggaatctaaaaaccggtgctggaaacataactccaattataatccaaagtagaacttatgatgatcttaatttcctaagcaagctagtagaaatattttgggtgcaaattgttgacatatagctctaaaacaggttcgtagcaattgcgtactataaattttgtggactatctgaacagttctttgctctcttctgcaggcttgtaaaggacgcaacagctgcttcatcgaggtatcaaatactgcttttatcagtgacccatgtagcggaactttaaagactttagcggttatgtcacgatgttccccgtctcaaaacatgagtgacctcagtttttagacaccaggaagcggctcagaacgatgaacagctgtttctctaagaaacaagagaccattgatattgattaaagaagtgtatgtcccatcacaagctttctttgacctttatatttcaaagtctgaactctgaacaattgtgtttgctcttgttcattggtgtatccaaactctacctggaaccaattaacagactcaaaaccatctctaaggtttcttaccgtatgtaatgatttagatctcagtggttttaaatgcaaataatatttatgtttatccttgctttacctggaaccaattaacagacccaaaatctttataacataatcaacaaagataaattacatgaacattcctaatatttcctttatcattactcaatggatcccaagcgcttgcatttgtctaatcatcaacatagacgaatcatacatttgcttgcggctaacgtcaccttcctttcctccttcctcttcgaagaacctctcgcttccatccaatatactcaccacttggctaatgctaggccttaacttcggatcggttctcgtgcaaactaaccctaaccgtaatagccttgccaattctcgattctcgtattcatcatccaaatgaatatctgcaatctcctccaagagtttttttcggttaccaactacttcgcggattcgcaacaccaaaagagcatcttcttttttcctcttgtaatccactgctggctgccccgtaaccatctcgagcactaccacgccaaagctgtatacatccgccatggttgtagcctcgccggattccatgtattctggtgccatataaccaaaaatcccttgagcagatcctttcttttttgcagcttgatgagccttgtcgtttctagacaaaaactctgccaatgcgaatccgcaaagccgcggattcatatctctatcaagaaatatagttgaagaagtaatgtttcggtgaatgacttgttcgtcccattcctcgtggagataacgtacagcgcaagcaagcgatttgatcacgttgtaccgacttttccatcgcaaaacagagtttccaggtatatgattatggaaaagaagatgacttagcttacgattcgcggaataatcgtacactacaagcatttctccgtgttcggtgcaccaaccacggagcattactaggttacggtgtcgaagccggcctaggttaagtagttcagtggagaaccgggtaacaagcgccggacatttagtcataccgagacgtttcaccacaatatgttggtctccatttagtaaaccataataagccgtaccaaaatcaacctcagcaacgcgacgtgcatcagagaaattatcagtggctaaaacaaggtcgttgtatgaaatctctcttggcgtgtccaatacgaaagactttgatgacatcactctccggctgttgtaattaaagtacggattttctccagtctccgccgtctggtaaatagaatcctcaagggcagtaacgtaatttgatgacggcgttgactccgacgacgcattgaagctagttgtggaggtggtggtggtcatcgttgttcttgtagtagtcgtagtcgccgaagttgaggttgattttaaagaagataaaggaatataaagaggatggctcttaaacgaaggtaacgccggtaagttaccggaaaactcgccggaaagtgctccgataacccatttcatgttgggacgatgcgttggattgtttaaagaacagagcagagcaagatgaatcattctcttcatatcagagagatcataagatccttttgctaaccgagaatccccggcgtcgagtaatttccggttatcggataatctccgaacccaatcaagtaaaatgattttatcttccgagaacgaaagatcaacggctcgtctaccggagacaacctctaaaaccacaacaccaaagctgaaaacatctgttttagcggtggcaacggtttttttccggaaactctccggtggtaagtacccgatagtcccaccgatccgagtcgaatccgcgactcggaactggtggttacggaaggaagaaacagagtcgtaactcgaatcatgctctgtttcatcaatcttgtgttctaaccaccgagctaaaccaaaatctccgagtttagcgttaaactcagaatccaacataacgttactcgtcttcacatctctgtgaatgatctgagtctctaactgctcgtggaggtagaacaacgcggcggcgagtcctttgacgattttacccctccgatcccaatccaacggtttaaaatcggagttaacttccggtcgtcggaaaagcacacgatctaagctccggttaggcatgtaatcgtaaacaagaagcaactcgtcttcgtgtagacaccaacctcttaacttcacaagatttcgatggcggagctgagccaccgcaacaagctccgccgcgaaagttttctcgaattgttctcctttcttctccgccaagcatttaacagccacggtggttccgtcgctcggtaacaacgccttgtaaacgcggccgaaaccgccgcttccgaggatcagttcgtcgctgaaaccattagttccgatataaagctcagagtatccaaagattcttggattctcgcaaccgactttgctggaaagctgaacaccttccatgtcagtgaatgatttattgatctccattgaaatcgaatctttactctcgttgatactacagagattcaagctcttcaccaacttagagccgtgtaatcgccggaataaatctccgattaaactcacaacttgacgtccacaatcacgactcttcttctcctcttcttcttctgtggtctcctcgaccatcaccggtggctttaactcgccggattctgtcggtagtacgaaacagagatgatccatagccattggcgccatgtgaatgtgtaaagatatcgaaatgtgaatgaatttaaagatgtgataatgctttataacattttgtgacgatctatttgaccgaccaaaattgaatgatggatttttgccagcaaggatgtttttatttatagtgtgtcttctttctagaaatatatgtgattttatcatctttaaaagtgtttgtataatttgaagattggaggcattaat

SEQ ID NO: 31221 - DNA, 950 bp, Arabidopsis thaliana landsberg
tcaccgacttcccctttacggccaaaaatcttgtgatcggcccccctaagcgtttttccggtcttgttgatctccaaattcttcaagttacgcaatgagcaaaggtccaagatctcttccactgatcccctctcttcttcttccaccgtaaaaggacaatccaagaactcggcaagtctcttcagctgcacgcgaggttctgtttttaactcctcgtacttcaagaaaagcacattcttggagtcttccaagcttgctctccaatagttcaagacatgttcccaggatggtccgtaattgataactcctctgcaaaaggactcgaacattgaatccaaaatgcttctctcctcttctatctttagttttgcgctgttgaaataccaaaacgacaccagtacgtctttcacgttcctcaacacgtaaacgatcttacaggagagttcttgagagcctctcgcagcgtttggaacgccacatgagtctattttaacctcggcgacgatgagatactggtcagatctggtttcgaggtctcagtgaacagcctgagctcgaggaatggtacaagtccatgaggattatcaagtagaagaggatgatcatcagaagagtgtttctgtttagatctcttgaggagagctaccgtgagagctttaagccaagtagtgccagatttggggaacgaagcaataattatatcggtgtcttgtggctcgaaacctctttgaaaattgaggactccttgcagagttttgtcgtcgtaccaacatccttggtatttgaagagcttcgtgctgtcgaaatctacgtctaagggaagtgaaaaaatcaaacttatgttttcttcgtcattgttttgcagtttctttggaactttggctcatccatttattttctttttttttatgggtctcggaatttcagattgcacagcataataattgatt

SEQ ID NO: 31222 - DNA, 3569 bp, Arabidopsis thaliana landsberg
catctgcctcgcggttaccccaacctctcttgagccgttcggggttttccgtaggggctgccagcttggagttagccactgcgtttacttgttcggctttggccttctccgcttctaagtcttcgatggtcagacctccaccgatttcaccagctacaaacttggcagccaatttcgcccagagtcttcgatgatgaccgtagtttttgtgtaactcgtagtattcctattcgtttcccaaaagttggtccttagtccatgtgaaagactttcgtcctcggcctcggccgcggccgcgtcctcgagcgcggggtgtatcagcttggtaatcatgggcccaggagaagtttcgcccctcgtgatgcacgaaggttttgtctagagcaccctttttctggctcatagtgctagattgggatttatcagcctgaggtgtttgctttgacggctcgtgcctttttgaaaacaactctatctcctcatcatgggaaacgtaatctgaggctcggtgcatggcgtctcggatcgtttgtggttttgacagatttaattcttttcgaaattctaacttgtaccacaatgccttcttcaagggagagagctctgcgacgtcgttgattccctcgaccttggctagggtgaacctaaacttcgtgaggaatcctttgagtggatcatttggctgctaagatagcgatcaaaggtcagcgtctgatgtgcctggatcaatcaacactgagtattgcttgaggaaaagcgttgacagctcttggaaactgtcaacagaattcccttcaagttttgagaactaatccaaggccggccccttcaggtgctcgacaatacatgatagagaccagcgtccctctcctctggcttgaacttggctcgggccatagagattataaatgactttaaatgcccctttgtgtcggacaacccattgaagtactcgatattgagcttcctcgggtctaaaattattgcgttggagatcttacgagtgaaaggtgtgttgtgggactcttctagaatgcgatcgatgtttagagccgaggagactgcgctatgcagctgcgatcgaacaagcttcatctcggttttttccttggttagggagagtttgatggcgtttatttcttgttcctatcatattcctcagcccttggcagcctcggctcaaggaataggaaactgcggatcggtttccttcacttggtttgtcgcgttcggctctcccaaagctgttggttttgctcggattccattgagcgctggcacagttcatcggaattgcctcgtcgtgttatcaggcgtattgatcacgagcctcgttggattgaggtctgccgctacttgccgatcatgaaaatgtcgcgcgttagagcgggtggtcatgatctgcccttgggaggtagccgcctcgagctgctgggccaaagaccggttcgcttgttcatgatagtccaccttcttctgaagttgtgccatcatgcttttcatttctgctaggactgcgggagtcgcaacctcaggagtgtttgtctggactggaggaatcgggtttccctccatgtccactgtgttagcggggacctgattgttggtcattgctgcttggtttgatggttctttgttcttggagtaagagaaatctcaaattcaccctccttctagcgacaaattgtgagaatcgaaatctacacaatggaaattgtttcttagggttcttacaaagtaatagtcttcgcgagaatctcaacgaacaatagaatcgttcagtaaccacagatggtgttcttgatattattgataagaaacgatgatttgatcgtacaagtgttatagaaaagtaaagaataagtgtttttagccttcaaagtcatattgtttttataaggtggagactcggacaagtgggaaggagctggccataagcttagacaaaggggaaatcatgcgggtcagctcgtctgaagctcaagctcagctggaatgagtgacggttacttgggccgagtgacaatccagcttgggcagccggatgagtgacggttaagctcgaggcagctggaagagtgacggttgagctggaagagtgttcgaccagctgggcggttatccggacggttacttgggcatttatggtcgaacggatacttgcccaaagggtggataagggcgagcagttacgggcgaagatatgcaactcttcggaaagatgcaaggaacggatgtgttgattcggaaagcatctattcgtctcctatataaggaagggcgcccatgaccatttcattgaccacaacacacagaaaaacaccggaaactcaccattaaactctcgcctctcggggaaataaataataggaggattctgtagaagaagggacggatcgaccgaacattgagaaggaaggtgaggaatcctagacttcgagtctaaggattctaggatgcgagttagtagttggatccttgaaaggatcgactagagggctgggtagtattcgggtcatgtgcatcctacacaagactcgactgaggcggggacgcggctcggtggaggaccggcgggtcttaattgacctactggaaatcggcttgactgatgcgcgatcttcccctctctgaatcctctctgcggatccgagtaatgtatggcctatagagcattgcatggacttgcatatgactaagtaaatgagattacttatggctctatgactttcaggaacgaatggtgatcgtgggaaggacttggcttaggcgcgagagactcaaagccgtgatgatgggtggtgatagttcggataatctagggattgatcatatgacttgtaatagcttatatgcaaactcataagttatatcaaatcctttgcttaattaataaagtatctgattgtttgtttactcaattcgtctcatatattgaatcatagaatcatatgaaacggattacactaggaatgaacctcataaacggttagggccgagtcacttagtggcttggggcgggagatctcgtccgaacttaggcagtccggatcggggccttttaagttggtatcagagcatgcttggttctaaggctaggtgttgggttaaggggtatcaccacttgtcggcttgagaatctcgcggtagttgatctttactcttttgcaattttactatgagttatgtggattaactttggtggtttcgcagatgggtaagagcagcaaaacgggaaagagtaagaagtacaagggcattatcaaggagactttggttgaggaggaaacgatgatcaacgagaaaaccagagtcgggacgatgctcgatgggatagacttggccggacctgaggccgggaagaactccataaatgaggaagcaccaaagagtagcggtgcaagggacaacacggataaccggaacagtactccaactgcccaagaacagtgggatttgatgaaggggatgatggcgcaactagccacattaaccaaggccgttgtagcggattcggttgtccaggagtggataccgagaaggatgatgcctttgaagttgtgggagtg

SEQ ID NO: 31223 - DNA, 4166 bp, Arabidopsis thaliana landsberg
gcgtttttgcggcgatgggtcagcaattgcgtcgagctgttgggaaaatcaaagaagttgagagatcatcaccatcaagagtctccattgatcggagatcgcttcctacggaggagctcagtgccgtgaaatcgtctccgtctactgccgccgttgatggagtttctggtataaaccctaaatctctcgcatttgggtattcgaaagttttcaccgttataaacatttagattgatgggctgcttcttaaccgtttccaaatttttgttcgtttttgatctgaatttgggtatgtatctgttgttagataaaggtcgaagaaccagtgaggataatgttttagaggaacgagaccccaagtatgatacaatgttgaaccaaatggttgggagaataaaagctaaacctggaggcaaagctgagatgggagaggtttgtagtgttgtttccttaagctttgtttatctcttgtttgatttgatgcattgattcgattctcgtcctctcatcaggacaagtatgtgacttttggatttttaatatagatccacctgattacctgcattgatagttggtgcttatcttagttatgtagctgttgagaatggtatatgaaccctttgtcttgcctcttagtcacatcttgtggagtttttgtcattagtcatgtaaaggtttcgttactggttgattttaaggtattagagataagatgggttcaaaaggtttcgttactggttgattttaaggtattagagataagatgggttcaaaaggtttcatgaccaatgctgggttgctttctaattctgctctggaatatatgttaaggtttttgccccagagtctctggcaacaatctagaattttatattcccctgaacaagttcacattttagagtaactgaataatgtagaagtaaccagattagaaaacctttgatagcgttctgtgtcacaccaatgaaatagttagcataactaagaagtgaacagattgtgtctcattcttctgctggtaatcttagagctgacagtgattgatggtgtaaattaagtttaggataagagatgaaatgtagaaatgtagataatgcaaaagggccatatagttgcgggttttggtctttcctgtgtataaatccatgaagacatatatctatctgactaaactgataagacttgtgatttatataggcatcagtagttgagacatcgaaaaggccactcccatagctccggaacgcaactcctgaatcaacaagatatgaggaaaacccggtgcctcaaggaacgttgaacgtagcacaagtgcgacacatcatgcttctctttcagggaaaatctcaggatcaccatggtccaatgggtgttaacgagatagctgaaaaataccggattgatgtctctcaggttcagaagatcactcagttcctgtctttacctcaagagattactgataagcagaagaaacaatatgaataaaaaagtaaaggctctgttcgttcatattcagaagtaatcagaactggttggtttcttttgtccttgccagtttttagaaagttttgtgcctcgatgagtaacacagaaccaaagatgacattgactttaaattttatttttcgctgagcaataatgtaaaactgtgtagctaagaatacaaagcttttttcaaccaagccatgattctttttgaaaactgcagcagtaacacactttgctgatatgaatgaatagatttagtgaaaatctaccgttcctagtaagaaagagtttgcattattggtctctgttcagagaaggatggaatcttatattacttattactcaaaagcaaaatagaataagatttacaaatagaattgaagaattttacaagttcaggtcaaatttgcctcaaaccaatcggatgcaagttcataggccacaaatgttacagcaccagcaggtgcagctttaatggatgatggaacaatgcctttataaagcccgtgccaaccttcagatcttaatatctgccctaaaccgacaaacatgttcttgtaagcattcagctctactcgggctccatattttgggtgacgttgcagaccttcgacctgcagcgacaaacattcttgtatcaaaccttgatgtttgatctaaaatgctttgtaaaatcactttaggcttctggtaacgtggacttcggtggtaaaacattaagaacacatagctaaaacacaagatggcaaaaaactaacctggaatcttttcttgacaacatcaagcggatgacagactagtttagaaacagtgcccgaagctaaaccgcaaaggaaaagctgaaagctagaaagactatcacttggattcgttgagcttgatgaagaagatcggtatcgcttattatatacctagcgcaaaatgtataccaacagtgagatgagaactccagataccgcttcaagataatctgctgcttagaacacaaagttgtggtaaaggcaatggtgtgtatctatgttatatattccaaaggaaaaaaaaattgagaacattcatgaagctatagctttaccatactccagcgtttaaatgtgtcataggtgccaaactgcagaccagcataaggaatgatctcgatcagagtaggggacaatcctgcatacaaccctttgattccacgagtttgcactatactcagaaatgctgacctcatatttggatacacctaacccaagaatttcgatatatcactcgtcaatagctgataataaattcatggttaactaagacatcagtgaaataataaaaatttctatgaatatcagagaactccatagatgggtttcacgctttctcaaaaaatgactttatttatgtcaacgcattctcaaaactttatccttttcctttctttctcaaactatattgttgattttacaggagtaaacgttacagagaacccataactatgtcatcacattcttttactgaagaaatattgtacctttggctcaccctgggacgccaatacagtccgcaataggtcaaacggatacgatccaactgttgctgcacaccctgctagtgccccactgatgtaagaaagataagggctcagttgagcatgattttctgcagaagatcagaattcagaattcctgtcaaaaacaacatgctaaaatctatcttttaactttctgaaacattgtggaatgttctctcttttgtggtttgtgtaattttcaaggggtttgatatgtagatgaattatataaagccaagtcatgtcgccataaacagctcatttaaaggagttaaatttacatgaacctaagcgttttaaagtgtacagatcacaccttggatatataatacatgtcactaacagatttattcaaagttagtgatgtaccggcctttgatgaaccagcggcaaaagacttcaccttatgtaagactgcaaattgtatggatgtataaggcacaaccataagtaaagctggaacatttccacgccagaaaccctgccataagcaacttgatttaaaattcagaaagtgtctattagccataagaaatcaattcctaaagcagtctagaataaggtcattcattgagttatcagtgtccacaaaattgtagagagaaaaaggctatctatgagtgctcaaaatctgcagttgaatatcatgtatcataaccgtggagattctcaaacatcagacaagtctaaatcaacgaggctgcatcgtcatcaagatatttataacacttcacattccaactcaacaaaactaagcttaccattagagatgatgaaaaatcatttgccaagaaaagaattggtgtgaacactttgcatcgatgacaacattggtaaatgactcagcataacaaaatacaacagttaacaccttcaaaagaacattatctaggcaacgacttaccgataaaccttcctctctaaagatatccttcgttgttcgaaacaaaccattgtacttcggtttcagctgagaatctttcagagcccatgtagctgtaggctccaactgaacctgaaaatttcaatactttcacttcaataaccattccttttgctcttactttctcaaagcaaagatgtttaacatgccaagaaattttcttgagtcacaaacacatatgtgcataat

SEQ ID NO: 31224 - DNA, 2779 bp, Arabidopsis thaliana landsberg
  unsure (1)..(2779): unsure at all n locations
cacactgaaacatatatattctatgcggagcttatggtaatacgaaagtaccgatctctcgtaggcatgaacatgcccagcaaagattacatcaactttgtgttggacaaaccactcctcaaaagctgctcgcatgctttcaccctccatgaaatgtgcttcattactgttgtatattgggacgtgcatcaaaacaattagccaaggtgttttctccctatcaactcttgtaagctcttcactaagccagtgccattgcggggtatacttcactgtacaacacacagaaagagtcatgcttaaccactcatttgggtaaatcttttacttataagaaagagtcatgcttaaccactcatttgggtaaatcttttacttataaagtaaagaacaaaaaagttagaagcaggggatgttgttgagcagttaaggtattaccaaaaggcgaatagctggagaggacaatgatatgagcagatgcacgcctaacagcgtaccaaagaggactgctactttttgaggctaagtaaggcgtagtgtaacgctgaaggtaattcctgaaaggtgtcacctccccctgtaaatgttttacatgtttgagaactcttaggagaagcaaaaacagaagtcaagcgcacaatcggaatagaaattacaagtaatagctataatgaatttttcattttcctgtcctatatttaatcatatcaaaattcatgtaaccagttcatttatatcttctaatcttcagcatactttcttaagaaccttttccattgatctgtctgagaaactgttaaaatgcaaaaaccgtagcagttcgaaccactcactattttaaattccataggagtcgaatttatgcataacctatatgttacttggctaggtagaaagtaagtacaagatgaatcagatattaaccatgtatggcatgtaatctacttcatgatttcctgcagaccaaagccacggttgataagcggtactacgctccacaaaacgaccccagctatcccatctcacaccaacgtcattatactgatatctatcagcataagaaagatctccaagaaataaaacagcctgagctccactctccatgtaatgttccaacgtggataacgagttgaatgtctgacccatatcgcctacaattcgtaagtaaaactgagtttggctagtacagagctagagaaacaagtcaagtaactctcattgaaacaatactacaaactacctctgcaatgaatcttaaagcacagttgcatttagatcaaactactaacctataataccaaacttgtaggaagcatctggatgtacatgtggtggtgtaacaaaccaaaactctcgagaagattcaccgctttcaatcttgtaatagtattttgtatcatgctgataacaaaaaaaagaaaatcagcatttgtatgtaatctaaccaccaaatataaaatataaactaagatccctcaaggtcagagacaaggcagtgatgaataaagccagacttatacttgtaaaacgtgtagttatggtaagtcccttgagcaacaaactcatatttcccctgaaccgcaccgtaatgtacttggctagaaccaggttcatcaggtgtaacccaagagatgataacagctttaccatcataatcaccttgagttatgtgtacttgttgtggtgcattatatccttttgggactttgaaaacatgatgatcaagtggtatatcaaccgcaggccattgagatcgaataaaactacttgtgattccagattctcctctatataacaacaatactgagctcaagaacacagagattatcaccaaatgattcatcacgtcaccaaatcttgactcagtttttttacctgtagccacaaagaatcgcgaatctgaatgttgatttcaaatctagaatcaagcaaatcttaagatacaatctgagaaattcgttgtgattttaagatctgaagaaatcgaggagaggttatggatattacctgagagatgaaggagatgacatttgggagattatcggctcgatgacattaataagcccgtcggatatgtatgaatgagctatcgaagaaggtgaccacatacgtggagatttatgattggttgagggaaatggattgggtcttaagcattaaagtgcataacgtaaccttttaactaatttgatatttttagaaatagtttggtgtcaagaaaaagtttggactcaagacttccacgatatcgctggagaaaaagtttctaagagcatctacgacgcaaagtttttaatttgatttttaagtttaattatattatatatatatatatatataagtaggatatagcacttcggtttaaaaaatataatagttcatgcggagaaatataaaagaattgatttggctatatatgtcaccaaagagtagttatctttttcggtcaaaggtcttgattcaagaaagaatttcacagttatgagtgtttgaactggaatagttttatgatgggtgaccttccgataaatgattgtcggaactatgcgaatgaggataaagcaagagaaaatatcatgtggtaacaagtctttaaagcttctcggacgtggnnnnnnnnnnnnnnnnnnggggtgtgctcatggggccgagagaggacgtaggatccacatataggaacggtcggggcgttacatagggcttcactctccttttattagtctattagaatagttattcgcgtaaggcgcacgaagccggcaaagatataatggtgata

SEQ ID NO: 31225 - DNA, 1148 bp, Arabidopsis thaliana landsberg
ttttatttcatacatacattttgaacattatttctatatacacaattataatttgcactgaacaagaagaaacagaaaactagtactaactgacataattaaataaaagtgagccggatcgtaattaaactttaaaccgggaaatttgataaccgggaagatatccacgtcagcagcacgataacaccgccatcgctttccttaatttaccttttctctctcgacaaagatattgactaaaagtcaaacagtcgttaccggaatcaatggccgggattaaaacttctccggcgacgattaagctcttcaccgttctattcctcattctcacaatctcatctccatcacccaaattcgtaaacgccttcactttcccattttccttcacacaatacaaaaccctaatctcaatctcacgatcactcctcctccgcgtcgcaaacctacgcgcttcacgtggagacgcattgggttcgtctcgtgtacgagcaatggctgatgaaatcgatcgtggattagggttagggtttataagcagagcttggtctgttggttgggattatatgtggaattacgcttggagaaagggagggattgactacggggagatgtatggtgcgattggtgatctcaatgagcttatgggtttagtgactgagtttaatagagctgtttctaatgctgataaagctagctctgttgctcggagttatggcaaagctcttcgtgtttcgaacaaattgcttcgtcgtcttcttagaatctttgctaaatcggtatggattatcataactcttaaaaggattgatttttagattcatttactctatggatcacagaatctgcttggagtagaagtaaagagtgatactttgctcattagtatacgaaatgaaggcatgggttgttgtcaagaattgtagttagaaaattggattttgattactgcaaatattgaatgtgaagtttctagtggtaatttgtaactgaaatgctctatttatgtgttgagtagctgagcttgagagttgtctcttatgttaggtctcaagcagaagtctgcttaagtagagaaaagaatgatactttagttaaagtttgatgaaagcatgggtgtcaagaattatagtgacaaattgtattttctc

SEQ ID NO: 31226 - DNA, 1023 bp, Arabidopsis thaliana landsberg
ttagctgtctttttgagaagggaggttaattaaatgagactttataactatggtcaaagagtatgcttagttttgagaatagtcaagatgtgaatagagaggttgggcaaaaggttaaatataacacaactagagattttaactacagatgaacaaaaagggataatcttatatatcatacaacttttattgggtgtttgtcctaatatgaaaaaattataattaaaaagttaatattaaatttgtgggtatctttataatttgagacactccttccaaagtgtctttgggaagcaagtgtgtgatgaggactgtatcaaattatttatagatagtgttataacattattgaaaaattataatttatgaggtaaattaattttcaaaacaagatatgtttaaagatataccaatttataaatatactctgaattatatatatgaaagcatcattggcccattaaaattaagcctttaaaagcttttacatcatgtcttgggtttgaatcctagatatcgcaatttttggcaaattattggtgcaaattttaccgggagttccagagtattgtagatagagtcgttcatcgtggtctcatatgttgcggaaagaacctatccatcagatgtcgtacattagaaccgtccgtcatatatccgaatattattggaagagttgaatcgtggaatcgttgtttgcataagttgttcattgtaatcgcacatgttgcatgtagtttacatcataatagaaacttatatagttatagaagattcgtgtttagaggatattctattttccaaatattttattcttattcaatgatcaaatattaggtcataaactttttcataatttttaacgaaatcttcattaataatttgttgatattttaaaatatataatcttgtagatctttataaactagaattatgacctatgatccgcatatttatttagtaaacttattcgttacacactaacactattaaatttttctaatgacattctaataatgtttt

SEQ ID NO: 31227 - DNA, 1395 bp, Arabidopsis thaliana landsberg
  unsure (1)..(1395): unsure at all n locations
gaataataccataagatggaaaacgacatttcaacattaatgattacagtaattaataactgaaaattgcgtttttcacacaaatctatcagttttttttattgtagccaagtatttgcaaaatactccatcttaggatgatactttgtctaaagtcaataccttttttattggagtacaattcatgataaatatctcttctatttttagtggttgtatatattttgtcatttataagcagatttaggcacatattattttgtccaaaacatattgaatttgtaaccatatatatttgacaaacaccgtgattaattaatgattatatatatgtacgtagttaagtaaattcacaaattcacaactttgtgtgtgtgtgtttcttaataaggttttgcaccaaattaatcaaacttgcattaagcccaacaaatttgaatcattaggcccaaaaggcccagaagttgaaggtgactaatacgacgtcgatgttaccgaataagaagcagagttgacgaaataaacctgtgtcttcttcttcttcatcttctttccctctttgccaagcaaaatttagaattctttctttatctctcagcgagaattttggctaagaatctagttatcttcaagtctctccaggtaatatacaagttctctgatttctttaaattccattgacttcaatttttgatctggtccgccattatcgaaactctaggaagctcttaattagtgaacactgtgttcttcttcaattggttaagaatgtgattaagacttctaaatcctgatttttgattttgatttgtagatcaatggccggagttaggttatcgcttctcaagtcaattcaaagatcaataaaacctcatgccactgcaaaatcgtgttctggtctcctaaactctcatgccagggcctttacttgcggaaaccttcttgatggaccaaaagcttctccttcgatggtctccttttcnnnnnnnnnnnnnnnnnnnnnnnnnnnnnnnnnnnnnnnnnnnnnnnnnnnnnnnnncgcacgagctttcagctccaaatctgatgatttcggaagtattgtagcctctggtgttactggctctggtgatgggaatgggaatgattgggttgagaaagctaaagatgtggtgcagactagtgtcaatgctgttactgagactgcaaagaagactaaagatgtctctgatgagatgattcctcatgttcagcagttccttgactctaacccttatcttaaagatgttatagttcctgttagtctcactatgactggtactttatttgcttgggttgtgatgcctaggattcttagaaggtttcacacttatgctatgcaaagttccgctaagctgcttcccgttggcttctcta

SEQ ID NO: 31228 - DNA, 639 bp, Arabidopsis thaliana landsberg
atatcatcgataaaaattatatttatactttatatcggtctattgagacaggtcttatctagtcagtatataaactataattatttttcttttttgttaagctattagaagagattgaagcttaagcatattataaacaccataaattaaaactattcaagacatgcgttgtaaatttacagaaatgttgttgaattacttaaatatgtaaattgaaggttcacttaatttattcagatgttgattatcatttgcaggtctatactattgaagacagatagaagccagactatgccagaaattcaaaatctgtttcattgtattgtgaaaactgaaaagtagtacaagtgagataattttgatcgaatcgccaaattttggtaaaaagaataatataagtaaaaacatggactaaagtagaaacaaaaaacaacacataagaaattactaaaaaaaagatccaccactcactttctcagctgaggtcttcctctctaaaatcaaaattttcagttccctcttcactccaaatttagggtttctcagttcctttttgatcgtctcctcaccttcctcgctttcgagattcaagcttctgggtttgtattttttgtccttcttcctttagggcttttactt

SEQ ID NO: 31229 - DNA, 1200 bp, Arabidopsis thaliana landsberg
ttttgataaacttgcattcacaattcataaactaaaatatgttatctgcaaatcaaatcattatggtctctaaacactaaatatttgaagatataattcaaactcatgtaaaaaaagtaaattcaaattttcagacaaagacatggctaatatggcaaaaaacaaacaaaatgttttgggcccaaagttattttcttctcctaaaaccactaaaatagtaaatagtaaatgcttctctagttttcgtgtatagtattcaaaactagacgactatttccgaatctagctacgatatgatttcaaatatttccaatagaccccataattcatcttgactaaggattcaatgtcatcaaatgcgtgaaagaaacgtctcttgacacatcttttttcccccttattgacacatctttatcgtcaagatttcattacaaaaagaatagccaacaacataaaatcaaagtattcaaaactcatgaatactattctttagtctacatagcatatgccaaacccatgggatgttggaatacgcgggggacaaaaacatctgaaattgacagatctttctatcttctaacaaaagagctccacttcggtccacactctacaatttcaaaattttattttatttatttataacggctacaaaagtatttgaaaattaatataaataatctatatattaaaaaaagatatctctatacaaagaagaaccagtaaatgtctgccatgtggaattcttttatccacgtggaagccttaatctcaatgaggacgagtcgtggtgggacccacatttgtagagtatctcgtcacgtgaacaccccacgtgccactgacatcatcgttacgtttcagcggcgccgttttgacccaccacgtggctaaataatccgtcgtcgtttcagtcacgagtgtttcaaagattcctctctcgatctccgtgacgattccttcgccgtcttcttcaaacgccgattcaatctccgggaagtctccggcgacgagagcgtcgatatcttctagaaccaaacactttgctaacggaaaccgctcgattctccgagataactcgtcgattagctccgatccctttagattcctctgagaccgaatcgggtaatggcaaacccaaggtttcaaatttatgtgtggctttaagatatcggcgaggatttcgtctactaagtggaagag

SEQ ID NO: 31230 - DNA, 1069 bp, Arabidopsis thaliana landsberg
cacctcgtaccgaaatcactacaggaatcatctaactataagttagaggggtataaaatttattagatgggcttcaaatatattttaacattcgttccgttctcgtgtaatattcgacctaaaccgatgtccgcaatacttaaaaaaagatgcagaccaaaggggaaaatattatatgaacctactataataatcctgtctaatccgtaaatggtatttattcaacaatcgccattactataaacaatgactgatgatagggatgacgattaaaaactactatatacttattatagtaacgtcattattcatttggatcaatcaacaaaataatatggatgattagaaaataattaggattatttgggattttttcttttgaggagtaaatttgactatttgagtaactttctcttaaaacattaaacaaatcttacattaatataccagcttaacaaaattatcagaacgcctagcaacttagtggcccaagaaaaatatgtcttttagtgaaccagatttcttcatagataaaaagtttagtcataatccccaaaaatttatgaccaaattatggagagagtagctgagtaggggatatagaaaacttgttagacaaaaaattaagagatgagatgtctaaataacatttaaaataaaaataaaaatttaggagacaaagaagatgagtgcatttaagagagggacagcacatgttttcatgtgcttccaatacttacgccatttttttatccgtatgattcagcttctaatcattttataatcagctataacaattttaatactttgtcattattagaaaatcaaaatcattaattctgatgagttggtttggtttaaagtatttcaggaaaatagtttaagattgcgaaaaaaatgaagagaaatgttgaaattatcaaaccaataatatctactgatacaagaaaatagtgtatataaaattctgaaataaatgtgttatcattaatataacacacgcaacatacatatattctatggtgtgtacagctgtatgtacataaacataatgcatgatggatcatga

SEQ ID NO: 31231 - DNA, 1770 bp, Arabidopsis thaliana landsberg
  unsure (1)..(1770): unsure at all n locations
gctatttcatttcaaattgagagatctattacgagaaagattaaagtttaatcagccataaattgaaaagctaagtatcgcgcacataatacttcatcgttgaacataatacaactctttcatcgttaaaataacacaactactatgttttcgagtacaattgtgaagagtctagtgatctttggtctcactttcatgaaccatctcttcagcatcctcaaacctctgatcattgatttggagctgcagtgtgaatacaaaaggcagatgaaaccacgctcaatttttttaaaacaaaaaaaagaggaaaaattgaaagcagagttttgtaactttgtattacctcaagcataggctgattaagaccttcatctccattggaatgaccaattacactagtcggactctgagatatttgccactctgcatcatcatctgttgcaaacacatagaaaaccatcacatttcattcgtaccattcaagatgaatacattaacacactctttaattcggtctaagtcatatgaaaacattaattacctcctccacgaacatccatctgatcagcactaaacacccaattatgtcctttttctttttcttcttctgaaagatgcaatgaaaccaaagatataaatggctaggtaaccaaaaaatgcaattagtgatactattaaaccagtaattatatgttttaccttgaactggttcaggattcagctcagcacactcgcagaatacatcaaacagcgtctccactttcatatgacaagacaaaacgatatatcagcttaataatatccaagactcttatataatgaaacagccgattctaatagctctaaagattgctacataacaactcacactgggtagagtcagaaggaacaagcctcatctctctgatctttgataagtccaaaacttcagtggattctgaatcagactcatcatcctcatcttcttcaacttcaatcttcaaaacattaaaccaaaaacttagcaaaatgagaacagaaaagacttaatcacacctctcaaatccaattaaaacgtgtaagccactttctcaaattccagcaagcacttgcaacaagcaacattacagtacaggcctaagaactaatcacaatcaacgagaacaacactaattcccttttaagctaccaagtctaacaaaacccagaaaaattgcaagagttgaatacctgagtatatatacaaggagatgaataagcctcaggatctctagaaacagcgtgaagcgatattgataagaaatcaactgcgtatcctttannnnnnnnnnnnnnnnnnnnnnaaattaatttcctgaaatcaaatcaccaaattaagctaagacatttatcttaatttagaaggactagattttgagttaattgccgggcctgtaagagatgtagagagttccgggagactcaatgggacggtttccgagagcgaccgcgacggaagtctgaacgtgcataagttcctcgccgttagatacatccagtaccggtttcccgctgccatcttcggttctgagcgtgaaatctcttaaaccagccaccattttttccgatcacacagaaggaatcgtcaaaaaaaacagagattttcaggcagggtttttcttagggtttctcagaggaatgatttgttacgtttactgatgaagaacactacaaggcttttgacaaaatgggcttcgataaaaaagcccatactacattaaaacataagcccactaaactattgagatcaga

SEQ ID NO: 31232 - DNA, 4678 bp, Arabidopsis thaliana landsberg
  unsure (1)..(4678): unsure at all n locations
gaagccctgatataatctagtgaggatgaatatgaaatttgatcatttcagaaattaattgtatgttatgaatttacttggaaatttcaatcctttggttttaagaccatgttggatggtgttgcttggccagagaacaggcattcgttgtgatgatcattgattcatttttttattggttgcttactttttggcttctaactcaaatagcttgcttacccatggcaaaacgggtcaatacttgcaaatgtgttgctacgccgcaagagaagatcggtaatgttcctactccatgttgtttttgctgtaatgattagtaacatagttaatgatttatcgtcttttagctgtttatctgtttcttacaatacatgattttgttttctgtatgtagagtataagaccaaagtgtcacggaattcaaacatgtccaaacttcaggctggatacctattcccggaggtttgttacctgttactctcttggtactactatttaagatttcaaatacctaaaggagtggcatttcaagttaacatttttgaaagcttctagtgatctgaaatattataactatctgtgtaataagttaatatatcctcattgattctgtatataatgctcctctctcttatttttttgtgtggatgcaaacagattgcaagaagaaggtctgcacacttgttgaaatatccagatgcacaagttataagtcttggaataggcgacacaactgagccaattcctgaagtgatcacttctgctatggcaaaggtacctccttatcttaacttagcttcatgtgctctttgcccttctctgggctctagcatattttaaactgattttactaacactgccctaacatgtattatttcgttcattttgacaaaaatgtataacatattttctgttttggcgtatttggattattaaacgagaacttctctgtaatctaacaatgaaaattattctggtagcatagtttttttgtttgctatactattcacacaggcatgtaatctctagagattaatcatgttttttttctctgacagaaagctcatgagttgtcaacaatagagggatatagtggttatggtgctgaacaaggtgcaaaggtcagtgcacccttcatttccaccttattgcgttgttatcatttctttattatctgcctttgcacgtcacttcaattttattatggatagtcttgaactgctgctaaattcaagagaagatggatttaaacctgtttcttacatgtaaaatcttaaagcttaatctgttaagtttttatccaaactaaccttgatttcacatatgtgaaaagccactgagagctgctattgcgaaaacattctacggtggccttggcataggggatgatgacgtttttgtttctgatggagctaaatgtgatatctcacgtctccaggtttgttttattgctgactattcatctgtaattgatacaagattaagaaatatgaacagctgtttcttgattccacttcttgcaggttatgtttggttccaatgttacaattgctgttcaggatccttcatatccggtaattgggcatatagaaaccaaattgcagttgtagtcttctctacttttgctccattttaacgtggaactatgctgtctcgttttttttggattatacaggcttatgtggactccagtgttattatgggtcagactgggcaatttaacactgatgtgcaaaagtatggaaacatcgagtacatgagatgcactccagagaatggcttctttcccgacttgtccaccgttggcaggacagatataattttcttctgttccccaaataaccctacgggtgctgctgccacgagagagcaactaacgcagttagttgagtttgcaaagaagaacggttctataatagtgtatgattccgcctatgcaatgtacatgtctgatgataacccacgatccatcttcgaaatccctggagcagaggaggtaatagactgattgattataacattaaaaggtccatttttcaacatctttcttcatgtgtacaaccgcttacaggtcgctatggagacagcttcgttcagcaaatatgctggtttcactggagttcgacttggttggactgtcatcccgaaaaagctactctattcagacggtttccctgttgccaaagacttcaatcggattatctgcacttgtttcaatggtgcatctaatatctctcaagctggtgctcttgcttgccttacacccgaaggacttgaggttagcttagctaaagagagatctcaaatcataaccagttcccactagttcagatatgcaaaatgatttattttgttgtcttttgaatcattgcaggcaatgcataaggtgattggattctataaagaaaacacaaacataatcattgacacattcacatctctcgggtatgatgtatatggaggaaagaatgcgccttacgtatgggttcacttcccgaaccaaagctcatgggatgtgtttgctgagattctggagaagactcatgtggttacaactccaggaagtgggtttggaccagggggtgaagggttcgttcgtgtcagtgcctttggtcacagagagaacatcttagaggcatgtcgaagattcaagcagctttacaaatgaagaaccttgtttgtaatcgttcctcatcatcatcaccctctttaatgacatgatttgagttaaaataatgtcgtttccattgttttctggaatttgtagaagacacttttgacaccagtgtttcaagcaatttggcaaagtattttaacaacgaaatcaaagtgcaaataagtgaactagtgtggaaaataaaatatttaaattggactgaggaagaacgtcaaaaaaatataaaattggattggttaaataaatctaaaattggaccgggatgggtgttttcgtaatttaggcttgttgagccaccgtgtgggcaaaaatatccaaaaacacaacacaagtgttgtcttctcgcgtctctcatcaacgagaaccagtttttttgttgatcctatcaacaatgacgaaaatagagcttcgagctttggggaacacagggcttaaggttagcgccgttggttttggtgcctctccgctcggaagtgtcttcggtccagtcgccgaagatgatgccgtcgccaccgtgcgcgaggctttccgtctnnnnnnnnnnnnnnnnnnnnnntccccgtaagcacttcttcttcttttatcttttctaaagattactgattcttcaatactaattgctgattctctgaatgttgagactaatttaatcgttaaagtcaaaaattttattggaaggtttcatatttacttttttatttggcatttattgtgtgtgtgaaggtattatggaggaacactgtctgagaaaatgcttggtaagggactaaaggctttgcaagtccctagaagtgactacattgtggctactaagtgtggtagatataaagaaggttttgatttcagtgctgagagagtaagaaagagtattgacgagagcttggagaggcttcagcttgattatgttgacatacttcattgccatgacattgagttcgggtctcttgatcaggtttaccactttatttctcttgggtttatcactttcgttgtttgtgtctcaaacctttactaagtgttcattcattgctgccagattgtgagtgaaacaattcctgctcttcagaaactgaaacaagaggggaagacccggttcattggtatcactggtcttccgttagatattttcacttatgttcttgatcgagtgcctccagggactgtcgatgtgatattgtcatactgtcattacggcgttaatgattcgacgttgctggatttactaccttacttgaagagcaaaggtgtgggtgtgataagtgcttctccattagcaatgggcctccttacagaacaaggtcctcctgaatggcaccctgcttcccctgagctcaaggtttggcattttacaaaagaatgtgattcttgttaacatttctgtagcacttgtattgatacaccgtataagagactagtgttaaaacgccattcgtgcagcattctctcgagcataggcaggttaaattctatagatgctatacttctgagactgacaatctttgtttcttaactcgtacaatcattgtgattagtcttcataggcaagattagagacacttcagatagttcccaatgggtattaacatgttagttggtctttgatgagtattcagtagaaaattaaacagattcacatggacgctggtatttagttgaattgatgtttggaagagtaggggatgctcttgagttagttttggtttgttctctgtttgatattttgatttagtgagaagtaaacgaagatactgacttcttaacaaattgttctcaaatatgaaagtcataacccgttgctgcttttattgtcttatgtagtctgcaagcaaagccgcagttgctcactgcaaatcaaagggcaagaagatcacaaagttagctctgcaatacagtttagcaaacaaggagatttcgtcggtgttggttgggatgagctctgtctcacaggatattcaagcttggtatttccttgtcaagtcccaaattatgtggaagtggagt

SEQ ID NO: 31233 - DNA, 1360 bp, Arabidopsis thaliana landsberg
atgctcggctgtataactccagttaatccactcgaagacaaatttttgtttgtatgaccggagacatatcaaagatacgtttgtcgtataatttgataacaatgtgcataatataaattttcttacaatgagatgattcttggtggtgtggagatatctataacgttgcagcttacacccatccatgaaaactgtttaggtacacatggatcgccctgccagctgattctactcaattgataagttgattgaattttcttgatagcaatgactggcaaacaaaagaatcaagcataaaatatgccgtattttattactactttattcttttgaataactaagaggttctgagcctaagcacgtacatcctcttaagccggagactaaagcatttaaatatggttgtctcgcaattgccaacttaatacgttttatatatgtgcataaaactacacggctacataccttcatccgtatttgtgtccgattgtggaaattgtatgacgctaaaaatctctatagcattcattagtggtggtagagtcgacttcggtgtttttgacagctgcacacgacatacccctccctcacattttagtggtgcagggttggataaggttcttgcttcaaacttccatggagtataatcaatgtaatcaacaccattcgccaaaattttgaattccctagtttcattggcctttaatttttggatctcagcaaagtaaaggtaagcataagtttcgtcatcagaggattccaaattccatgtaaaggtcaatggctcgctgacattagtgggtatggaggcggtctgaattacaccttgtggcggcttgtagccatccgaaaagccacttacattccgggatgtgtttatttgagtccattccggttgtgaatatggcatccaaacacgatcatagacatcttcgggataactgcgacactcaagtatcaagtttatgtcaatgagcaaaaaaaaacacatggtactaaatataaagtactcttaattatgttatgttgttgacataccgtattgcctcgtctgaattggtgaagtataagtgcgccatactctttaaggaaccggttcgagcagtataagtatcatatcgcaaaggtcttagttctatggctgatatcattggtgtactcgtccctgttttgacgagacatatgtccaagatgttagaccttgtgacgtgaacgatctcctcgacaactccatcacctacatccgctattagcacatctacgcttttccatatatttggaccgagaaagaggtcaaatcgcggagaaatattaagaccgtcatagtttccataatagaaaagagtcctgattagatact

SEQ ID NO: 31234 - DNA, 1217 bp, Arabidopsis thaliana landsberg
agaattttactctaaaccaagcctaacatcaaggctgatattgtgcacaataacacgtacaaaatttcattttaaaataaatagtaacatctctcgaaacagataaggggtcaatggtggttatattttttctttatttgtggaggtgatattatgtaatatgctcagtcattgaagaccttttgtcgagagaagcggtcgatgttgctccactttagcgttaacgtttacgtttgcaaataataagcaataaataaatcgacgggcaataattcctgctccatatatgttgacctacacctgatgccattttggaatcttccaacgaaaattatttaattctaattcaattcaatatattatccattttgtcattctacaatacaaaaaaaaaacaaagtaaatttgaccaactaatatttatttactgatttgattgggcacaaactcacaagattttggacacaatatatacttctaggtcaacaaacattagtatttgatcataaataaataaacaactatttccacttgttgttatgcgttttgaccgacttttaaaatatcacgttctagaatagataacgttttggtataaaatcagtctcttgttctagtggacacaagataaacctcaaaacaaactgtaaagtttattaagaaataataatgaagacattagttgtgaaatgtttccttctattggctcttgtatgtagctgcagagcagcagattcaatatggcaactctgcaacacaaattcaaacatctcagcaagcagccaagtctccaagaacatcgattctcttctcgcgacgcttgtctcaaagactccttcaaaaggtttcatgaccacaacttcctcaagttacaacaacaaagagaaagtgtatggacttgctcaatgtagaggagatatcagcaataccgattgctgcacgtgtatccaagacgcggccaagaaaatccgtgaagtgtgtccgaaccaatccgactcaaggatcttgtacgatttctgcttcttacgttatagccaagagaatttcatagggaagcttgacacgggggctggtcttatatacttcaacgtcgctaacgtaaccgaaaccgaccccaaaaagttcgataatgagctcggggcactctttgacaaaattaggtctgaggctgttttacctaaacagtaaagggtttaggtaaaaggtaagaacaaaaa

SEQ ID NO: 31235 - DNA, 3316 bp, Arabidopsis thaliana landsberg
  unsure (1)..(3316): unsure at all n locations
ttgtaaaagctcaagacatctacctagactatcaagatgaggaaggcttttcggctgcaatgctagcggccatgaatggccacgttgaagcatttagagtcttagtctacgcaggcgcagacgtgaagctgtataacaactctggcgacacggtagtctctctgtctgaacagaacggtaaccgtgacgtgatagagaaggtgatgctcgagtttgctctcgagaaggacagcagaaacatggcaggcgggttttatgctttacactgtgctgcacggcgtggagacgtcaaagcagtgaagcttttgagtggaaaaggatacagtctagacatcccggatggagatggctacactccgctcatgcttgcagccagagagggccatggacatatgtgtgaatacctaatctcctgtggcgcaaactgcaatgctaagaacggaagaggggaaaagctgctggatctcgcgactggtgatgcggagaaggtgatccgtaatgagttgtctcggaggtttgtgatagaaggaagcagtgtgatgaaacacaccaagggagggaaaggaaagaagcatgggaaaggattgagaatgttggaatcaagtggagtactaagttggggaaagtcacggaagaggactgtggtgtgcaaggaagtagagatcgggatgagccagcggttcaggaagaaccgtaaggggaaaggcgatggagcggaggaggaagggattttccgggtagtgactacggaaaacaaggaggttcattttgtgtgtgaaggtgggttggtgtgtgcagagatgtgggtgaggggaatacgacttgtgaccagagagacaatttgtggaagaactcagactcagaattagtgttgtttatgtatgtatataaagaagttttgagaaagggagcttcattttgaaggtagtgtgcttctattgtgttggggatgtttatagttgttgggtttggtatctgcagtatatttgtgaactgtgaagtagttcgagttgcacatgaatgaaaactaaaacatctcagttgatttgagattctccaaatttgattattactttgtccaaaacaaagactattctaaacttacatggattcacaggcttagatccagcactaaaattcggcatgtgatacctggatatcaaaaaacaacatgaaggtcctgtctctttcaaaagaacaaaagttacaaaatgtttaaaaaacattacatcacacaagaagtcagcacttttgtttaccagtcaccaactcaacaagcaataaccaacagagataaacagagaagctttgaagttctaatcactattgtaaccaccatcatcgttatccttatcttcgtggtccttcaccactcgttctatgaactgtcttcgaactccagccatcacagcttccctcgaggagtcatcgtctcctcctttgccatcgttaagaactggctctgattgacacagaagtaaggctacacctgaaaaaccaaatcagttgcaagtatgtcagacatgtgcctaagaccaatctgctcaaagcatgatacaatcgccaatgtggtcacatcaggtctcagatcagacaaaggctagagatgagacatgacataatcatcaaacacaaataagcacagattacatcagacaaacaagggttcattcaaacttactctctggggtgcacctacggccaaagctctttaagcctacatgagttcctttgatggcgccatggtggtacaccagcaaggtaggaagattgcaatcagggtagttcggaatacaatcagtagatattatcttaacgaactttgttgctgggtatctactacccaattcgtctagacaacccaatagcaaactacattctgcaacactatcagagaacaacaagaaataaacatgagttaatagtgtttcaagcatgtagtaaagaatggctcaacaagagttcacgaatacttgaaaaaacatacccatctttatagagacatacaacaacccaatcttcagcagaagcttgcgtaacctccctcacgaaatcagagcccgagatgggagtcactgttccatatcttttaactttagcagcctctcttagctcagacaacctcttcttcctatgaaagcatcaaaacacattagtgcctgtgaatcatgaagtgtgttgcacaattatgtttagcctattcatcaacatctcaaataagatactaccctcaattgcattcatatccaaaacacaaacgaatcgagaaaaaccagagcttgataattgcattccctagctacatggcaacagatccgagaaaattgaattcacaatccaccaaggcaaggattctccagggaaagttaagattgtaaatacaaaaatcagaatgttcgattcgatctacgaacctgtattcttcgagaaagcgatcatcgtcgagatctttgtcgtcctcaagatcctcaagctcctcctctgtcttcttatcaaaccatgcctgatccttaggagctgaagactcgtcttccgccggagtatacgccggaggtttgaaagccggagccttctccggtagattccccaatttccgctggatatcatcccattgagttgacgctccttcaatgtccttatacacgaaatgataatccgccatcaaagtataaccacctacgaagcttcaaagagaacctttgaatctgagaggagaaaaagcagattgctttgacactctgtgatcgcaatctcgttctttctctggaaagacgaatgataaaaggccatccccgaaattggtctggctaaaccgacaattaccatctggtacatttcgaaccgggaatatttggtttaaaagccggttagatattggtttattattctagagtaatgtattagactcttaaccgttcggagggttcgtatatatattatgagagcatgtatttttatggagaagatccagagataattaaacaaacagtttagcaaaagattttgagagggagaaaaagggcgatcgattagggtttttgtgttttcgtcttagtatcgaagatgatcggagctgtgaactcggtggaggctgtgataacgtcaatccaaggtttatcggggagtccannnnnnnnnnnnnnnnnnnnnnnnnntttgagaggagctcaagactcgctccgagccgaaccaggtgttaatttctctactcttgaccagctcgacgcctcgaagcactctctcggttaactgtatttcctgtgagttttaacctattggtagattaggtttttgttactagtttgtgatactttcg

SEQ ID NO: 31236 - DNA, 3511 bp, Arabidopsis thaliana landsberg
agtgcacatttaaattgctacattatactcttatagtttgtattttggtacaaactatgaaatttaaccaaacaatacatgtttggctataaattttagataaatttatagtgtaataattggttgtcatacatatagatatttagctagatctcctaatacatattaacctgaatttgagtattttaatttttaagagatctagcttaatatctttactttaaaatgttcggactataaaatatgatataaacttgtgtgtctatatgtgtatagacataaatagccgacataaattatactcaagattctaaatgtttaaggggtggttttttttatgaaaaaatattcaaaaaaaaaaaaaacgcatgatttgataagaaatttgagaaagaaaaatagagaaagtgggtgtgggtcaaaagtgtgggtgcgtatttgggtagtaaagagaaatgggaaaaaaagagggcaacaaatcaaaatggtcatctaatcaccctcccgcaacttcatttccacactcaaacttttgggcctacccaaagttcatgtctttttttcttttgtttcatctttttcctttttttcttactatttctttgatgaaaatggtattttgagcaatttggtaatcttattggactccagtctcttataactgtggtgacgtgtctataatatatcagagatattgatcagatcatgagttgtttttgagtctctgtctctgtttaaactaattagtttaagcctcacaccaacaacagacaattatgacagacctaacaaattaattgtgctaaccgagagacatgcttgtagctagaaaagatcatatatattagtgaacataagatgttaacattgtttgattttggatgtattaaaaggtcttgcatgtgcatctgtccaaaaatatactccttctcttttgtgttcatgattgataaaataaacgatcacgagttcaagggactaatctctcttcacaacaccaaacaacctattttgatcacaagctttcacagaaagattctattgttcttgagatgttatgtgactgcttgtagcaaaacatttaagtaaagagactaatttaagctcgttctgagaaacattcctttgcaaatttaaaaaattaaattaactctctgacaaagttcaaatttatttttaactcagttgtttaaacagctagaaaaacaaagtcaatggtcaagtttccaagtagatgacgtcctcactctcatccacagagtacttcaagtcgaaatagcactccttatcaaaccaaatgtctggtactcctttgatttcaacctttcttaggtcattgcttcccatatcgtaacacaaaatatataattgagaacacatgtttaccggtgccaagataaccttgccatcttgagttgtaccttttacgaccagttcaatgtcatcatggactaaatgcttttgacaaggctgtaaaaccagcctcttcttcgaccacttcttcatcccagcgtctttcaatacccataaatccaccagaaacttttctttgagatgggtgtgatcgaaaacagctatttccccatgatactgtataagacccgccttcatcctacctgcaggcagagccacatccccggcctctagagttactatgatggtagtcaactcttcagacgtaatgtcgaaactcacaacagcacaagtgtccatatcaagccaagccatataatatactaccgatccattgataaactgtcctactgtggaaggagcatgaggatggtaactctccagcgtacgaacctttctccacgaacctccagcttctagaacaaagacccaatgctctgactttagatttgtgaaaaatgcagaggatatcccaatcgtgcagactagtttgtactgatcattaacaggatcgtgcccgatataataccggatatttttcctttcatcttttagagctatgatgtcggattttatggcgggtaaggtcaagcgctgtctagtggtggggttatagatacatgccttttctctaactgagaaacacaacaagccacggacaagattcaagaagaagcctcccattcctgtgaggctcaaatcttggtcgaccacataacaagtgttgtctggagacgttgatgataatgatagcagcacacgttgcccgccgtgatccactaaacacatgtgtatatgtggttgtttttgtcgtgtgacagaagtaaataaactgttgcaaaaatatcgacaagagatgagagatgaccactgcttggagatgcatttgaacctcaccatggactttgctggcaatctcattacaatttccatcaagagatccggaggaatctcgcacgtgtattttcttctctcttatacaccaaaaaaaaaaaaaaaaaagcaaataagagagatttgtacaagtttgagagaagaatcaagcaaccttgttaagcaagaaaagtacctcgtgtgctacacatgcgcataggaagtttggcgggaagcaatgctaatgagttgtctcctttttcatccattatcttcaaagagacaacaaaacagcaattggaaactcaaaacaataacatgaaaagggaagtaaaaattcaaactttcatacagtacataaatacaacaaactaagccaagccattgatcccaaggaaaaactacgaattagggagattgcataaaggaagcgtatttatacctgaagttgatcggaatctctgagagagacgacctggggaacgctctgacattcctcctgctctgactccgccgcttgtttcagatccctcctccttctcttcacctttttaactcttcagctcaaatttaattcaaaaaaatccaaactttaatactaaagttacgaccaaacaaaagaaatcgatattagggctttgaagttgcgcagtcggaagagagacctactttgtgtagtctttatctttatgaccaaagacaaaggtaacataataaatggtagaaaaggaaaaggaaaataaaaaggaaaattaaggaagtaataaattaatatttacataatcacaattcacaagctaaccgcttggttcacgtgctaattaaccactatccttaattggtttggttcattctatgctcggatttgcagataataatgacacatcgatttatgctttgagccttgatgagttttacaagattagtgtgtatagaagagcacagatgattattttttggcacatgcttgtttgttagagcaggcatcatcttgttgtctctacaaaagatggtgaagaatgaagcagacccttttaactttgaccatataaacaacaactgtcattcatgaaaccgagataagcataaagcgctttctcaaattagtagagtgcttctcttttgtgttcttgattgataataaatgttaacgagggttctgtggatttatgggtaggcgtctaatttgtctgatgaaattaaattaacttaactgtttttctta

SEQ ID NO: 31237 - DNA, 624 bp, Arabidopsis thaliana landsberg
gggattttcatacctatattttgttcagagtgtattttcgtacctaaacaattttgtaaggttttgtacatacctaaacttcaatataatttgaatctcgtacctaatctttataaaatgggcaaaaatcagagtcaatctaaccgatgttagtcaacaccgttacggtgctgagtcatcgtacacatgcatgatgacgtgtctctaaacgatggttttgatatgtcgtcttaatgtttttttttttttttttgcaaattggagattagagctcataaccctttcctgtatgtgaagcatcaattaccaattaatccaacaacattcatcgaatatacctaaaacgttttaaattaaaaacacgcaaagttttgtgttttaaaattgggggaaattatgaatactagggtttcgaattgagaaatcgatttctcatatcttcttcttcctctccaaaaatagatgaaatgaatcgattaagaaattataacctctctttcagatttgggttttgttcattcgactttttgggtaatcgattttagtcccccctctctgattttgtttccctctacatctcttgcgtgtgtctcactagggcttttcctttttctgtagatgatg

SEQ ID NO: 31238 - DNA, 3363 bp, Arabidopsis thaliana landsberg
  unsure (1)..(3363): unsure at all n locations
aattctttgtttaaacacggcgaactcgaagacttcagtgttgaagaaagctcttcttttatccaatcaaaaaccaagtctctaaagagatattacatatatctttatatagctaagtcacaaccgactttagccttaacaaaaccctaattaaaaagtcaagttcaacaaggaaaaggaaatcaaattggaaaaggaaaacttaaacaagaaacaaaagaagaaataaagcttatgtcttgcataagaagcaataaggatgatgctacatcaataaatctttcaaaaactaagagaattcttccgttgcatcgagtattttcgtcaaggtaagtattgtttaaatgcatgtttttttttgtctaagttttatatgcatgtttataacgcaaactacattattgaagaacaaacatattgatttatcccgtgatcagtgacatataaaaaggctgctaaatccatagaaaagttgttttagagagagggatacgtcatacgtggatgattgggtaattcaagtaaactgagtcactcttacaaaagtaagaatcagattggagaaaggtgggagaaatagttttgattaagcactttaaggattctctgacccctttcacacactctctctttctctctaattttcttttcttccacttgaaacaaactagagagattagagagagatactatataggaaggcaaacacacaaataaaattattttgattatataacccaatttgcacaattccccataaacccatatttaaggaacttgagtttctaattctgctggtcttttcataagatataataggagatataatggtggctcatgagaggatccataatcttcaaaaaccaacgtgcatttgcattatctggttttgcctcttggcttctctctctcaccatggaagagcatcatcaacctcatcatctatcttcaatctttctctcccacaccaacacccattccctgaacatgttgttcttaatgttcaaaggtataacttttctcttacatttcatttgatttcatttaagggtttgattcattttcatgctttatcttgtgggtctttctcattctcaagtaatctttgaaacctctgtttttcttttcttataatgacaatatcagaaacagagcaatcttctctgtttctttcccaactaacattttaacatgctctgtttcttaatgcagaaaacttaacgattctctctcaagaagacaacttctcacttatcaacaagacgacggcaccacggcggcgtcaccaataccttcttgcatcaccggaaacccaatcgacgattgttggcgctgcgacccaaactggtcggcaaaccgccaaagactcgccgattgctcaattggtttcggacaaggaacactcggaggaaaaggcggtcagttttacctcgtcaccgattcctccgacaacgacgcagcgaatccaattcccggaactcttcgacacgccgtgattcagccagaaccactatggatcatcttctccagcgacatgggaatcaaactcaaacacgagctcatcatcggaagctacaagacaatcgatggaagaggcacgaatatccaaatcaccggccatggttgcctcacgattcagcagnnnnnnnnnnnnnnnnnccacaacgttcacattcaccactgtaaaccctccggcaacactttggtcgcttcgtcgcctacacatgttggatttcgaggagtctccgacggagacggaatctcagtatcagcttctcatcacatttgggtcgatcactgttctctcggttactgtgcggacggactcatcgacgtcatcctcgcttccaccgccgtcacaatttccaacaactatttctctcatcacgacgaggttatgctcctaggtcacgacgaccggtaattatgtccacttatttcccaaaaagccccttatttactaatcttccaattaaagagttaaactttaggatttatcaatttaacccaaatttaatggcttatggtcatggtattgtattaaaaaggtacacggctgacaaggggatgcaagtaacaattgcattcaaccatttcggagaagggcttgtccagaggatgcctcggtgtaggcacggttatatccacgtggtgaacaacgacttcacggcatgggaaatgtatgcaatcggcggaagtgctagccctacaattaatagtcagggtaaccgttacaccgcacctattgatcccaatgccaaagaggtataaattctacttacccgtctattatgtatcaaatcgatttcacaaaaaacgtacataaccaagcattttacacataatgtttttgaatgtttactacttcaaagaaaacaagttcttgaattcaaatttttctcaaatttggtagaattttttaaagttattatgggaaagtttaaagttctcttaaaaacaggataagtatttgtgggatcggtgtgctttttctgacgtgtcatgcaatattggtccacttgcgcgttaatccctcgcgccggctgagtgacctgagtcttatatgccggttacattatttgtcgtctacgacgttgacacttaacacagtcacatcctccaaatcaaattaaatgaaacgagaaacattgtagtgtgtctttgactttgacgctttggtgtcgcgtggttctcacgttactgtgttgttttgtaaaggtaacgaagcgcgtggactcaaacgagaaacattggtcgggatggaactggagaacggaaggtgacgttatggttaacggagcttttttcgtgccgtcaggtgacggagtgagcccagcatatgccagagccaccagtgttcagcctaaagccgccgcgatcattgaccagctcacggtcaatgccggcgttttcggcgatccaaggtattattatcaaatcatctattcaattgcttcctccacccaaactagcatctactttattacgtttatttttgcctctatacttttattcgattcttttaattatttctaacactatattctagactatataacattcaacattttttctgtagaaacgtatatttcctagttatttcattattttgtgagaatttcaaaacgttggtgctatttttagtaatgaatttataaaaacgattgctaatcctaaaataatttgggtttgtctattgtgatatttatttaatattgctttacctaactgactttttttcaaaatttgaagattaggtttcttcacttaatatattcatctttttaatttacaaatagatgataaaaaatttgaaagaaattttatatttttccaaaattataatttcggacgtgaagggta

SEQ ID NO: 31239 - DNA, 1879 bp, Arabidopsis thaliana landsberg
gtatgaatatgtacaatgtacaatcttactttgacggatgagagtgggatgtggtagacaccaaatgatcttttgaatttttcacattgcttttcctatatattcatttattgatgtttaaatcaatgagaattctaaaattatacttatcaattttcttgagaagacatgtccctcctctgattttgtgatatcatgtaagttggggaaatattgaggtgtagtaggaagttttaaaaacaattggtttgatctaccgcaaaaattaaaatgcatttgatatttctgagtttatttatggtggcttgtaaatttctcaatgactcttccaactgttaaatcactcgaaactttacaacatttccaatcaaataatattttcgacaagcgattcaaataaaatttcgtttatcaaaaatttgcagaaactaaccctttctgaccgtttagtgttcgatcttttttttttttcggcaaagagtgatcgtcgatcatatgctaaacttttgtacctaaccctgaatcctgatgggcttatacaatttttgtaaacttcaaactaatttatttgtatgtttactctaatattcaatcaaattaaaatgattcttatatatatctaggtccaagtagaaatatctctaaaggattgaacgagtcattataatttcttttcaaagaagatgcattcaacggtttgaacaaaaaccactcgtgagttgatattgccaagtactttcatcgagtactagcaaaagtaaatttgtttgagaaataaaaatattatttattcgcttttgattttaaatcaatatgtggcatttaattatatattacaagaaatatgttttgatttattttataaatctacattaaaagaatatttgaattcaaattaactataagtctaaaagcataaacatagaaggcatcatagtgaagaagaggacgaccgaaaatatcttcctttttaaaaaatatttcgtgttatgaaacagattgtctttttatacatcgacttgtgttccacacaacgtgtatatatacaggagacaaaaaaaaaagcgacgttagaccaattcagcttcatacacaagagtacaagacattcaagagtcaaaacaaaaaatttctacaaagaagtatataaaattactagtatacattttagtgaattttgccaatcaaaaatcaatagtaattttttcgaaattcaaagttaacgatatcacccagggaaccttattgcatgttctttacatataaatacacacaactttgcataccaattgaagttgtaaaacttaagagtttagaacttcagattcaaaaaaaatccaaaagaagaatgtatatggttcggctaataactttgataattctcttattcactacatcatcaaacaccgtcttggctcgagtactacacgattacaaatctctaagcagaagtaagtttctactttctagtaatgagaatttcttcttttctctctttggttttttatttaaacatttgtattaaaatttgttttgttggagtaaaaacagcagaaggagtttgggatcaaaaggtcctcatggaaatcaagggtgctgtagatcatagttattcaccgcgtgcgggccaaagagttgttccacctaaagtttccgaacccgaagactagcgacaactaattggtggggtgcaaaacgatccattcaacaagaaacccaaaccgaaatcatggagtaatcaaccaaagcgttgagtccttcttgaattttttcttttccctttattatgctaataatgaaaatcagcttttctcatgtttgggagcaatctctaccctcttgtatttccgttgctttttgaatcttggattctactata

SEQ ID NO: 31240 - DNA, 717 bp, Arabidopsis thaliana landsberg
atctagagtatacctgtaacttacgtttataaatccattaaaacgcaggaggctaaggattacaagagcatggttaagcaacatttggacattgagacaatacagagaaagttgaagcaaggatcttatgattcttcaagcctcattttttacagagatctacagcttctcttcacaaacgccattgtcttctttcctttatcttcctcagaatcgatggcagctcacgaactacgagctgttgtttctcaagacatgagaaaagagaccggaaaagctggccccaggttaataaaacaggaagcatccggtatgcgtagtggcaaagcggatgctgaaacatcagactcgtctctctctaggcagaattcttcaggtcctcttgtcgtttgtaagaagaggagttctgtttccgctaaggcttctccttcgtcatcaagctttagccaaaaagatgatacgaaagaagagacattatcagaggaaaaagacaacattgcgactggtgtaagaagctcgagaagggcaaacaaagtggtcgctggtgctgcggatgtcgctaataataccaacacgggcaaaggcacggacaaacccaaacagacagagatcgaaaacacatcatcagaaggataatatgtgataacaagacacagggacaacaaacaagaaaagggcttcattggataaaaagaagagagcggctgatttcttgaa

SEQ ID NO: 31241 - DNA, 1624 bp, Arabidopsis thaliana landsberg
ttgttaatagaagtgtgtctctagtctctctagtggctggagagcactggaatgctctgctcgtatcggaaaaagttgtcgggatcaactctgctcttgatcttaaccaatttctcgaagttatccttaaaatacttaactccgtacactttaccttcctcgtacgttgagtttaagctctttccaatgtcaacgtctctatagttcaaaaacgcctctcttggattctttgacacgtaagggctcattgcctcgaacaatctttccgtctggctcaagcaatctttagccactgcttcacctggcacgaaccagtttgctgcgtactgaatcttgaacatgtttcctgctctgtgagggaaagcggtctcggtcgatggaatctcactcatcctccctccgtaagggttaaaagccattgtgacgttctcgttctctgtcatgatcttgaatattgactctaaaccggttcgtgaaatcggtttttgaacgtaatcggattttctcttgaggtagatttgcttttgtgggatccggtttagcatattcgttgttggtgctgtaccgggtgagataccgagccagaacagaaccgaatcgatccatttcatttcaatacactctgttttgatcagaccaagctcagggaatttcgcgttcataatctctagaagattcgatgagtttcctaagtacattcccatgaaagaagccttcacggttttgttacttgagctcaacgttaatcttacgaacaaatcgttatcgatcttgtcggcgatctcttgccatttcgctgcaagatcggtagggattactcctctgtttccgattgtttcaacgttaaagactgtaactttctccgggacaggaactagcttgatcttccaagctaagacaacacagaagctagcggctccaccgcctcgtaaggcccagaaaagatcttctcccatggaactccggtccaagactcttgcgttagcatcaacaatcttagcgtctataatgttatcaatcgataaaccgtatttcctcatcatgtttccgtaacctccaccgctaaaatgcccaccagcaccgagaccggggcagattccagcggggaaaccacggaggttgttgcttttattggcaacgttgtagtagatctctcctagggttgcaccggattgtacccacgcggtatctagctttggatcgatctcgattgcacgtagattaaacatgtcgaggacgacgaaatcaacggttgataagtaagacattccatcgtagtcgtgtcctccactacggatacggagctggaggccaagttttttggcgcagttgattgtagcttggatatgagtgaagtgagccgcggctacgatcgctaccggtttacgtgtagtaccgttgaagtaacggagattgcggacatagttgttgagaatggtgaggaagttagggttttgttgcgtgtatgtgaagttttggattgggacggaaggtttgaaaacggttacacattgtgtgaaactgtctttgagttttggtggtgctgcgaatgacccccccattagaaggagaaaaactgtgaagataaaaatttgagttgttgaagatttcatttttctttccc

SEQ ID NO: 31242 - DNA, 2846 bp, Arabidopsis thaliana landsberg
agcctacaaacactaggcgaagtacccaaagcctctgtgatctaaagttaacagtgctactccttaaattatcatgaaacaaaggtattccctagcgaagagaaaaaaaaaaaaaacagttcaatttgcagggaaattgtaaaggtttaaagacaagagtttgtcagttttcagagaataagtaccctcagcttcagtgttgatgacctcttcaaaagtttaattatgggaacataatgttcgtgagaagaatccagcaatatcagagatgcctcagcggaaaaaacagcagacacagttgggattctttgccattgttcctcaactccattttgcacatacgtccgcagaagcctaagtacctttacatgcatattcttcctacaactctacatcaaaaagttttagttaaacaaataaattctaacccgtttcctcagaagcaaatttgaccaatgagcctttgcaaagacagacccgtcatagagatacattaaaacataaaataactatcacctcaaggacatccacaaatatccctagagtttcgtagcccagttttctgatcccaaaatctgctgaagacatgctcgcaaatgccactgcaagcaagcctaaactggagaactccacaggttcaatgtatcccatggacaataattgtactgagaatcgcaggatgaaaaccggatcatatcgttcaatagcaggtgagcatttctatacaaggaggagggattagtttgaaaatgcaagtacacggaacttttaactgaaaattaaaatgaaagacaagggtacctcgcttattggatcatcatatatgtaagtgttatctgatgcctctgcagttcgcccataaggaaaatacaaaacagtttgagcacatcttttgggatcaagacaaagattctctttgaaaagactctgcctgagatcttccactatatcagaatcactaccgtcggaaggcagtccctctcttattttcaaggctgcattaccccacaaataatcttcagaatcattcagcgtgtgttcgccaacaatcaacttgatatcatgcatcagcttgtagctctgcaagtcgatttcgctcggagttgcaccataagaacacaaaagacgaaagtgcaaatctttcaaaaagattcctgaatcttttccacatttgcagagcagcactccgagaattttgagaatttctatctgactcaaataatactcaggtgcttcgagacaacaattttcaactctgacggaatttagatttgggatgataagaagttttagaatgctggagacaggcctgaatacttcaccagtatgtgaggatgaaatggaaagagaactgatactctctgtaaactgagagtgcgatactaaatcttggaaatgatacgagtactttcctctagacaagaaggagaaaatttccctcagtatcttcaatgtcttcgagtccttaaatctataccgaagaattaagttcatcagcctctccaggaaaggaagggaatccaagtgagcaagctcctcacacatgccttccaaaaactttagaatacttctcaaaatgaagtattcaaggcttttgcacaggaaccaatatttgtcttgctcctccctttcggaattccctttataataaccatcagatctctcgacaacgcattgccaagtattaacgaaagcatttagtaacgggtttaataaactctctctgttggatcccatttctggagaactttccttcacacaaccacctgcttgacgttttaaatgatgcatacagctatcctcgggaaacaaacagatccttgaaagctctacttttgcaactaaacggttagtaatattaaacatttggtctactgacttaacgtccacttcttttatctcgtaatccaacatctctttgccagcactagtgtgaggaaacatggaatagaataccttcaagagatcgtctgttttagttggactttcagtcaaggcaaagtgatactgaaacatacgtactgccttcccaagaagactcgcattaaacatagtctcgatatcctcactcgtcgacagaagaatctcgtcatacttctcttcaaagatgcagccagaacaaaacttgggccactgaagaaaaccttttattagtatatttgaataaagtgaagttatatccaaacatttactacatgacttctcgagttttgcaaaaactgatgccaggaacaatagcacaggaggcagaagcatgacaaactgatcatctgtaataagcgcagagtcaccctgtagtttacttagcatactaaagaaaatgtgtccaaagactgacagatgcaagggactggactccacaagatagaacaatatcttggccctgctcatgcttgcctggttaatgcaatggataataaggtctttagaagttctcccaacaatctgtgacattatcaccgtcaactggtgaacactacaatgctgactatttccccccctgaaaatgccactaacgactttaagcaaacaagtatctgccgaagccaaaccaaaagaggtagaaaacctgcatgccaggctatacacttgctcaataattctactgtcataattcttgtcttctaattcccacagaaaatcatagacccttctcttagcagcaggctggcgtgaatacaatataagcatttcaaaagctccgccagcaatatccaaccccaaactgagaatctggctcgccaattcttcctcgtaaattttactcagcatggaatgagcaagatataaaagtttaaatggtgatataaatttcaacaaagcctgcattactatgattgtggaga

SEQ ID NO: 31243 - DNA, 1778 bp, Arabidopsis thaliana landsberg
  unsure (1)..(1778): unsure at all n locations
agtgtttatatgggttttgaagaatactaaagcccatgagcccaaacattaacaaaaatgtttttttcttgtaccttctctcttcaacgtagactaaagaattagggtttccgctttccacacacacagctgcaacactatcttctcagaaannnnnnnnnnnnnnnnnnnnnncgtcgccgttcctttcaattccgatggctggggacctccagacgcttccgacgtttcctcctccgcctctcccaccagcgtcgccgccgctaatcttctcccgaacgttcctttcgcttccttctcccgttccgataagctcggccgtgtagctgattggactcgcaatctctctaatccatccgctcgtcctaacaccggatccaaatcagatccgtctgcagttttcgatttctccgctttcgcaatcgacgaaggcttcggtctcgcttcctccggtggttatcccgatgaagacgcagctttccgtctcgtcgacggtaaacctccgccgcgtcctaaattcggacctaaatggcgtttcaatcctcaccacaatcggaatcagcttcctcaacggcgagatgaagaagttgaagctaagaagcgtgatgctgagaaggaacgagctcgtcgtgatcgtctctacaataacaaccgtaacaacatccatcaccaacgccgtgaagctgccgctttcaaatcatccgttgatattcagccggagtggaacatgcttgagcagatccctttctcaacattctcgaagctctcgtacacagttcaagaaccagaagatcttcttctctgtggtggccttgagtactacaaccgccttttcgatcgcataacgccgaaaaacgaacgcagactcgagcgtttcaagaacaggaacttcttcaaagtcactactagtgatgatcctgtgattaggcgtttagctaaggaagacaaagctactgttttcgctactgatgctatattagctgctcttatgtgtgctcctagatctgtttactcttgggatattgttattcaacgtgttggtaacaaactgttctttgacaagagagatggatcacagcttgatttgttgtctgtgcatgagacatctcaagagccattgcctgagtctaaagatgatatcaattctgctcattctctaggtgtggaagctgcttacatcaatcagaacttttcgcagcaggttttggttagagatggaaagaaggaaacttttgatgaagccaatccatttgctaatgaaggtgaagagattgcttctgttgcttataggtatagaaggtggaagcttgatgataatatgcatcttgttgcgaggtgtgagttacagagtgttgctgatctcaacaaccaaaggtcgtttcttactttgaatgctcttaacgagtttgatcctaagtactctggtgttgattggagacagaagcttgaaactcagagaggtgcggttttagctacagaattgaagaacaatggaaataagttggctaaatggnnnnnnnnnnnnnnnnnnnnnnnnnnnnatatgatgaagattggttttgtctctagggttcatcctcgtgatcatttcaaccatgttatattatctgttttggggtataagccgaaggatttcgctggacagattaatctcaacacttctaacatgtgggggattgtgaaatccatagctgatctgtgtatgaaactaagcgaagggaagtatgatcttgtgaaggatccatcgaagcctcaagtgaggatttgtgaggtgccac

SEQ ID NO: 31244 - DNA, 3062 bp, Arabidopsis thaliana landsberg
gcatcacttggaacattgtcgaccactggttccagcacagattctttcggttcaatcttgaacacaaacacgggaactggtgttagaggtacccccgcatcttctaaagcttcaactcggagtaatgccactagaagtgctggtcagagctctagctcagaccctcacgggaaacgacatatgagttattgaagtacataaaatctggtcataggtgattgtaaatagcgagctgcacatataatatttgtttcataatttatttaattttgcttttgaaaagtaaattaatttatttttttgactgcagtagtgatttagttttgtagtatgatttgttatattagcgggaaaaaattatgattcatttgttacatttgtatattagaataatcacttgtagtcccattatctaggtccccactattggcctcgtacgtataaaagcatattctcttgtacgtattaacggtaccttactttaaacaaaacataaaactaaaatgttttttatgcgttttaaattatttttcagttaaaatttataaaaagggtttttgtaaacaattattttgatagtaaaagaaatactaactgaaattagtggagaaaatacacaaacatatatttaactttctttaatttaaaatatacagattttgtttctttaattttttttttcaaattttagttttcatttatttttaaataaagtatgacatgtcataatgttgtattttgatttgtcattaaaaagggggtgaatcaaatttgttcactctagtggtgaacttcgccaaagaatcacagaccgtcagtgttaatcatcagagacatcaacgtaatgttcctcttggttacttcttgctttaatgttcctcttggttacttcttgctttctacctgattcaggttcttcagttaaagtttctcttttcatttttggggtaatgcccggttgggcctctttgttttatttaggttctagttctagggcctgcgtgtccttttaggcagttattgccatgtatgttctttgggccattcgtgcctctgtcggcttgttgggccttgtaatcgtttcggctctattggaaattaaaaataaaatatatatactaacccgttttgggtaaaaagttaggtccactaaaagacgaaaagagatcctaccaaaaaaaaaaacgaaaagagacgagccacacgcgtcaccttctcgtttagcctcttcatctcctttcctcagactcactgtgtaaaaaggcttttattttatcatcttcaggcttattcgattttcttcagatttgaaatggtgtcgttcaaggtctctctcgtctctacttcgcctattgatggccagaaaccaggaacttctggactccgtaagaaggttcgttcgctttcgcttcttctccttgttatatcaatccccgcgttcttctttcgaaattggattagagatgtgaattctaaattcagatcttcgcaacgaaactgatttctccatttagttccgatcttatggattgaatgaattttgtgtgttggttttaacaatttgatccgatccgatgagatttgaatttacgcattgtttcgtaattttacaggtgaaagtgtttaagcaaccaaattaccttgaaaattttgtccaggcaacgttcaatgctcttactacagagaaagttaaaggtaaagatctctcttacctctctttgattgttgttcaggtaaaggtcgatgattgcaaattccatctaagaaagagtatttgttaactttttcaggtgcgacacttgtggtttctggtgatggtcgttattattcagagcaagctattcaggtaaaagctttatatgtcctttgaatgatggcaaactgcgttttgcattaacttataattcttagttgttttgaatcttttatttcataaaaaagatagttcgtcaataccactttatttcctatctggacagattatagtaaagatggcagcagctaatggtgttagacgtgtgtgggttggtcaaaacagtctgctatcaactcctgcagtatcagctattattcgtgaaagagtaggggctgatgtgagatatcttcctctaaactcatactacttacttttctcttgggttgttatctaaggctatgcatgtttgcaacatgtaatgacgtgatgagaaactaacccgagatccaatttcagggatctaaagccacaggagcatttatcttaacagcaagtcataatcctggtggcccaactgaggtcagttctctttttgttctcactcttttgtgcttgttcattcgataccctcacttagtattatttgaatcctagcatcagttttgttaaactatatgttcatctctctgcttccatatgctgatttcctgctattctattcacaggatttcggaattaagtacaatatggaaactggtggaccagctcctgaatcaatcactgataagatttacgagaacacaaagacaatcaaggagtacccaatagcggaagatctacccagggtacctaacatttctgatcttattacctgtcatcatctttttttcatcttgtatttgtactaatcatgtttttttgctggtctttttgattgaatgcaacaggttgatatttctactattggtataaccagctttgaaggacctgaaggaaagtttgacgtcgaagtttttgattctgcagatgactatgttaaactaatgaagtaagtctttccatctttgtatctgagagaacagttcttgaatctactccctctatggtctatgcatttaagagaatggttccagaatctgcggtatcgatgatctaaaagatttgttcgtctcttcaggtcaatattcgactttgaatccatcaagaaattgctatcttatccaaaatttactttctggtatatagttcatcaacatccataaatcttttcttttgagtttagttgcttgtataggctccatcatgtctttgatattttatttcccatcgttctatgaaactatgatgcattgcatggagtggctgg

SEQ ID NO: 31245 - DNA, 5363 bp, Arabidopsis thaliana landsberg
tccgagaatctatcagggcaggggttgggccgaggaaattgtaccaagcatattttatcattgacagaagttcttttacaagccgtgtgaagttggtcgtctcatacctactttctgggacatcttagagaaagcaggaagtgaaggtgcgagtctgcagaacatatcatcacatggcatctacattttgaattccgcttttgacagaacagaatatgacaacgttttgaacttcttgggtctgaagcaagtaagcaacgaatggtatgtaaaatgcattcagggctgtgatctcgtgacaagtgtgtcagaagctacgtatgtggaggttctactcttcatcgctgagaattggcagtgcaggtttcagaatacaaatatggggaaagttccccttatcaagtatgttgtccaaaagggagtgagttctctccgcagtttgggtggtttcagtcctaggactttatgcttgtccacagagaagaaccaggcatggctacttgattggaacgatgagttcagatgtatgtctaacttcgtcttcatgccaccaacaacccggacagcgttgaaagtgtgctccaagaaggagataattcatacttggctcaaagagaacgttaaagtcattactcttagtgtctctgactatgcaaaacatctccgtgagaatcttaatggagataagaggcttgttgttgcatatgcacactttctgcatcactcaatctcaaaggattttttatcaaaagaagaagcgggtaaatgctgcaaagacatgccgcttgtggacaactatgggaatgtaaacataagcaggaatggggttcttgttccagctagtgcaggtaaatgggttagcttagttggttccaatccgtggagacatagtggctacattgaactttcagaagagtatttgttgtcgaacaggttcgctggtcttcggtctaacaagaaagaccttctcgggttcttgaaatcttctgttgaggctggagatatacctgacatagaacctcctaatgttgctatacctgcattgtcagggcctcttacaaaggagaatgttttgttgctgttagagtggattaataagtgtaacagacattctcttcgttccaactttttgaattctgttagaggaggaagttggctgagaacaacaatgaatggggtttctgattatcggccgccttctcagtcgttttatcatacttcatcatggggaagtattcttcagaacggttcaattcttgttgatattccgctcgttgatcgaagctactatggcaacgagattgagaagtacaaagaagagttgaaaattactggtgtcatgtttgagttcagtgaagcatgtagatttgttggcaaccacctgatgagtttagctgagacgtcaacacagtcaagcgcaaacgtgttctcaatactgaaattcatcaggtacttgagagagaagcgcctctcaccagctgatttcatcactgctgtcaaaaatggtccttggctgaagactatttctggttacagatctccagatggagctgttttgttcagcgaggaatggaaagctgcgtcgttgatcagtgacatcccattcattgacagaggtttctatggtgtagctagcctcaatggttataaggaagagcttgagttgcttggcgttgtagttaagtttcctgataactacagcctcatcgtttcacatttgaatactgcaaagctgacttacttgacacctgatgcaatgttcctagtacttgactgcatgcgtcaactgagtccacataggctgatcaatgccctgtggaattcttctcagtgcttcaagacaaagaagaatggctataaatctcctgctgaatgtttcatacctgatccagagtggacttgtcttctttctgtttttgattgcttcccttttgatcgatgatgatttctatggcagcagaatctttgcctacaaaggagaactgaagcagattggtgttaagcttcagcttgaagaagctgtgaaaatgtttgtgagtacattcaaacagaaagctacctcctctgggctaacacgatgtaccgcatcgtctcttttatcttgctacaagaagctgatgggaagtttgtacaaatatcctgaagaacttatgaaaagcttcaaacagtttcaatggctgcataccaaacttggtgattttcgtgcaccaaaggactgtattctctttgattcagaatgggaacctctccgcctcatagcgaatcttccctttatcgatgatggtccgaactggtatggcaagagcatacacgagttcagaaaagagctcgagagtttgggagttacagttgagctgaggaaaggcatgagccatgtgatcagctccttaagtctccctgatccatctcgcatcgctccttcaagcgccttgtctcttttcaagtgcatcaagttcttgcgtgaagacagatttcagcaactccctaaagagcttcttgataaggtctcagtaaaatggttgaagacacatgcaggttactgcagtcccgaggagtgtctcttgtttgataggacctggaagttagagccgtgtgatggtcccttcatcgacgaagagtattatggctcagatattaattcgtttagagaagagcttattgcgataggagttggtcatgattcagacaaagcttgccagttgcttgcaagaaatgtctataaactctcagaaactgatgctatttcccgggtttatagatttcttagtgaagctgaatggaaacctgagaaaggtgcctcttcaggtcggatttggataccaagtgatgagaaatgggcagatatttctagttgtgtgctctttgacaaagataagctctttggatcaaagtttaacgttcttgaaaaccactattgtagtggtaaggatcataaccttcttggtttcttctcatctgcatttggcgtgagaattaatccgtctattgaagattactgcgagttgtggaaatattgggagaaaactaagaacagattgtctagtcatgagtgttgtgcgttctggagctttgttgtgcgacatggtgacacggtgaaagcagagaagctcctctctgagtccttttcgcgtttgcctgtacactcaccggattgcaacaacaacgaaggagtcatgttatctagcataagcgacgtgttcatagctgatgacttgctcttgaaagatatgtttattgattctcctgttttcgtttggtatccaactccaagcattcctacattgtcccgaaccagacttattgagatttatcgaaacatcggtgtcaaagaggtctccaaatgcgtcgagatcgcagaagctgatctaaccggattcaaaaccgagctgcaagaggttgttgatccaaagaagaacctgattggaccggggctagtgaagctcattctcgcgttcctctctgatccatctctcaaggtagaaactgctgaacgtttaagaatcatacatagccttgttgacatcgacgttaaagaaacttcggagactatcacaacggagtatactctgagtctaccttcaaagggagagaagctgattgcaaaggctaagaggatgataagatgggaaagggagaaaggagtggtttatgcagagaagatggagaaaacttgtggtaaaagaaagcttttggagtacgccacgtgtttcgctgaggtgattgctaagggtgtgatgtgggagagagaggatctgatcggacggttatcagagcttgtgaagatggcttacttggttgagtttgatgaagaggctttagagtttcttatgaagtctaagaaccttcaggtctatgaagaagatgagaaactaatctcagatgagttctctcaagtaaactaaggtatgtcgatatggttcagtgttttggtacttgtcctctgttaatttattctgcttctgtaaaagtaagaatatttacttgatgtaccatagttttctcgagtaaattttaaattttattcaaaaaaaaaaaaaaaaagtaagaatattttatcttctcttttgcagatttcttcttctatcacaagtattctctatggctagtctctatttattttgtctactcaagacataacctgcaacgtttcttggagtttggtcttgatcaagtatgtttcctctgcctctctgtgattaaaactctgttcttttgtcttagcacaaatagtaaaatgcatagctctagtagttgaaattgttactcttttagtgcaacaaagtttggtatctcaggttttattagtctcagaaataaagttttgcatttggtgtttgcagtaatagctagtacatttatcttcaagtttggtgatgatgaggatacgatagcaaggaggtcaggagtatgagattctagcattatatcatgtaagacaattctgaaaactggactgagaatgacaactcgattagtactggtttttgttgatgtatctgactttcattttaacttttttgtatgttgcaggttcatccaggtatctatcatctattgctgagtatgtgaagagtgtagaagttttcttgcgaacttatgtcttatgttgaataatttgaagtaatgaagaacagtagaaaactttgatcaatttgcgtttggcttttggtgtttccatagtaacattttcggagattatagtatggctagttaataactgtaaccaatataatgtaatcattttgatcagtgccataaaaactcttgattgttagcatattttaggtagtttacatcaaaaaatatcgttctatttatcgggtttaacccactagaactcgaaacacatcatatttttcaaattcggacttcatgtgggcagcagctcaatttggtttcaggctgtactaggctcttttacccacctcaacatccctatttgtaacataatgactcttttaaagtttctatttcaaaatgaaatatttgagttgtttcattttccagcaattttgaaagcttttatcctttgaacaaatactttacacaaacacgttacaatgtcgtaaataaacaaacaaacctgaatcacaatcttgaatctccttacttttttcagtaaccttttttcttagtgtaattggctttaaaccggagactataaccgccctataccagttccggttcttcctctacttgttactgcatcatatatctcaacatgtaaatctcttgaagcatcattgtctgaagactcttagctgtcttcaccgactcttgacacagactcatctctggttcttaaatctttcgttacacggcttgacaattcccagctccctcctcttcttcccctgcttgac

SEQ ID NO: 31246 - DNA, 3108 bp, Arabidopsis thaliana landsberg
tggatgtttgaccggaaaagtttaactcgttataagaaaggtggcgagaaggagcattacatggaaaagtacttaagaatcttatgagcgagtgtcaggagaaacctaagaagaaggaaatgctcaagagacagaattcggggacaaattcttttaagcggggtagaatgtagtgaccctcgctaaggggtaagcggccaagcaaaaaaacatcgaggaacgaccgaggaagaaccggaagagaaagaaatagtaaagggacaaaatccaaagagatgggcaaggtaaaaatgaacttggccaattctagtttaaaattaggtcatccgggcgaagccaaaacgaggggaagttgccccaaatacatggctgattgcctaaatgtgcccaaaaggtgataaaccataaaagggcaaatgaactaactatttggtcaaaggagggcaaagatgggcaggaatgagcaagtttgggcaacacgagcgtgccgcgggcgaagtttgccccgccgggcgttaccgccctttgaccacgccatagacacgtgggctggcttacttagagcccaagaaaagttgcttagatccaaatttatgaggattggagccgaagtttccccttccacgtgtcatcgttccatttcttcaacatacgtgtcttcacgggcggtgacatgtgtcccgcaaggtgtcaccaccagatgacatgcgtttgcttggagcccaagctgttccacctaaaaatgcttggccaaacttgagccatttgatgggagaaaggagagagaaccgaaatgatgccaaattatcgagagatcgcccataaccgagagaaaacttacccgcaattgagaaactttgcctgttatcaagatcatttgcccctaactaaagaattcatatccgtgatcgggaattcctacccatgagcgagaaatctatgccgttatcctgtccgattgagaacctaccgaggaaaccttcccataattgtttattcggagtaaatcttcatgaatcaaggctgcttctatcaagaggtgttagatcaagatgaggagagttaagttgagttcggatcaagattgtgaagccatggaatatccgagaaccgttgaagctaaccttaaaccttcagccgaatctctgtgagtttcaaagcatgtgatttggaacatgataggtttgagtgtttatttgggtgattgattgcttagttggttgcatgatcatatactcttgcattcattgatttatttcatgaagtatatgagtatttgctaatggtgtgaataatggtactaagccgcatatgagatattttagattcttatgcttaaggcttatagttgggaggttgtgttgagtaaggatattgatgattctatgtgtttgagtaaccatatgtctcataatatcttgaaatgttgggtcttaatgcgtggtgctcgtggtaggaggaagagaccataagcgtatcaagatcgtggtatgtctgaccttcgtagtgaaccgtgctattatggggtcttgttaacgttgttacttgatcgccatgtagtgcgaagggctcggagagacggggctagttaccctggccgagttgtctacacgacggtgtagcattttggtagggatgctccggttacatgcctttgtggttgtaaagcgggagatccagggattttgtgtttttggtgtggggttgtttgaaggcagcatatcgggccctttaaaacttaataaaattggagtcttaattgcttgtgcatatttttggtagatgactcagcaagctacatttcgttgttattctctgttgcgtgtttcgggatggggaactaatatatgttgcaggtagaccgagctcattaaataatcttagattacttgtgaatccattttgttttgcaggataccctagtgggaaccattagagggatgctcaagatgtaggaaagctggtatagagtttgttgctatttgcaaaacttaatgattttagttcttgttggatttgagcgtgtatgctcaagggcccattgtaaaaacgttttggatacttggttgtccgagaatttatatgttataaaagattattttcttataaagagtgtgtttcattcgatattagtcttgtccgggctaacacaactcacgatcatggcaagggttgaaaagcctaaaccgcgttcgtgagggatggttcatgtgggtaatccggctaagggtctaaatccgtttggaacctaagttaagttgtctatgtgagctatcatcgtagcgattttggattgcccttggcttgtccggccatagagatattcggggtcgttacaatttgtggtattagagcgtggttcatgatgctcacgggacacacgttttctataaagttttattgagtaaatgagtcgcaaaagcaactaggtacacaggtatgtccgggtttagtgggtaatgggttaggtttaccccttgttgttgttgttgcagtttatgttggattggatcgagaatggatggtcgtgggggatcgtaaccaagattttaaagtgttgaagaattatggccgagctcagtaacgagggattgtaacttaagtgagggcaagtgggaaagcaggtgagttgttttggaaaaaacaaaggaatagtgaaagagaagttgaggagatttctggagaaagagaaagagaaagaaccaaggtgggtgatgagatgcgagttgtagaggacaagagctgaaagtataaagatcgtttctaaggaaagaggaaaacggaagatgaatgacatcatttggaagaatgatgagaaagagttaatcggggtaaggcatgagggaagtaatgaaactgagaacaagtaagtgattgaaaggaaagttatcgagttcacttaactggatactaagtaccgggggagcaaaacaatttaagagatataggtggtgatcacaaatcaatgtatttggtgagtaatgatggagttcgagaaagaagatggagtaaatttttgggatcataataaaggcaaaaggaggcgtagtaaggcaaggtgaggtgaatcaaaaaccgagaaggtaaagtttgatcaaaggaatatcg

SEQ ID NO: 31247 - DNA, 1055 bp, Arabidopsis thaliana landsberg
  unsure (1)..(1055): unsure at all n locations
ccgccattcttacccattataggagttatcttgggtcacaaggaatgaagaacaagataagaaaaaaaaagttgagttcgtaccggattttttagcaccgaagcattttacttcgggggaggctttgttcttgaatccacatctcaagtaatctatctcacaacctctgcaattaggcgagttccactccaacaagaggctttgattgaggtagctcgagaatcttgtttctgcaaaccgcgaatcagccggaacatattattctcttcacggatctgacaagaaggaagccatagactctgcgagagcaaaatttgacctggcgaaaaaagaggaggtggaattacttaggccaggaatggacggataccaagacggcaacacgagctcattaggacaagtcaggaacgtgtataaggtatcaaagcgaggagagaaaggggatcctgaaatgttgaaggttaaaagccttttagcnnnnnnnnnnnnnnnnnnnnnnntataaatctgttgctttctgtagtcgatatactggacaaaaaatgttccggacataggaagttgtaggactgtattattgagattggtgcagaggagattgaataacggatggtcgcagaaagggaaacggatggggacttctaagggtccacatctgtgtggtctcgaattagaagaagaacatttactagggtttgaggcgtgtcggagagggaagatgaagaagaggaggaaaaataaaaggaaaagttgttttgagattaccattgttcgatagtactaaggaaaatggtattactagttgatattaaacgaaaaattctgttaaaagagtttaaccattctcataattaaagtactactaaggagaaagtcagaaaagtctacattttgtacaagaaaagtcaaggatatggtccataaattggaatgcgtggtttgatatggatttaaataactacatatcgtaaacccaacaaaactagtttttatatcttacccctaacaaattttttgaaaatgaccaaatacccttcttaacattttctaaaaaa

SEQ ID NO: 31248 - DNA, 855 bp, Arabidopsis thaliana landsberg
atcaatattcaagcatgcatgtatagtttatgcaattagatataattaactggaagtggatattgattggtggttttagttggggagatagtagatattaaaaaggtatagtaaggtttagacaatgtacttacaattgcatgtgagccaaatttattttctctctacatttttaccgttgactattgtcggtaccgttgactctcactagttgttctaaagttaatatttccatgtccatagccttcacaatcatagattcataggtgtaatatttcttttaaccatggacatgtgaaatgtgagtgacaaactgaaaacaaattaaagcaccatataaagaagatataagtaaaaaaacactggaaattatccaataaactggttccagtttctaatcctttcaatgggaaagcatgcattagtaattttcgaatattagggtcaacgactctagtagtggtacgactagaacaaatacatatcggtaaaactcggtttaatcattaatggtgataatatatatgatgtgatcagactggatgtgatgatttgaaatgtcaacgagtttggataataaaggatagtagttaatgttcaaaactagaaagatagaaagcttctaaaaatctaaacaaagtgtagatctattttgacttaaccgaataaaacgttcattaaatggtccccgccaatggcccaacagacccaaacgcctttaacaccacaagcatggggatccatattaaaggcacattcatcccacttgcttactccttttaactgtggagggcacatttacctatcttacatggaaatgtccagctgcagagacagagatatcacaagcagaca

SEQ ID NO: 31249 - DNA, 6405 bp, Arabidopsis thaliana landsberg
ccaattactatatagccttatctttctataaacggctttattgcatttattcgtgcatgtgaagagaggagacacaacactgcctagttgttcctcctactgactttactagtagtaaaataaaggcagacctgaatttggaaactataaaattgaagattattgggcccaacttttatgtgggctttttattggccttcctccacaaaaccagctactatttctcattaccatgtccattttaatattttagatgactcttggatgactacttttcattaaaaatagctaagatatatgattgcttgaaaacaaaacatgaagaaatgaaggatggtttatgcatgcacgtatagagagttatgtgaggaatatgcgtgcgcaccatactcccacgttacccgttttttttattcaaattattgtttatatttcacttcgtcgtgtaatgtatacattttgtaaacaaacaaattaaaaagagttaaataattacgaggttttaatttgtgttggttaaaaatagattttactggtgttggattggatgaaagaaaaagtcaacggtcaaccaccaaaaaaacaaggctcccctacttcttcgattcagccattgcgaccatctctctcaatcgcctctctaaccacaaatcctaaaagtctaaacgaaaacagaacacatgaatctctccttcctctgcatctcaattccacttcgccatttttaaagctttttacgtaaataataagaaaccatggagaagaacgacaaggaccctgatcatgatgacaaatccaagggagatgagaaaggcgacgtcgtttcggatgctcatccctcagatgatgcgcatcatcaggatggtatcagtaacgaaaatgtagatgttgttggtaatgcggagacagatcatcaagatccaggagataacaatgtcgacaaggtttcacaaggagaagaagcaccagagattcgtcaaaccttggagtctttgtctgaagaactcgatcagtttctcccgactctttcccttcacatggaggagcacaaagatagcaccgaggagaaaggagaggatggttactttcagatcccacagtttgttgggaaattcttggatctttttgaggaaaaactctccaaatatgactctggtgagcctaagactgtgtggtaccaagatcctgaagaggtgtcttcgcttttggaggcagtggatcgtgtctcaaagcttatggggctattgctcaacaccaagtcctgtttggaccatcatgagtccttgatcaaccatgcgggatctattcagcagcgtgcaatggctttcttggaagacgaattccgcatcattttagaagaatctgtgaccaaagagtctgtggttgtcaccgatgacagcaacagccagaggaggagcactgccgatcagcaagaccaccagaacgatgtggtggtctcacaagaccacgaccagatgctcgttccggaatgcggtgatcaggagattgaataccctggttaccctgaggatgtggttgtggtgctgaggaaaatagcggaaaagatgaaagcaggagggtatggatgggaatgtagagaggtttatttggttgggaggaggaacatcttgatgcgcactttgaaacaagattgtgagtttgagaaagttagcatcgacgaggtgcagaaaatgagctgggacacgctcgagagagagatccctatttggaacaagactttcaaggactgctcttctctcttcttccctggtgagctaaaacttgcagagaggatattcccaggggacgaggggaacttattctgtattgtcacacacggtctggccatccagttcttaggtttcgcagaggccgtagccatgacaaggcgctccactgaaaagctcttcaagatcctcgacatctatgagactctgcgggatagttttccggccatggaggagctgtttccggaggagctccggagcgagctgaggaacgaggtgaccagtgctcgctcccgacttggagagactgcgattcacattttctgtgatctggagcactccatcaaatcagattcaagcaagacccctgtgccaggaggggcagtgcatccattgacgaggtacaccatgaactacctcaagtactcgtgcgaatacaaggacacattggaacaagtgttcaagagtcactcgaagatggagcgagaggaggaggaacctgtggagagcggaaactcggccttcgcaagccagctgatgaggataatggagctactcgacggaaacctggagacaaagtcaaaacagtacaaagacataccattgagctgcatcttcatgatgaacaacgggagatacatagtgcagaagatcaaaggatcggcggagatacacgaggtgatgggtgacacatggtgcaggaggaggtcgtcagagctaaggaactatcacaaaaactatcagagggagacgtgggggaagctactggggttcttagggcacgaggggctcatgcacaacggcaagatagtcaagcccaatctcaaggagaggttcaagagcttcaacgcaacatttgacgagatacacaagacacagaccacatgggtagtcaacgacgagcagctgcagagtgagctaagggtctccataactgcagtcatgatacctgcctacagggccttcatggccaggtttggacagtacttggatcctggtcgccagaccgagaagtatgtcaagtatcagcctgaaaatatcgaggatctcatctaccagctctttgaaagcaacacctactactgttatactgccaccgccaggcgaagaacatagcttctttcttttcttcttttttcttttgcaacaacactttttcctgattttctcaaaatttttcatgtcttcttcaactgtttttgtctgaatgccacaacttggatgacccatatttctacgaattcaaacaaacgatcgtggctccatgccatgtgtaaatgttaattataatcagttccagcatttatcaataaacaatcaatttattttgttgatagcctaacggtacgtttactaagttatgtgaatttgatgcaagactaactcaccttttattaagttaattggcggctggaacgaaaacataagagactctatccattaaacatacttctaccttatttaggcatcaaatctgtttatgcgagaatgagaagatggaagctctaagtggatcaacacggtcctaatctccatcgggtaaagctccatctccagctttcttggatcaatttctctccctctctttgccttcttctcctctccataagatccttcaccttctactttccacaccaacctcttcttctccatcgtgcttctttcttgatttgctgataggctcatctccgtcaatttcccgatctgcaatgcaagtattttcatcatttttcaccacaaaatttgctatctttccaaaaaagcttataccttctttccaggaaaaagctttttgagttccacgcttgctactcctgatagttccttgtcctcttccacctaattgaacaacctcaaatgcttcattttactaccaaacacataaataatatgatattattattacctcataaagatgagctagacgcaggagcacgtttccatcatccagttcctgaaatcatctcaaccaaaccaatgtgaacaacaagttatcaattcaactcacacaaactatctatataactttggactctgcaaaagaggcacctgcagagtcagaagtgccacattgtcaggcagactgtacgatggatcaatcccggagaatgatgctgcaccaaaactcatcggctttccatcatcctgaaatattttaacatccgctgcataaatggtctgggactgttagagaatagcatcctggtgttccattttacacttgttttcacctgttgagcaaaagccaagaggagtggcgagtagatttcttgtccgaatgtacgtctccattttgcaccttctccatatggatcaattctatagtaatattttccttggatctgtaataattgttagaatcagtaccttagagtaggagacagaatgttcttgaagggtataattttcactggaaccaagtttatcttatctgtctgtacttacagttagcccagtacacttgtcttgaacgcacactgtctcatttagattttctgctacacccctggagtcatcgaggagcagtctcctgtaattaaggtgattgtttgattagacgcagagagagagacgagtaatggagattatgatattgattatgcccaatacctatgaagcattagctcaacttgtccgtccactatgctcgaccccccgaaggctctgtccaccatcactgagaattccttcttactgtcttgcaagtaaattccatgatttatctgagcaagagatatatggaattattacccaactgatttggtcgaactcaatccaagatcatttgcagggaactgtaaactaccaaccaatttcctacttgatcaatgtcagttattcacataccgggtaataatttcctgcaataggttggttgacatctagtttccagtctgacctataatcacggatctgcaaaacaagtttttcagtttattcttaaacagcaacaagaaaagaacaataaagaacacatgcacaaaagaagataatgggcatcatacccttttgatataatcacgtccacttgaatccgtgtagaaagttttattgcttttcagggaacttgagatctgggttactacttctttgccaattccatcatcaattggtatattaccaacctaaagatccagataatcctaaagtctttataatggaatgtaagaaattaaaagcggtattggaatagttatgcatcagcctcacaataaattcaacttccacatgctccttgcccttataaactctagtgatctgcagagaataacaaggtcagacagtataatctacaggttcaaacagagtttaagaagccacagaacagtttaaacttaaggtagattccaagagtctgtagatgcaaacaatctagtgagcaaggagaacacactaaaaacttaggtacctgagatatccatggattaatctgttggtgtacttcgtccactagcggcccatgtataacagtcaaaggaacctgaaacttgagccagtggtttaacattgaatttcttttttatgattcgtctggaagatcaatactttcagaagtgagtataaacctgtccttccggattgatggggaatgtaccatttggacggaaaacatacgcaccagagttctagttgttgcaaaccagacaagaagaccaggggaacttggagtaagtgtactgaaccttagccattgaaaggtaagtgttgaaaaaagagaaaaaagatctcctcttacttgaggtataagaggttctttgtcatttgatccattgtatgcagagtagtagctaaatgtctgtttgactggttctgtcatctttaccaaaaaaatcaggagatttatcagcatttttaaggatcactggcaggtagtgtttagaaaataatgacataccgaggttctgccgttaacataattgattgctgtcccttgatcagtggaaaaactaagcttcagatgcccatgaccaatgttaattattgactgttcgccttttaggatattggagacgtatgatttgctagaatatccatctaaatttggaaaccaaaagggccagtgatcaaggttaaaagcttgttccactagaccaaatatatatctgtattgtacctgtttttttagcagtggagatagtgtaagtagtgaagccaagaggaggcacagttactgaaaacacaagccaatactttggcacctgtgtagggctttgacctaagtatgcctctacatgatatttccttaaggccacatattcatcagtaaatggaacaagttgagacttaacttcgtgtccctcagagtcatgtaccgaaacgtctccgcccacaacctatcaacgatccgtcgtatacttgttactacataatagcggctttaacaaacattaacaaatattaaccaacaagaacttgattgactcacaggaagccggacaatgtccactcgcttccatcctagtgggttataagccaatacgatctacagagaggaaaaagaagtgtaagtggaaggaagcacattatagacgagctgaaagcccatagggataataatttttgcttaccaaacttttcccatcggataagttgacttcgcttgagggacagtaacttatgttaagtaacaaacactgaaaaggaaggccaaacggttctaagagaaaaggttgggttg

SEQ ID NO: 31250 - DNA, 3501 bp, Arabidopsis thaliana landsberg
aaccatttgtttcaaggctttgtgacggtaagctgtgtgtaatcttttcaacttcttcttaacagctattggtgatccgcttgggggttgttgtgttaccccatatggatattcagttatgttgaagaaggttggtgttgaagtgaactgcctcttttctccattgtttctattatgcgtaccatggcttctctaccattgaaaataacaaagctacataattttacttggatatgacatcatttaattggtttctctcagctgatggagtttgcacatggaaagatagtgctggcattagagggaggatacaatcttgagtcattgggaaagtcttcactcgcatgtgtccaagttttgcttgaagacaaacaaattcatggttcatctgaaacatacccattagaatctacacggcgtgtcatacaagcggtatggctctatataaccctaacagtctgaaattttgtatgaattggctacgatttctcttttcagctcagttcttgtgtcataaatattgtatatcgcctatgttactaattgacaaagctcatctgtttcttgtgggtttaggtacgcgagagactatgcacatattggccttcacttgacgcgtcaatggcgtctagtgagaatttaaagaacccaagtgcagaaagaaactccgctgacgccctccttcgtgaagtggaagagttaaagtctctaatggctgcccgaaatggagaactggaggcaaggagaaaagagttaaaggccaaaaataaggagctagaagcgaacgagaaggagctagaagcgggactaatgttgattcgcgctcgggaggatgtaatctgtggtcttcatgcaaaaatagagagtttgcagcaggagcgagatgaggcggtagcgaaagctgaacgcatagataaggaactccaagaggatagggcaagaagccaggagttcaaagaagacacagagttttgcttgagtacgttaaggagggagaaggagcttgccatcatggccaaaaataaggacctagaagcgaaagagaaggagctagaagcgcggctaatgttggttcacgctcgggaggataaaattcatgccaaaatagagaggttgcagcaggagcgagatgaggccgtagcaaaagctgaacgcatagataaggaactccaagaggataggtcaagaagccgagttgggaatggatcttttgccttttctcaggagttctatgaagacatggacttagacgagctcgaacctctgtctccggagttcaatgaagacatggactcggaagagcttgaaccgtttcaggtcatcaagaaaaacatggagcgttcccacaagaagttcataaaagatatggagtgtatcaagtttatcgccagtgagagagccagggtactttaggttgggagcttgaggccgtagcagaagactaccacaagtttcgcgagatggttgataagctcgggaagagcaacatatacccttcttagaaagtacaatggtgtttcattgtaaccacagaacctttttgtgattgtaaaccaactgtgtcgtgtcagactttgattggttgcgatacttggtttcccaatttccctccaaagaatctccaaattggtcaaactctcaaacctaaaaaaaaaaaaggagagaatgaaaaaaagaaagaattgaaaagtaaaaaatacttggaagctttagaagctgagagcaaagacttgacctttttcacttccttctcactgatcgtcgaacaataagaccgtcgcatctcccagttatggctatggccggagaatcttccggcaaaaaaattggagactgtgacggtaaagtcgcggggaacagacagcgaaaggtgggtcttatttacgacgagacgatgtgcaaacacgacacacctgacggcgaggatcaccctgagtgtcccgaccgcatcagagttatctgggagaagcttcagctcgccggagtttctcaaaggttcatactttctctcttcttcgtgcggctttgttgtttgtttgataatataagccctagaaaatgctcaaatttagtcaaattgggtactttctgatcctgtcagctgagaaactggtctcaatttgttcttccttgttcggtatgaaatttacttttctcaatttgaattgtgcatttcatagaatcaaaaggtttgtatgctgctcaattttaacggtaacccttcataaatttgctaccttttcgttatgttcggtcttgtgttcgagttatttcctccatgtctgttttataaccctctctgatatcaattttatatttttcatatttgtttgaatttcactcataacattattaattagagtaatgtggcagcacattagttagggaaggtggaatctagtctttgaggtgtgtatccatcacgatttgtttttcgattcggatgaattggcctgctatgtattgacgatacttggtcttttcttttgcagatgtgtggttcttggtagtagcaaagcagaagataagcatctccaattggttcacacaaaggaccatgttaatttagttaagagtattagcacaaaacagaaagattatcggagaaacaggattgcttcacagttgaattcgatttatctgaatggaggttcatctgaagccgcatatcttgcagctggttctgttgtaaaggtaataatactagttgatttgtttctttttacaataggaggatacattagaaactgttagaatgatttgattgaatatggggtaacaacatttttctttcaacttgacagttggcagaaaaagttgcagaaggagagttagattgtggttttgctattgtcaggcccccagggcaccatgctgaggcagatgaagccatgggtttttgtttattcaacaatgttgccgttgctgctagttttttactaaacgaaagagtaaggacttgtactgtttgcttttaattactgtcaaattctttggtcacattcctttggagtgcgtgttcccaacttctttgcttttcctgaatgcagccggatctaggggtcaagaaaattctgatcgttgattgggatgtccatcacggaaatggtacccagaagatgttttggaaagatcctcgtgtactatttttctctgttcataggtatgtaattgtgaccattgtttactcttcttatgatgtcgcttgtcatgatttaaggagcctactttttactctattacccctttgcttgatttttacgcttggaaagtaactggaaatgcatttttggttaggcatgagtatgggggtttctatccagcgggtgatgatggcgattataacatggttggggaaggtccaggtgaagggtttaacataaatgttccatgggatcaaggacgatgtggagatgcagattatcttgctgcatgggaccatatcttgattcctgtggcgagggaatttaacccggatgttatttttctttcagctggatt

SEQ ID NO: 31251 - DNA, 2065 bp, Arabidopsis thaliana landsberg
  unsure (1)..(2065): unsure at all n locations
atatgggagagcagaatctccatgagttgttagtgagagtaataagttacgctaatggaaacccgttagctatcagtgtttatggaagagagctgaaaggtaagaaaaaactctcagaaatggagactgcattcctcaaactcaagcgacgtcctccatttaagattgtcgatgcatttaaaagcagctacgacacactcagtgacaacgaaaagaacatttttttggacatagcttgttttttccagggagaaaatgtcaactacgtgatacaactgcttgagggttgtggtttctttccacatgttgaaattgatgtccttgttgacaagtgtctggtgactatttcagaaaaccgagtttggttgcataagctgacccaggatatcggccgagaaatcataaatggagaaacagtacagatcgagaggcgcagaagactgtgggaaccttggagcatcaaatatttattagaatataatgaacacaaagcaaatggagaacctaaaacaaccttcaaacgtgctcaggtttgttatattttgatagtttcatatttattctactttatgagccaacggcctaatatatccacttccaatattttcagggctctgaagagatcgaaggcctgtttctagacacatcaaacttaagatttgatctgcagccctctgcctttaagaatatgttgaaccttagattgctcaaaatttattgttccaatcctgaagtccatcctgtaatcaatttcccaacaggctctctgcattctcttcctaatgagctaagactcctccattgggagaactatcctctgaaatctttgcctcagaattttgatcctaggcaccttgtcgaaatcaacatgccgtatagtcaacttcagaaactttggggtggaaccaaggtaagcaaactctgcgtctttcacatctatcattacttgaaattttttgttgttattcatttagcttgcttttgtttttgtcttctcagaacctggagatgttgaggacgatcaggctttgccattcccagcatctagttgatatcgatgatctcttaaaagctgaaaatcttgaggtaattgatctccaaggttgtacgagactgcagagctttgtgagcatgacggaattacagcatctccgagttttaannnnnnnnnnnnnnnnnnnnnnnnnaagtgtcccagggattccaccaaatatagaggaattatatctccaggaaactagcatagaagagataccaatttccattgtggcccgctcctcccaacaaaactgcgaagaacttatgcatcatataaaacaattcccgggtcttgagcatatcgatttggaaagtcatgtaacaaatctgattaaatttggctcatataatcaaggtactggcaagcttgtccgcttgaatatgaaaaattgtttccagttgcgaagtctgcctgacatgatcaatttagaatctctccaagttcttgatctgtcccactgcactcgccttgaggaaatcaagggtttcccaggaaacataaaagaactatatcttgctggagcaggcatacgagaattgccagagtttcccgaaagtcttgaattcttgaatgctcatgattgtcaccttctgaagttagttcgtttggactttaacaagattccccgacactacacgttcagtaattgctttaacttgtctttggaaaagactgctgagtttctagagaaaggtatgactagaatgattaggttagtcagagaacaaaatcaggtatttctctccttcttttgtcacatgtgcatatcctctcacatacatatatattcgctatctaatttgatctgccattgttgaaacaggaacacattaaagcacctggattcaacatatgtattcctgcagacacgtgtcagaagtcctcctttcattggcgaacaggttcatttgttatggtagaacttgctccttgcaagcgaaaagctctacaggttttgctatgtcagttttagtatcatttcgagatgatcaccacaagtgccgtaggtttagaacattaggtgtg

SEQ ID NO: 31252 - DNA, 1267 bp, Arabidopsis thaliana landsberg
tcatcatgtttcgtttacttacaggtatcctcatatcgaaaaggatcacttggtgaagcttctcaaacaactaattttaaacccgtctttcccttcacacatgagagttgaaggaaatgctcctaatgctgctgatgttccaacactattgggatctggcaccttttcacttgtggatcgtagtaattcttattcatctactttgtcgtacctgaatttcaaaagcttttccatgaattgatgtttggcaatcaggatatgttctttctttaacttttgcatgcaattcatctgatttaatttcgaccgcacgttgtttctagaatggatcgctcagcaacatgttcctttggatctgggacttgaaaaaatcccatatatgcatagaacctgatagtggctctaaggctttgcattttagaaatttgtttttctggctttggcaatctttacttggtatcatgacttgtattgggaattctggtgaagtagctcatataggagaagttaagtccaggggtgctttaacttggatagtctccctaacctctccaattcttaccctaggtctttgattaagtagattcttaatcgttaattttgttctttttctgtgaaggtaacaatatagagtctcagaaagctaggcatgttgcgtcatacttacgctggccgcatatgcatgccgatcaagtgcgtggcctaagtctcagagaaattggaggaggtttcaggaaacaccaccgtgctccgtccattctttcagcatgtcatgctattgcaaaaccatcaacaatggttcaaaagatgcaaaatataaagaagctcagaggacatcgtaatgctgtctactgcggtatgatcttcataatacatcctttgtcttgaatctctggtttgtgggaactctatactttgttttgttacatgtgcaaccttgatattataccagtctgtttacatcttctgactaggggatctggaagttgtaatgtagtatgtccatcataggagcaccgtttattgtcatagaatgttttttgtgggtagaaaagtaacagtatggctatttatacttatgttgcacagctatatttgatcgttctggaagatatgttatcactggctccgatgaccggcttgtcaaaatttggtcaatggaaactgcgctttgcttggctagctgccgtgggcatgaagtgagctattgctttccatatttgtaagccataggttctcgactattctattaaaattagtctcgcct

SEQ ID NO: 31253 - DNA, 2160 bp, Arabidopsis thaliana landsberg
  unsure (1)..(2160): unsure at all n locations
gcatcatggtctctctctctgaagtggggctctctctctcgctttatatgtgactttcaaatcggccgagtcttctttttgtgaactctttcaaaggagctcagtattctataaacacctctctttgtttgatcgatttcacaagccctagtttcggcgatcttaaatctgcaaaaaatatatggcgtcttctcctggtaatactaaccctcacaatcctcctccgtttgatctcggtattctcttcaaaccttcatccaatccttatccgccgccgccggcatcttatcctcctcctacaggtccttttcttcacaaccagtacgatcagcagcactacgctccgcctggtatctccgctcaaccatctccggttactcagcagcaacaggatgtgtcttcctcttccgccgcgactaacttgcatcctcagagaacgctgtcttatcccacgccacctctcaatctacaatccccccgttccaatcacaatcccggtacgcacatcctcgctctccttaacaataccaacaacggagcccccgtggctaaccaagagccgtcgcatcagctcccagtagtcaatcacaacgagatcgctcgctcttttcccggcggttcaggtcctattcgtgtaccgagctgtaaattgcccaagggaaggcgattgattggtgaacacgctgtgtacgatgttgatgtgagattacaaggtgagattcagccgcagctggaggtgactccgattaccaaatacgggtcggatcctcagctcgtagtgggtaggcaaatnnnnnnnnnnnnnnnnnnnatttgctatggattgaaaggaggaaacattagggttctcaatatcaacacagcattgaggtctctgttccgtggccattcacaggttcatttactttttctctgtaatttgtgaattacttacttattcaagtatagtaggtactcatctagttctaactacggttatatatccagagagtgacggatatggctttctttgccgaggatgttgatatgttggccaggtaatgttttggaactgtcgtctaattaggctatgctatttgtacatatatggaagagtggctcattgaattcttctttgtttattagagtttttctggttagcttcttcgactttgtggtttatacctctatttttctgtttcttttaaacagtgttagcctagatggaaaagtttttgtgtggaaaatttctgaagggtctgagggagaggatcagccccaaataactgggaagatagtacttgctcttcagatactaggagaggaagacaccaaacatccacgcgtttgttggcactgccacaaacaggtagttgaacatatttcttttgctacgagaagttgcataagattcttcttagaacaagcttctgattgcttaaatgtcattttttcaggaaattttggtagtttcaattggtaaacatgtactgcgtattgatactacaaaagttggcagaggtgaagtattctctgctgaggctcctctccagtgtccccttgataagctgatcgatggtgttcagattgttggtaagcatgatggagaagtgacagatttgtcaatgtgccaatggatgaccacgcgtctggtttcttcttcagttgatggcacggtttgtgtttgttcatatcatcccttttctttaaacctctctgaaatgaatcattccaaacaacccaagtttatactgattacgttgcaaactgggtctaatcctgacatttttcgtaattagaactagccagccttgttagtaagtgcatttgacatccaattactattctagcacattttgaattttttaaggtttgctaagttccatttctgacatgcactgggtatcatctcttttcaaccaggaattattttgcaacagctagtatttctgtgtgtgtgagtcttactctttctttccttataaccatcgtacagattaagatatggcaagatcgtaaggcacaaccacttgtagttttgaggcctcatgatggacatccagtcagttcagccacgtttgtgacatctcctgagagacctgatcacatcatacttatcacggnggtagttttcttgaatcaatactactgacttttctcagctctatctaatctcatttg

SEQ ID NO: 31254 - DNA, 2410 bp, Arabidopsis thaliana landsberg
aaaactgatagggttgggctacacaatgtaattacaagctaaattcattcaccacttcatcaacacttctataaacatcaagctaccctaactacacatcataccaattacaaaccaaaatgggaaggtattcaagtagatttcacccaaacaatacaaaacacttggttctactgaatgagagcaatgaaccaattaaacaagttaaccaaaagtcatttccaaatctttaaactaatgaaaaactcaatgttactacaataagtactcttcaatggaaactttggaaacataaatgattaaagatcgtcttacacaaatgtgaacaatcaaaactgataaagaaaacaaagtctttttcaaaagaacaaagctctcacaataagcaaaagtaaacctcttagaatccaagcttggttctgcgccaatgcctacgcttagcattgtacctgtaaaaccaaaacaaacccacttaagattcactaattctaaacctaatcattcaaactaagagaatctacagttccatttacgaacctgatggtgttgtcggtacgaagacgaatccagtgaggaataggcctgttttgcctcattttcttccccaatttcttcttaatcatgaacgacttgtgcgacggctgtttcatacaaagaagatatcatcaaaaatgattcaaagactcaaactttcgtaacattaagataaaattcagtgtagatgattaaggttgacgcagagtagatcatcaaaatgattcaaagtctcgaacttccgtaacatttacatactaattgataatagaagagtataaggatttagaatgaaggagatgtgagaggatttaccatcttgaagtcttgcgatcttggtctagaccgagccgaaacactgagaaaccctaaatctggagaagaaacttgtagaaagtgatggaggtgagttttatatggggacacgatgctagggttaggttttatagattgggccacaaaggcccatttacgtaagcatcttcttactatctcgttgtaacttactttcaggccttcggttataatatctggcctgctattggcttcggtccagcacaaaaatgttggataattgatgttttcaagattggaccggacttcgatttcgaacctgtagaaggaaaaaatgaatggtaaaagattaaattttaactctcctggatttgtggaggggatgtggttgattgactcaacattagacctaacccaaacctctatttaaaacctatgcttaaagtcgtctagtacactgattacatcgattaagaacttgatcgtttaacgcaaataaaaatctccaacaatcttttcttgttagaaagtaagtaattcgagagtatcgtagtgatttggtttgttagagctgtgttttcgagtgcttgtaaaactagtttagagatgttgtatcctgagatctttgaatcacatatttttgtcacactatatgtgtgcttagtatttaaatcattattttttaatgaataaaaatattttttaaaatatttcatccaagacatttctttattttgtaatgtcaatggccaaataattttggaggatattaatttttggtaggtatcctctaaatgattagagaatgaaagttgagaaatcaatcacatgttttgaattgtctggtatgaaacaaaaagcaagcgagtaatgcaccaatctcgcaatgaattggtgtacgtttccatattaaatttgtagttggacattttcaaaccttttcttttgttagctggaacccaaaaaggaaccattaataaataattttgcatacatatcaaatcacagagaaaataacgaatcaagcatgagggaaaaaaaaatacatattgtgtggcttcataacttcatcgcagtccacaaacttatctaaatatggctctacctaatacgatcaaaactatgttagtatatttaatcaaacacatatcttctttttttatattataatttttgtagccaccaaatcaacaatatttttgagttttgttgtagcaaactagaacaaactgaaaaaaaccgaagcaaacttaaatccacatgtttgccgtcatctcattgttcacgtgtctataggtttagcatatagtcagcaacttaattttgtatcttccctttctaaagtttatatcatacaatgtacaacatttcgaaaatacgagtttcgtgtaaaatcgtatcgaatatagaactagttgatgaaatcatctactagtgatctctatgatgtttattttatatgcatgatttagagaaactacatctaaaaactgtgagttatcaagtgtcaatagctcaaaactggtaaaatattttagctaaacctagagggtgctggttcccataacctttgaaagaaaat

SEQ ID NO: 31255 - DNA, 3263 bp, Arabidopsis thaliana landsberg
attgtaatagtagtattagagagtagccttcaatttacgacgatgacgaccccaataatttagttttatataatgttaaaaaattaggtttactgttaaaaaacatatctctagattggaatattggatataccaattatcttctggaatgtgagtggattaagacgcattgactccatgatcctgcctatcttcttggagactttttttttggttggagttctataatttatgatatctaagctttattatttttgctcattttaatcagatccaaacaaaacgtactcgttgtttcccttgtatgatatctatgaaatgcgataggttgcaaaatgcaaatcactagaagaaaactaaaatatattaatatgttgaggagtctgaagactagagttcatcacatctatttatctatagttctcaacctaactatagtgttccttgttttgtatgtttatctttatagtatttaattatgctaaaaaaaaaactctaaatttagttaattctatggatttatttctaaattagcttacattatttttagtaaatttagtttattttaaatttagttaataatgttaaattaattatgctaaatcatatttacaacaaccttgtttagttgtttttacttgttttttttatttatattttcacacaaatataacttaaatctcttacaaaatctaagacacatgaactcatttaatatcatctaacaaaacaaaaaaccacttttccaaacactttgaattacgtttacaataacttttgatttatagtataacttaaaatcacactattgaaacatttaatatgattatatattttctgttatgccttcgtatgggcctatataacgggcctagtgagttcaggcttttttccttcagttgaagtaagtttccatatttggaagaaatacggttctgttctttccatctttttttttttcttttttttggtatcaatgttaagtatttatatcatttttgaagttgtgacagaagttacacggaatacatgtagcggaaaaataaatatacagaaggcacagacaaaaacaaacagtaatagtggttaaagttaaccaaaagcggaaacaagagaagaaacaccgattctgagaagctaagatttccacaactcgaagataccaaagagttggagtcccatcctagttgccacgagcaaaccttagcaaaagcccgtccacaaaacctctcgataaagcgcctatagcttctccgcaaactaacgcaaaaacgcaaagacaacagaggactaaaacacaaatccgacggttacaggagcatctacgggtaaccaaagaaaccacattcagtcaccattcctatcaaaacaataggaaccatctcccacggataaatgatgcctcgaagaccaacgcgccgcctctattcttccctaaagactccactccgacatgacgcacaacatcactgttgtctaagaacaaaacaacaacaacaaaagacaccacaagctccaacttcgagcaaaaacgatgaagaagcgaggaggcttcacgaagagcagaaaaaacaaaacagagctccgactgatgaaactcacaccatcaccagcccaaaaacagaggggagtcgttgaccacccaaaacctagtcaccaacacaacgatccaacagccacgaacgtaacaaacgaattggatccgagaaaccaaaccaagttgttcggcctctgtaagagccgagaagccaaaacctcaccaacctccaccgaaagcttgggaaacagaagaaggagaggccgagaagaggagaaccaccacctcgagaccaccgtcgtagagcccagccgagaacgacgaagtgcagatctagaaaaacgaaggcgatgcaccacctgatttctagatcggagaagaatccagtcgctaggaggtccagcgaacccaaacgtctcatcaagagccacaaccaccgcggaaaggagaaacccaccacgcaccaccaactagagacgatgggcaatcgaaatctgaaacaaaacgatggagcacgagaggaggagaaacatcagagacaacaaagagggaggagaaggagccctccccgttcgccggcaaggagtgccgcaaacggagaggcggaggaggcagatcgccgacattatggtttaaacttaatttgtaataagaaattactctaaaatgatatcggcatagatattgtattagacttcatttttaacaaatatggttgtacaacaaccaacctaaaccatgattagtgaagaagaagcaataaaaatagagtaaataaagcccaaagaattaatgaacaaaaataacaaagaggatgttgacgaaaagtcaactccactaagctggcgacgacaaaaacttctgcgatttaagttaaatttgttgggtcctacttcgaaaccagatcatacggctgacgacgaaagtttgactcgatcctctctcttctttttcgtccgttatgactcttatcatcacacctatcttgatttgtctctccataaaaaaaaaaaaaaaaaaaacattttctttttcattcatcttaacaacatgtattttatcaagtttaattacaatagtgtcgacgaaaagaacaagaaaaatgccgacaaaaaaaaaaatactagaacaagaaaaattagaataatgtaaaaaagcgattaagttagtggtttagccgtttgtccaccttcaagcctaatagttgggacatctcttcctttaggggagtaaaaaatgagtctaatgtactaattaaaccagaatagagataatttcattttaatacaaattactagattatatacgaagtagtaatacttcatttgttctaaaaacttttttgaaaaaaataaagttttttcgatgaaatgtataattggttaatcagagtaaaaatatgtacaaaagtgtttaactgtgtctaaacggatgactagcagtttaataaggagttttggacagctttaatcactatagttgtaagaaaacaagatgtgagtttgtaagttctctcacaaagtttttttccaaagctctttcaaaaacattgaattgtaggcattacaaatgttttggtgcttaaatgaattgtatcaaaaattgttggtgttacaaattgttacaacaactcatctaataaagacttgattcttctatctcgacaaaagattagagtttgccaaagctcatgggatagtggcgtatagtaaaataaaataaaatg

SEQ ID NO: 31256 - DNA, 911 bp, Arabidopsis thaliana landsberg
catatcataaacaccaatgacactagtttcagcaagaagaaagcacgctgtgaatattaagcagagtcacaaggtgatcgaataatacatacctttgcataagttgcattctcaaactctgttttttcactgcagagtttttcaccttgcgctagacatctctcagcttcacctctcatcttctcaaacgatctcgtcttgttcacaacttcatcctgtgtaaacacttaagtattgagagattgacacataccttccaaacaagaatcaaattgccatttctaacaaagctctaattcatcataattcagaacgtatagtataagagtcatacacttagccttatgttagcctccataagaaaatccaagatcccaacagtgatcttcttgctatcatgtgctggtttacacttccacctccactcaagtttagtcccttccttctcaaacgtccaagagagctttcaccaaaattcacaaccaaagacacaacgacatacaagaatctcaggcttacttcaaaacattaacgaatgatccaataagaagataactgacccgtttagatccctcaagagcatcggagaaactatagatcgaattaggttgtcgaaaccctaagtattgctcggcgagctttaaatactctgacacaggctggtcccattgtgctgctctctccgccacttcctcctccgtcgcttcaatttcgagcaaaaccaaaataaaaatcagattcgaaaaacgctagaggctaagtgatagtgtgaatttaggggttttttgtttaccattgcaaatccaagaggaggaaccatcggtgacggagatatcgaaacgagaattatgccaagtgcctttgacgaaaattggatcggcgccggagatttcgagacggagacaagtgtg

SEQ ID NO: 31257 - DNA, 4922 bp, Arabidopsis thaliana landsberg
tgaatcagctacaacaacaagagaatcaccagaatgttcacttgtctccatcgaaattagcgatattgttcgatcccgatgcttcttgggacaaggtactcaacactctcttcttcctccctagttttcggcaatctctttgagtctttgactttttttacatggagatttgattaatgaatcgtcgtagtcgatcttactgaatcagtaaggaaatgaataattgatccgatcaagctgttctctactgttcaatttgtgaattttaagctcaagtaaatttgagttattggtatgaattggattttgttttgttaatgatgatgcaggatcaattaggagatgtgttacattggattcgacaagtggtgggattgatctctggattgttatggggctctattccacttgttggaggcatttggatcattctgtaagttttcattaactttggccactaatgtttctttccacatttgtgttttcatgttataatggttgatgaaaacgcaaaggaacagtctttagttttggatcatgttccagcttcgtttctatcagtttcttcgtgttttagtttcattttgcatcgacccaaagccgtagattcatggatcacagttctttgaaacctcttaagtttggcaaaactttgtgatgtaatgaactaatgatgggattttgcaggtttttggcgatatcctctgggatagtttatggttactacgcaatgattctcaaagttgatgaagaagatttcggaggccacgcagctttactccaagagggtctctttgcgtcacttactctctttttggtaagtttgttttcatctcaacagtacagactctttctttaacagtaattataaggtctaacagaatctgtttaatgttctgtcttcagctcgcatggattcttgtctatagcttggcacacttctgaaaaaaaagctgagcaacattcttttcactcagcagcaaaggcattggaactttggaacgaatctttttgttcttttgtttgtttttgtaaactgtctgaagataaggctacaagagacaaaacgttatagtaacaatttttatgaatcttttgaatgttacaaaagctttctatagtatcatttttacaatacacaattgagtagaaaccatcccaaaaaaatctttcttcttttgttagaattatgtaaactttgaacgccgatctctccttggccgtgaaacaaggtatatcctaccgtaaacccattttctccccaatcgtgaggcagatttctgaagcagatagacaaccaaacaaataatctttgttgttagaaagctacagaaggattaatctaaggcagtgactggttcacatttaaaccacagagattgttcaaataaacaaggtcacgatgaagcaacacacgggaaaaaaacactaacatctacctctactttggtacggaactccaaggtgcactcacagacatgacagtcggctttgtgagctgatcggttcgattgatcggatctcacaaatgcgaaaacctacacaagttcatcaaactcaaatgtgacgagaactgaaaacaacaacaattttgtttgttgctgcaaaagaactacaagtaaagaaatcacctcttccccgcaattcgggcagtctccttttagagccgttaagtcatttctccataaccctttaagtactcttactgcaaacagcattattatctcagtagaagcaaatgcgctattaccagattataggtaaaatcgtgtttgcattaaggtacctgcagaagatgcaatcggatatccaaaagcaggccctagcacggagaggaggatgccattaaactttgacaaaataggcacagaagatgacaactgactgctatagacaagccctgagtcaaacggatctcctccataaaccaggccgacgccatatatcgtgggtaaaacacatgccgaactaccaaataagaaaatcataatccatacggtagctaacaggagaacttgcgatgcatcatcctgtcctacaaggatttatctcaacatcaactcttgacaaaacattgttcagcagcagcaaaacaatgatcacatactaagctactaaacagacatgcagtgatgtttttcccactatgacaagtagtaaacgcatatgaaaagcaaacatagagttctttctcgagagttacatatttatagtatgtcaatgaaaaatctaggcccatctgtatcatatgagctaaatggaaacatgaacacccacattgtacctctgcatcagcatatgttgactgtcttagtagactacaccgaggatacttgacaacagattttgaaccataccaccgaagctttagctacaacagaaatgatacaattgcataaagcagaatccaacatttaaaaatcatatcttgctacatacacaagaatatactaacagtgttatcttacctcaactctgtcaaacatgtcatcaactatcaaaggcttgccattgtaatacgcatccttagcctataacataaaaatttcataaagcagaactcaatatccaccgagaccaatccaataagaaaaaagaagcaaaatttagaatttaaaacataggattctaaatttctgaataatacacactccacaaccatagagacgaattttgaagaaccaaaaaacagatttttattaggcgtacttggcgataaagagcttctagagtttctttgcgagcagaatcaataggtccaacgaagatacaagaaggaccttcctcacgagaggtaggtgcggttaaaccaccaccgtggagggctctggttcttgtagagaatcgtacagagaaaggaactccagctcgattaatcaaccttgaaagctcaacaattgaagaagagccaatgagacgaggccttatcgaagtgcaagtacccgccatcagcaacaaatatcttcttcttcttcactcgccggaaacaaattgaaagagaagacaaagcgtgtggtggagacggttggtccgagaaattgtggccacacgatttggttcggcgcgtgcacgcaacatactacgttttatgattagacgataatacccttccaatcggtgatacgattttggcgggttataataaaacgatgtcgttgctaaatgtattataaatttgataatagatgtataaaaataaatattgcgtctgccgggagtcgaacccgggtctattgcttggaaggcaattatcctaaccgttggactacagacgctttttgttaaaattcgacggttgaattatatattcgtaagaacttcgtaatccaatttaccaaacatacgtaaccggaaaaagattttcagctccagactccacgtaaaaaatcaaacaacacatcagatttgtggagaaaaacttttgaagaaacaaaatccaattcggtacaatagttgtagtagcaaaactaatttaaactggtaaattaacgaaaaacagaacactttctcgtctccggtattgttacttgaattattgtcttctttctttaagttagacctcaagcctctttcgtttgttcttcatagcagcaagtttggaccttatcttcaacatcacatctgttgcttcctccatcgtcgcctttcggttttcctcatagttccaaagctctaaaatcacatagctgccactagcgttatgttcctcaatctctagttttgttcttaccacttcattataaacttcttcaccgtactggttcttcagcgtacgaagcttctcgtcgttttcatccacaactctctgcatttcacatttggaatgtggatgatataatatgtaaaagcagaggtctttttttgctaaaaccccatcttttgagaattgaaagtagactcctaaattaaagtcctaacctttggtgttccatcagactcatcgactctaaatggagtccattgcacatctcctatgtttgcttcccacactgaacacagcttcatagccttattctctgcctttgattgtgtaactttatgtttcttcatcactgcaggcaagaagggtgcagggtttaattgccccattctcttcactctaatcttctcttgcttcatcaactcttcattggcgttccatacctgttcatcaaagtaattacacaagttaaaaggacaagccaaagagtttggaacagatagatttagaacgttttcgaacctgaatcatctctttacgtacgtcttgatactcgtcgttggttgcacgttcttttcgtgccagagtcatcattttttcatggagagccgtttcttgagcgtcaagctgaatctgagttttggctatcttctccacaatatctttatctccatcactccccaccatatgcttcatcacatttgtagtacctttcagcttctctatctccaactccagctcttgcgtttcatttagcttagcttccatttccattatccttttatgaagcttctccttctctttctgcaaaagttgtcatagttcaggaactcaaaagtttgaaatggaagcttagttattacttgttcatgaatatatacggaaacactaacgaactacttgcctggtgcttttctgcaagcttcatagcttcctcattcgcttcattctgctcacacatagccttttgattctacaacaacaacaacaacaaagattttattgccttgtgatctttttctcctaatttgtaaggaaagcataatcaccatttctctttcaagtctggacttttccatctcttcttcgtttatgatagcccgttgctcgatcagtcttgcacgctcgtcaagcttctccctctttgcaaccagttcaaccaaagacttttcatgtccatccagaacctgttgatacaactcttccatcttcatcagcatct

SEQ ID NO: 31258 - DNA, 623 bp, Arabidopsis thaliana landsberg
  unsure (1)..(623): unsure at all n locations
agaaagatgtacatgatgatcctaaaggtgagcttacgcagatgagtcaagaactcgaactctcccattttggtccacttgtccagaacagtaataacgttttcttcaatgtacggtatataagtagagagggcttcatggccattgactggagcagcagtcaaacgcctgagccgcttgtgttcctcgaaagagataccaacgaatgatttccttccaatgagttccattgtagatgttggccaacctggcttgaacgcatcatcgtctgtcagcacacgccggcaagtgtctgatgttgttactattatacttgggttcccgaacatgtgtgctttatatatacctttaggtccataccttcacatcattgacaacaaaattaagtcccaaaatcaaaatcaaggtataacatggatcactacaagaattttgcgacctagggactagaagtggagcttgaacgaaataaaagtgatgaaaacaaagccaatgcataacatagatccctccactacaagaaaactgggagatagagattacgagtgacaaaaggtctttaccttttgattaaagtgcgagtgaaggagtcagggtcagaggtcntaaagctcaggaaaaga

SEQ ID NO: 31259 - DNA, 1969 bp, Arabidopsis thaliana landsberg
  unsure (1)..(1969): unsure at all n locations
tgaatccatgacatgctcactctcactgctgagaaatatgtacataatgaccttaaacgtaagcttacgcaaatgagataagaactcgatttctcccattttggaccatttttctagatcagtattaacagtttcttcaatgaactgtatgtatacagagagagcttcagggccattgacaggagcagaagtcaaacgcctgagcctcttgtgnnnnnnnnnnnnnnnnnnnnnnnnnnacttcctgccaatgagtttcatggtagattttggccaacctatgtggaaggcatcatcatctgttagaactcgcctacaagtctctggtgttgttactagtacacatgggtacccaaacatgtgtgctttataaatcccggtacgcccatacctgcatcattgaggaaacggagagtatgtctaagttttcaattcatgatatggagaagcaagagagcaaaaacaaaatctcaactaaagcaaaaagtttgagaagagagagcacctggtgatgtaggattggatgaaggattcaggatcagatgttttgaaagctctaagaaaggaccacatgttgcctatgactggccatcccaaatcacctggtggcagatagtgttttttctcaccaagtttggacacataaatccaaacattcactctcttcagcacccatttcaaaacaaacaatcccaatattatcaaagggaaccacatgagaatcaaacccgtttccgtcatagcttcagtcgtatacactctcctatacaaaaaaactcaatcttttgcacctgaccacctttagcatcctttagaagttatatcataccctgcatatagataaaaaatggtgagaaatatctatataaaaggaggtttcttaaacacaaaggagagtaaacggacaaagacttaaaattagaatagtggaacagtgttgttgagtctatcaagggaatgatacttatctaaactttaaactaaagaacccgaccgcttgttttctatctatttgttggatagatgttcacatgtagtgctcagtgaccatactttcttttccattttagctcactatagctcttccctaagcctttacttctttgagaaaaatatgttctttaccaaaaccatactctttataacattcattgatgacaacaatcacataagaaactccaaaattgaacaacacaccacgcaaattgatcacaacaatcacataaaaaacttctaaactgaaaaacataccacgcaaattgcagtaccgttggatccaaactaaaaccaaactttgcaaagaacttatgtaaaaagaggagacagaaaggtgataaagagcaaaactcaaagtaggagtctaggagaagtgagactctaaataataaacgttgcagaagaatacaaagaccgtaaatggtggtgaagagcacacattcccaaaacagaatcaaaaggaaacaatttaacagaagaatccaaaattggaacaaagaaacaggaactcctatcaaatttctcgtgaatcattgaaagacacaaagactttattcctgtttggttcaattttagctcttcaagcgttacttttcttttgtcaccaaatcaaatccgtcaattttgtcttcctctgaacacaacccacaacacatttgagagaaagcccgaacctttttgagccaccctgcttcgtctcccccattggcgagagctacgtgagcagaaaaagatgcaaaatttcagtccctccggttaaataggtgtcagaacttgccggatttgccttctccgccatctccgtaccaccattgaaccagagattgtgtggcacagagtaaactaaaaagagcacaactttgataaaacactgttctatttttacctcataacatacttatttctttgtaacaagatattaaaaacattcgttactttgcattgatctaaataaaacccacaagctacttca

SEQ ID NO: 31260 - DNA, 5158 bp, Arabidopsis thaliana landsberg
  unsure (1)..(5158): unsure at all n locations
cggctgttgacaaaaaacgaatctcttgtattaatacttttcacttcatactactttttataaatttctagttacgtcccaatctcatgcatatttattaatttcaggccatttatgagattttattacagaagttacctcgatttctacattaaatgcacaaccacgattccttgtgccaaatctctggttgttgttgacttgttgttggtgtttcaaattgatgttttgtgcttatacaagtatctgcaaaaggcatgcaaaattagctatgaacacttttgtaatctttacgaacagtaaaacaagaccataactgaaatcaggaaaaacaattatttaatcaaaattgttttaattttgattgatattaaaaagaattaagtttggcgaattttgaagtaagagatctgaaggaataatagtgtggggttcacaatagaaaaagagtgtaaataataggactgtcattaaataaggagtaaataaaattttgttgggaaaattagatacaaatatcagaggaaataaatctaagaaaaaagaaagagtccagagtttgctccacttttacctttgaaatttagtttcctttttaatttttgcgaaatttcaggagtgtttctggttaatgtgagaaagtagattcgcaagaaaccaaaattaaaaaagtgagcgattcgtgttcgattgattttgtggatgatccattatctttctccaatatttttgatttgagcgagagttttgcttcattcggaatcttaagatgtcaggtcccgttgatcgattcgcaataccatgtaagtgtatcagatctgtttattttaatctctggatccgtcggtttctgtcaatgcgattttgctagggttttattcgagtaatgagaagcgaagttctatgcaatttcgtttttttttcctagtgggtactacttagggttgtgctatttacaagcctcaattttgagaagttgggtcgtgatttcagctgccaatagttcagtggttgatgaaaaatgttttcttttttataggttttgagggaatattgagcagtgatgagaaaaaggaaagaaagtctgattttgagaactcagaagatgagaggagaacaagaatcggttctttgaagaagaaagcaatcaatgcatctaccaagttcaagcattctctcaagaaaaagagaagaaaaagtgatgtccgggtcagttctgtctccattgaggatgttcgtgatgttgaggagcttcaagcggttgatgagtttagacaagcattggtaatggaggagttgcttccccataaacacgatgactatcatatgatgttgaggttcttgaaggctaggaaattcgacattgagaaagctaagcacatgtgggctgatatgatccagtggaggaaggaatttggtaccgacactattattcaggattttcagtttgaagagattgatgaagttctgaaatattacccgcacggttatcacagtgtagataaagaaggcaggcctgtgtatattgaaaggcttgggaaagttgatcctaacaaactgatgcaagttactacgcttgatcgatatattagatatcatgttaaggagttcgagaggagttttatgctcaagtttcctgcctgcactattgctgccaagannnnnnnnnnnnnnnnnnnnnnnattttggacgtccaaggagtgggactgaagaacttcacaaagtctgctcgtgagcttattacaaggttgcagaagattgatggagacaattatcctgagaccctccaccaaatgtttatcatcaatgcagggcccggattccgtctgctttggagcactgtcaagagttttctagaccccaaaacgacttctaagattcatgtatgttaatacatgtttttgctttttatttgtacctctagttaatggcttcccttaattaaactactcctgagattcatcattgactgttcaacttttttaatataggtactcggctgcaagtatcagagtaaattgcttgagattattgattccaggtatgtagcttgaatttctaatccttttttcccctccagaattactcaattcttctgtgttttgcttacatcagtgatgtttctttcatttgtttcagcgagttgcctgaattcttgggaggggcttgtacctgcgcagatcaggggggttgtatgctttctgataaagggccttggaagaatccagagattgtaaaggttacttatttgtcctttactgatctctttacacactctagaattgaaacaaatggtttactgttgttgcagatggtacttcatgggggagctcaccgtgcgaagcaggtggtgaaagttctgaacagcgacgggaaagtcattgcttatgctaagccgtcttatccatggataaaaggaagtgacacatcaactgcagaatcaggttctgaagctgaagatattgttgtgtctccaaaagcagtaaagagttattcccatctccgcttgacccctgttcgtgaagaggtatgatatattttcacactttgtttttatagaatacatgattcgtggttttgaatcgtccaagtgattattttgcaggcaaaggttggttctggtgaaacgagttttgccggtagttttgcaggttatgatgagtatgttccaatggttgacaaagctgttgacgccacctggaaggttaaacccaccgccatcaaccgggctccttctaaaggtaatatttttatgctttcacttgtggcatcaaacactgggaaaagaaattgaaactttggtctcttatgtatcttttcgcaggagctcatatgcctccaaatgtcccaaaggatcatgaaagcttcagtgctcgtgtcctagtaactttcatggcttttgtgatggcgattctcacattcttccgtacagtatcaaaccgtgttgtgaccaagcagcttccaccgcctcctagccaaccgcaaattgaaggaagcgctgctgcagaggaagctgatctcctcaattcagtgctgaagaaattaaccgaacttgaggagaaaattggagcgctccagtcaaagccatctgagatgccttatgagaaagaggaactgcttaatgcagctgtctgccgtgtagacgcccttgaagctgagctcatagccactaagaaggtaactgaataccatgttcaacaattgaaacccaccaaaattagaacctgagacgtttcacgttctctaaaaactgtttgttatttgaagcaggctctttatgaagctctgatgagacaagaagaattactcgcttacattgaccgtcaagaggcagctcagcaccaggtcggttttttcttttaaacctttaaacccgagaatccaaatttgtcttcttgaatcttattcatttaaattctttcaaatgcaatgatggaataaaccatcaatattgtttttgtttccagaagaagaataagaggaagcaaatgttctgtttctagaagatgaagaagaagaatcaaatgtttgtttctagaagaagaagaagaagaggcatctctgctttctctctctcccttgtaggtttccattgaaacagaacaactctcatctcattttatgttaaaagctaatcagttctttctcttttatgataatgattagtttatgatgatgattatgatgatgacgaatgagtcttttaagtttatattaacaaaacaattataccaaaaaaaacacaggagaaattgagagtccttagatacagacaaaacatgacttcatctttctatcttctccagtatccatattttaaaagattacagtaaactggaaattttgatttattttccaggcttcttagcctctgatgcagtcttctagaataataagaactgaaaatgcaagaaaaaaagtagagatattatttcgaatatagcaaactacaagcaataaagtaatcagtaatcagtcttaggtgttttgttttatgtgaatttctaaccttccgcttcttcttctttttcttctcgatgaaagccattatctcatgttgcctcgtcattgtctcgtctagtgcctaagtttttgaaaacagagcaatcacaaaacagagcaaacagagcaagagactagcgagagagaagaaaagctttaccttgttggtttcagacaactgaagctcgagctggtcaatacgacgaagtgcagcgtctagagtcttctccctctccatataaaacgcagcctgagcttccatggacttacatttctcctcaagatctgttatcttcttcaccatcgcaatatactcctgcttcgacataacagtcactccgtcctggtagacggcgctgccttcacggctataaacatttgcctcggtgagcctccttggcatgttcttggttagcctcatcactcccactatccccattagcaatgccatgacgctgccatataagtaccctttcctctccaacggattcacagctgagtacacatctgaatatagagtttcacggagtaagaaacttatacacaagcaagcccggtttggttgacgagaatactaacctttaaggtcggtagggtttttttcagccttgttaagctttgtaggccaatcagcagccgctgcagcatccacattcttgtcgatgaacttcttctccatctccgcagcagattgcttgtgagtctcttctggttcgcatttcttctaaaagttctcaaaagattagattttactgaaccaaatttcagagaaaaacattcaagatctttgcttcttacctttgtttcgttgttatactcagagattgtcttttcctcgatccctgacaagctccttcgcaggcatctaccttcaccgttctgaaccaactgtgtataaatagtttacatattaatcccaagttacattgtaatataatgtttttgatcaaggatttcttaaggtagttagttctatagaactaccttgaagatctcagggtcgttccatggacctttgtctgaacgcatacatccacctttgtctgcgcaggtgcgcttaccacccaagaactcaggcagttcactaaacaaacaatgcgaagagagagttttgaatcacatatttgaagataaagctacagttcaagtcaagag

SEQ ID NO: 31261 - DNA, 3863 bp, Arabidopsis thaliana landsberg
  unsure (1)..(3863): unsure at all n locations
ccctcaaacgagcctaaaaaatttttatgtgtccttctaatctatggcgctggaaacgggtccaaagggcttcatgtatacacatctttgtgtatcttcttctaatatcctatttaagatcacactttatgcatatatataagcaagtgtattcatggttggattatggtgatcttttggacagcaacttactgatcagacaagagctgaagcagcggaatctttgtgctttgaagcaaaatgcagagtacatgaccctgtttatgggtgcgccgccattattcatttacttaaaactcagattcagaaaactcagaatgaattagccaaaactcaagctgagattgctgtttctcaaaccaaacttagccaaacccaaaattctgattttatgtaatatctctcagttccatcaataaaatctcctctgcatttttgtttccctgtaacttataagattcaactaactttgatatatcaaactcataatcataatcaagaggccattagctatactgaaaagtgtatcacaaaacacaaaatgtaaacaagtttgaatagtttatgattatttattacaaatccataactcaggactacaattatacagtcttcaccgatattttgagaaccataatgtaaaaaagagaaagagaaaaaaatggaaaaacatgaaacaaagtttgatgaaatcacttccagttgttggcaacaatgtcagccaagtcaacaactctctgtgagtaaccccactcgttatcataccaagcaaccaccttgaccatatcatcacccataaccatagtgagggacgagtcaatggtggtagagacatcagagcacctgaagtcaacagagacaagaggcgcatcgcaaacgtctaaaatgcctttcatcggtccattagcggcttttctaaaggcctcgttcacatcctctgctgtcaaacctttcttctcaacgtttataacaaggtcaaccactgagacgtttggtgttggcacacggagtgcaatgccgttaagttttcctttgaggttagggagcacaagagccacagctttggctgctcctgtagatgttggaacaatgttcaaagctgctgctcttgctctccttagatcacggtggctcgcatctaacaacctttggtcaccagtgtatgagtgagtagttgtcattgtaccctttatgatccctaacaagtttaacacacaacacaatattactcagatttttacaagattgcaacatagcaacatttgactttcaatgagacgcttaccaaatttctggtcaagaaccttgacgaatggagcgagacagttagtagtacaagacgcattgctgatgatcgtatcttcatggctgtaaagttcagcattgacaccaacgacataagttgggatgtcaccttttccaggtgcagtgataagaaccttcttggctccagcttcaatgtgtttccctgcaccgttctctatccacaaacactccggttccttcgatgacaatgtcaattcctagctccctaagagtaccggccatatccaattcaagtgcttattctaggcttgagataaaaagactgatcacataagtggtttttcgacttacttccaagggaaaagagacgggtttcggttagaggcaacttggatgatctttccatcaacagagagtgcagtctctccagaaggtttgacatcagcatcaaagattccgagagtagagtcgtatttaagtaaatgcaaagcctgcttgacgccaccagtgtcattaatggcaataatatcaagaggagagtccttgcgaccaagccaacatctcaggaagttcctcccgatcctaccgaatccattaatggccaccttaagcttggcttcagtcacacctttcctgtatccaccactgcttcccatctgatacacaaacagaacaaccatccaaatagtttacaaaaccggcgagaaacagaagcaaacataattcatccgatttatcgatagacatgcatataggtacaaacgtttcatatagttgatgatcatcataaggcagaacacgcaagctacaaataatgttggaggagaacagagaactcactgcagaagtctggaaggagacgatggaaacgaactcatcggaagaaagtttcttgccgaagggaagagaagcagaggagcttcgcaatcctgagaattcagtgaaaccctgaaaacaaaacacaacatttagttaacttgtgtaagagagacctgaagaagagaagaagaagaagaagaagaaggaggaaggtaccttggggacagagaaagtaaccgaagccatggtgaccagaaagaatccaagttaaggtttgtagcagacaggagagcaaaaaggattggtgaagcagagactagtaatataggataaagaattgatgacttggaggcaaataagattagattctggatagctttcttacttgtttctatggttgtgattttagcactctcttgtctcctcatgtttctatgatcacatattcacaaagtccctccttcacctatttttttagatttttgggcctttcatttgggcttcttcatttgtgtgtgtggtcacagttataaaaggaggataaggctgctctccatttgtctgcctttcaaagctcagactttttagagcagaggttcttaggactggctgagagagtattggccaaaggatttaggaaagctgattttttaaaccacggaacttgtatgccttttaagttggacagagaatctatatgcctgtattgaagtaatgaagaatacatcatctgtacgatgttactaatgcctaatttcacaaatctacatacccataaagtgttttaagtatcattgcaaaaatgacatggacaatggagacaaagcttataacaactaccatagaaagctacacattccatacgatggtgaggcagagaaatattattctgttaagaactacctctatacacacactccttcaaaatcctgcaactccatcagctcgagggcagagaaacataaatgctggtgttagtcataatctacttcaagttccccgttatgccacatgctctctgttcaaaactaacttccatacgtctaatcaaatccaatgctaaagctagttattcacaattttgaaggtacatagttcctacacagaccatactatgaaaggaaactcaatgaggcttagagtcagagatcaaaagatcattaatcaacaatagcaacgagtttttacatccaagtatccaacagaaatctgtaaaacataatcagacccggagaatctgcagcttgttagagaaggcaatggcaacccaatcaggctgagaagatgaccactgaagctgctcaacatcagcgccggctgtgtaagctagaatcggatgaagaccaccttcaacatgctgtcccatggaagatatatcccaaatcaacgcctgagannnnnnnnnnnnnnnnnnnnnnnnnnaagagctatgaggagcccaagctatagcattgacactagcctgatgtcgctgaagctccacgacaggaagagccggaaaccgaatatccaacacaacaattttagcactgcccatgataacagtagccatatacctcggatcctgcttgttccaactaagtcgcaccaaaggagtactaggctcccactctcgtagataatcgtcgaatgccctttcacgagatcaacactctaacggaaccatcctctagcagaggcaaagacgcaacaccaccccaagcaatccataacctctttatcatgagcaataagtggaaatcaacaacttcacgctctatatcccaaaagtcaagggt

SEQ ID NO: 31262 - DNA, 6446 bp, Arabidopsis thaliana landsberg
aactgaatatacggcctcatatatgatcaagtatttcatatagttaagaaaaaggaaagagagttatttctttcttaaaggacgttgacccttctacagtaatgttgcagatccaaccccagtctcttatctgctctgaataactctggagtaactgataacccatctccggcagtacctttaatgtcaacacaaaaattaataatgcatcattaataaactgaggcagagtagagaactctgatcaagttcagcagatgattttatctattatctagtatcatgttcaaacgtaccaactcttggtctgcactcaagtaggtgactgtcctcgctttccctgccaggacctatatatttttattgtttatcaattgattagaagaacaatattattcaaactaggaaacattacaaaagtagatccatgaagttgagattccaagatgctcttacctttgtacgcagctcttccaaacgaattctttcatcggcagcatgctgtaagaaattgttccctcagatcaacttgtagcaagacatttattaagagaaatagtttccacaacttatggtgtcttagtttgaatatattcatcaaccatctacagatataaagtttccagaatcttagataaatgagacgaaagacgaacctgatcaacgatggcaactgttccacaagcaacgattgggatatattttttatcaacctgttgtagaaccttggcatcttcaagggagtgtctgttgatagattcaggaaccaaggattcatcggatcgtaagtgcagaagtcccgaagatatatcaaatacaccatcttgaccatgaagctcgtgtgattccttgggaacctgcacaacgatgaaaaatatgatggatgctcagttgtcttccatagatggaaacggaaagtcatactgttagacaaacaaaccatttcaatttgcctaacctgagagaccgcacagttatggcgccattttgttgtggatttaattggatccagaaattcctctgagctgaagtctgcgagatagataacatacttaaatactccagatggaagaggggagaagaaaaaaggaaagacttcctattaacaaacttggaaaggagcacgttttgactaacaactatagtctacagcgaactaggagatatgacaaaatataatgtctcctcttttgtagcagtgtcttggagatgattattcagataaagagaatacagctaaaataagataaatattaccttcgtgcacatcctcatcttgggtctctgagtgcacagtcctgcaaccagcagatgctttcaagtctgaggcagaactcaatcttttttctgtttcttgtatgtggtcatacgacacatcatcaaggatgctgcacttaagatgcatttgagatgcattacaaggttgtgtcaaacactccagatcatcaggttctgcagaaagttagacctcattactatcttttataccacatccccaaaacttaaacaacagtagcaacaaaataaccacatctgaaaaaaagaccagaagtatgaacctgatggatcagagttctttggttttgtgtctgatttacaacttaagctgataaatctcttcttctctcgataaaatggaggagcagatcgacttctttttgacctttgtttaccagcattgttctgtgtgccatccatataactgaacttttccttcctgatactatattggtcaatacgcacatcatctgcatgcccccacgaagacttgcaaattttatcagctaactgagtgcagttctgaatagctgtgaaagagtctgtaccggtttcacagcaatccatttcaggtatgacctcgtggtcaaatttgatgttgttagctgcactgaaacaaaattcagggtcaggcatccttcccagtctcaaactctgttcaagaattcgacaacctttctggtactcagactcccacttggtcgcagaaggtgtggagtacattggagaccactcagaacttaaacagaaactaccagtaacagagctccccacattgacagaagaaagatactttttactaccaactttttcatcataagaatcaaattccgcagtatctatgggggtaatgttaaaatcttctcccattccaacacattccctatctgaggaacactgtggagtaaaccaatcagtatcctgccatgaactccctagggaacaatcaggagtcttatcagaataaacatcacagtacggaccaccttctctggtctctaggacccgcggattactttgtttttcattaggtatcataggcacgacggattcatacccttcaacatgagatagtttaggctcatgaaaggttaggcttactcttgaagagcaaccacgcaagagatgctttccaatgcaattgctgacatccaactcatctttcaatccttgaaactgaaaatttaacacgtctgaatctttcataaaatcatggttgatattgacaggtgtggtaatctgacatcttgttagaaactgtttacggcacttagagtcagcaaccaagcttgtttcaaggaggtcagtaacttgtgggaagtcttcattcgtttgcatttctatgtcacgtgactgtagaagagaatcagtccggctttcaaatccagctacagtaccttgctctttgggattctgaattttcagttcgacttcacattctggagaccatacatcctttcgtggagaaaaataatcaccatcttgtttaaagtcagcagacggaaacaagagagaactacaaggtgcatgatcattacttctcttcagcttcttttttgcaggttccatagcttctggccaatctgcatccagaaaatgaagaattgagaaaaggctgcctaggaatgtcaaagggacaaacaaaaaatactgccccgttccgatatagaagaattaatgttatataatgtaacattttgaaaaacttgtgtaccgttttgaagtctaattttgtcatcaatcaggtcttgtctatcaccttttgccagtatatcagctcccccatcaaaaagttctaagaaaaaacccgttggaaatacattgaaaaccccataaatatcagggatacaatcagagattgagaaaagtgtggcataccaaggattctatctttcttccagttggctagagtgattctttctataaaggcaagtacaggtccccacttctgccacagatagaaatatttgcaatcataaaaaaaaattaaaatctacctaaatttagatccaagagaaatctaataccttgaactcaacgtgcgtctttgatggttcaaacgagaattcataaagatggcgtggacatgctatgcacagaatgtaaccagggttggattgaagtctattgcgtcttcctgtttgttgcccatccgtaggcttccagtcatccgcacactcaaaactagtagccaagttgttcagcagcttatgaataggacctttgctaatgaatcttgaattgatatctgttgctgtgaaggccatacaaccatatacagaaactgcctaactaaacttcagaagatagttgatgtatagtcacacataaaaagatgcagaaatatggatacatatatactgcaaggcctgcaaggaaagtaccacaattattcagaaaggtaaggctcaaagttacgatctgacaaaaaagggagataaatattgaatcccacaagtggagcaagtaacctacctttaaactatctccaggaccagatacatacccagagacattcagcatgccatctgtaacgtttactttacaaagcgaatttacagcttcggtccctgcatctctcatcagtagtgagaatgctgaagaagaaggattggtttggaaaagctcttcatcactgtaacaaggaaacgatcagaagggcggatttcataaagatatttaaatgaaagtaggaacgcacctttcgatatcaagaacactgaaggaaacattggagtgcacaagggcaatccggaacacacactttttgatagattccaaaactttcttggggctaccattgcaaagaaaaaacatggtcgcatgtcaaaaaaacttgagacaaggcgaagatagattaaaattcagatgtcttaatctaaaaagtaagtgtctaagaaacgaacctggattgcatatattttcgtctcactggctgactgtaaaatagatctcggacagttactgcatcaaccaggtcaagatcagatattaatcatgcatgtgccaatgttagccaaaaatcgaacacatttctctatcgtatagcacaaatagtgtctgaaaattgtacttaatgcttcactatcacaattggtaagcataatagaaaaagcaatggtgacaaaagacacattacccgtcgtgccagagtcttttctatcatcatcaattccaagatgtagacacttggatccctgaaaagcgttttcagaagtttaaaaccataaccaacgccacagaaactatgtaggagtgttgagtcgcatcaaaagacatcccataccttcataacctttcgataaccattaggcctcccaatagcttttgtcctaacctccagtaacgagatatctgatattgaagctaaggcctctccacgaaatccaaaagtttcactagctgtctccacgttggtgaagtcgtgaaactttgaagtagctgcttttacacattgctcatgattagtttctcatcagatcgaaaatcataatgagagaacaaaaaagagccagaacttaccatatctttctcccaacaaaaccaaatcatctcttgaaacgcctgatcctgaaaccaaagtcaatgaaatatttccaaattaggattcaatgattagtacaaaggtaaaagtaatgattttgaagctatatactcaccatcatccacaactttcacagagcatgaaacaacacccacgaagatagacacctgaatatagagatatcgataagcagaattgttccaaacccagaagaaatcgaagaaggaggaactgatatatgtggaaccttggtcgccccagcatcgagactgttgaagacgagttcttccacgaccctcgccatgtcgaacatgataattccagaacgcatggagtgacgaactccttccggcaagggcttgatcgtcttcatctcaggattatcggactgagacaccgagaaacaaaaaccctagacccaaatttgtaagaagaaaatcccgcgggtatcaattactggagactgcaaagctgattatcgccattagacatgaaattgagaaaaaggcatcgcctttcgcaacataatctcacgctcgctcttaacgggaaagttcagcaactgtgtggaactggagggaaaatcgcaatttgggggttagggtttagctaaacgacggcgttttagtttttggcttatacacacatataatttatttagagataacccaccttaaagctttttacccctcttaagttatatttcatacaaaacacaacacacacaaaaaattgccccttaaagaaaagtcacaagatttaatatatatgccaaattattgaacctatcattttatctattgtggacaacaaacaaactattttatctataatttaaacaaaatccttccaagaagaagtgaatcttaaaatacgttataaaattctttaatgacgaatgataatattaattaaaaagaacgacaaaaaaaaggtctaaatggtgttgaattgttgatatattttccctacagtgttgatgatattttttttatgatattgttttggtcacactgttgataattacgatgtaataattcgataaatttctttgtataaaatgatatcattaactttgttggggtctattgagatttgagaatgatacggcaagtggatggtgaagttgactgtctctgccaaacatattagtttttcaccaaagtagggactaatgatcataattctatcagattaatttaattattttgtcgaattcttttttttccccaaaactaagatcttggatcaaccacgttgctttaatatccatccaccataaaaaaatctaaaacacgtcaaataataaggtggttccatttgtatgtcgattacacacatgatctaaaattctgatacaaatttgcaagtataactctcttttaagacacaagatcgaatcatgtttgactcttttctatgtaataaaaataaaattaactccgacgtacaaagataaaggtaactccgtaaagagaaataaatgacggccgttattatagttagacggagggatgtaataataacggaaagcatgagaccagctggttaataaactaaggtaagagataactgtaagaaacaacaaatgtcaatcaaaattactatgtgatcattaattgtc

SEQ ID NO: 31263 - DNA, 5508 bp, Arabidopsis thaliana landsberg
  unsure (1)..(5508): unsure at all n locations
tcttgcttagcgtttcagagtgaaatatgactagatgtcatgtgcatgattgaatataaaaatagaaccttaaccagatcccgaaaagtgaagtaatgcttccttgttataagattcaaaaccaaaaactcatgagaacatcggccacaccatcaaagccttgagactcatgaagaaactttgtttgtggctttgtatcttctaacaaggaaacactacttaggcttttaagatcgagttccagtttatgttcttatactcaatcatacacataacatcaagtcatattgtactccaaaacactaaccaagtttcttctagcttctcaaagctttcatggtgtagctaaagtccatatgagtctttggctttgtatcttctaacaaggaaacactacttaggcttttaagatcgggttgcggtttaaattcttctcattgattgcttgtactgaaaatttacttcaggtacctgtcaacaaagagaaagaagctgcaagatttgcacagttgtggaacacaataattagtagttttagagaggaagatcttataagtgataggtaatttttattaattttctatgccacatatctagctgaaagaaactatctggaactcaaaaaatttgagctatctttttgcatttggactattcatagggagatggatctgttgcttgttccttattgggctgaccgtgatttggatctcatacagtggcctcccttcttattggctagcaaggtttgctctcacagaaacacattagaatttaatcttttggttattctaattttttctatatttggctgtagattccaatagcattagatatggcaaaagacagtaatgggaaggacagagagctcaagaagaggattgagagtgacacttacatgaaatgtgctgtccgtgaatgctatgcttcattcaagaatatcataaaatttgtggttcagggaaaccgtgaaaaagagtaagttgggttaagtttttggaaccatagtgtttgaacttgcttttgtttcttacatatctacttctgattttgataattgcaagtttgcaacgtaccacactatattatggccaacttatatcttcgtgtctcagggtgatagagatcatatttgcagaggttgacaaacatatagatacaggggatttgattcaagaatannnnnnnnnnnnnnnnnnnngcctctatgatcactttgccaagttgatcaaatatttggtaaatgttcttcctgtggtactgtttcttttgtagttttagtatctaaaaacttatttgtcaattgggccaatatcttcgttttcttatccaatgtagcttgacaataaggaggaagatagagatcacgttgtaattctcttccaagacatgctggaagttgtaacaagagacattatgatggaggattacaatatatcgaggttggcgactttctaccgcaccgcaatggcttgtcgtatgaacatcaaaatcttatatatctagtgtctctgtagcttggtagattcaagtcatggtggcacttggcatgggggaatgatccctctcgaacaacaatatcagctgtttgcatcctcaggtgccattagatttcctattgaaccagtaacagaagcttggaaagagaaggttatgccagatagggttatatttaagttctattcgcgcagtcttcatatgatttgttctcaaaactttaatgcatgtatgtgtagatcaaacggatatatcttttgttgactactaaagagtctgctatggatgtcccctctaacttggaagcaagaaggcggatctcattcttctcaaattcgttgttcatggacatgcctatggcacctaaagttcgcaacatgctatcattttcgtaagcaatttctggtcattttaattagaatccactacttatatagtcacatattgttggaagattattggttcttctaaaattccagttgataatttcctcaaattcttcttttatgatgacaaaactaagatttagaactgttgtatcatgatatcaattgctacttgtttataattataatgaagtatgaattgcaatgtagtttttcgtaactgaactggctgggttagtttgtcattataatgttttgcttttattgaagttttcgttacttaactggtggggttttctctttgctattctcattgtagtgttttgactccatattacactgaagaggtcctcttctccttgcgggacctggaaacaccaaatgaagatggtgtttcaatcctcttctacctacaaaagatttttccaggtgatttttgttcatatgctgttaacgtagcctatattcttgaatcacgtcttgaacctgaccttttatctccagatgaatggaacaattttcttgagcgggtgaagtgcttaagtgaagaggaacttaaggagtctgatgaattagaggaggaacttcgtttatgggcttcatatagagggcaaactttgagtagaactggtatgcttttttggttaattttctttcagtaaaaagattagatggatacaatggagatatgttgttaatctttgatatttttgcagtaagaggaatgatgtactatcgaaaagccttggagcttcaggcattccttgacatggctatgcatgaaggtgtttttctctagttatattaaacagcaaaggggcataaatcagttcacacaactaatcggtgatgctgactcattcttgcaatttgcttctccagatttgatggaaggttacaaggctgtagaactaaattcagagaacaattcaagaggtgaaagatcactctgggcacagtgccaagctgttgctgacatgaagtttacatatgttgtatcatgtcaacaatatggtatccataaacgatccggtgatcctcgtgcgcaggatatattgaggcttatgacaaggtgtgtagaataataatattttgctgtttgttttaacttgtttgaaacttatgccgttgcttacaattggcagatacccttcactccgtgttgcatatattgatgaggtcgaagaaccagtgaaagacaagtcaaagaaagggaaccagaaagtgtattattctgtgttggtaaaggtgcctaagtcaactgatcattctaccctagcacaaaatctggaccaggtaatgcaaaacaatctaacacttgtctctagctgtagttgctgcaatttattatgtcgttgaatgtgtttgtgtaaagtaaacccgtccagaaggtggtgccaatgctgaatttcttactgtcattttcttagtgaatgctgaataatatatcttataaggattagttaaatggcaacgtaatgtcatacacctgtgttaattcataaattgttctgcatctgggaaacatacgtctttttgccgcattagttttatatttactttactgttatatatgctctctcatggtagttttactcctttgttttgattcttacatggatgtctatattaaaatctacatgccttctaggttatctacaggattaggcttcctggacctgctattattggagaaggaaagccagaaaaccaaaatcatgctatcattttttcccgtggagaaggtttacagacaatcgatatgaatcaggtatgcacttgttctttttgctcagccttctagttatttcgatacttcaagttgatattaagtttcttataatgccatttttattcaggataattacatggaggaagcgttaaagatgaggaatttgcttcaagaatttcttacaaaacatgatggtgttagacatccatccattcttggacttagggaacatatatttactggatcgtgagtgttatagcatttccgtctattttagttattttctcttttgctcaatgaaatttgatcatctctaagaacatttggtgttgggcccttcgcagagtttcatcccttgcttggttcatgtcaaatcaagagactagttttgttaccattggtcagagattattggcaaatccattgaggtaagtgtgttttctgagatcatctgtagtgatgattgcacatgattttgtttgttatcattcccaaatcagaattctctctttctccaatatagggtgcgtttccattatggccatccagatgtttttgatagactgtttcatctaacaagaggtggtgttagcaaagcatccaaggtaatcaacctcagtgaagatatatttgcaggtatattctactcttactgagtagtatctgtttctttcatagactctaacttatgtcctcgctgatggattgccaatgttttgtattgagcaggattcaattctacacttcgtgaaggaaatgttacccatcatgaatacatacaagttggtaaaggaagagatgttggtctaaatcagatctctatgtttgaggccaagattgctaacggcaatggagagcagacattaagtcgggatatttacaggcttggacaccgttttgactttttccgaatgatgtcatgttacttcaccactgttggcttttatttcagcaccctggtattatttcgttccttttttgttaagccaagtaagtaccacacagctatttcggatctgattcattatctactgttttcacagattactgttctcactgtctacatcttcctttatggacgtctctatcttgttttgagtgggctcgaacaaggtttaagtacgcagaaaggcatccgagacaatacacctttgcaaatagctctggcttcacagtcttttgtccagattggtttcctgatggctttacctatgcttatggaaattggattagagaggggttctaggactgccttgagtgaatttgtgctgatgcagcttcagttggcgccagtgttctttacgttctctcttgggacaaagactcactactatgggaggacgttacttcatggcggtgccaagtacaggtccacaggaagaggatttgtcgtctttcatgccaaatttgctgataattacagactgtattcccggagccattttgtgaagggacttgaaatgatgctgctactcgtagtgtatcaaatatttggtagtgcttacagaggcgtccttgcatatcttttgatcaccatatctatgtggttcatggtcgggacctggctttttgctcccttcctcttcaatccttctggttttgaatggcagaagattgttgatgattggactgattggaataaatggataaacaacatcgggggtattggtgttccggcagaaaaaagttgggaatcgtggtgggaggaagagcaagaacatctccggtattccggaaaacgtggtatagttgttgagattttgctagcactgcggttctttatctatcaatatgggcttgtttatcatctcactataacagagaagactaaaaactttctggtatgtaacatttctattagctcttgatgttggtattttcttatccaatcac

SEQ ID NO: 31264 - DNA, 2744 bp, Arabidopsis thaliana landsberg
agcttaacaaaacatatgcttaagaagatatagggagtagctctcattaaatgactaagaccgactcggcctctacaaacccaacgtgcatgaccactaatcgaaaactcattggtgatgtgatggctccaatggtgtttggagtattccaacaacacaagatcttcccactcattctctctttgacttgtgccttaatgcattaacacttgaaatcagattttttttaatctgttatggttatcaagtttgaaactcataaatccattcttgttcagaccaccataagacttccccactgtttgatcagacaatgagtcaatgacaagtttgcgaaagagaaaaagctagttgcttctgtcgcaaggtacaaaacagagggaaaaggcccacatttccttggaagtaaacataaccatgccggaatgtcaataactccttaaggctgcttcattgcattacacaacagatgtatatatccccgaatcaaagaaaagtacatgaaataagagctatatatatgattcacctgtttctttcgagaaatcaaacacctagcgtggctttgataatacttgctcaagttggctaacttaaacggtccaaattttcagcccattcttgaggaccaagtctcacctaggtgtaccaaacattaagtgcgtgatatctctccatactagccatgaatgagaaattgagaagtgtcgtttagcagcctttgcggttgagtgagagagaagcgaaatccacaaaagagaaagtaacaaataaaaggtgatataagaaaaggtaaaataatagatcaaatcttaaaactaatcaagcgatagtgtttgcaaaaacaaaaacgaagagagaaaaaaaaaacagagaactcggtacaaaaattacgtccttgcttgcattgagtagtttcattcttttataatgcatccaccttcctcgatttgaaccaaacttggaacataattgaaaataattggatatccccacacttggtaactagattctactaaagggatttctgtgtagtatccattgtcctctccaataatgtataccttcttgttgcttttctcaaaattttcattataacacacagccactttcttttcttcgtcgactagataactcgtcaaatacggacaataatcaccgcgaatgggtatatccacggtaaaagatttgctccacatcagtacatcttcaataatattggtcacccacatctccattatctttgatgtactatcactttgacttaacagtgagagttgttttcctccaacaactgatagagccatcttagacacatcctgagatggtggaagacacagacgcgtaaatctttctgttgtaaaatcgaagcaaagcaagagtccatatttgtcttttttatcagacgcaagccaataagtatttcccttgaaagaaacgccaatatgtgatgcaatgtggcaatcaagagcgacgagatcaagaaccctccatgaatcagagctaaactcatagatttcaaactcatcaactcggccagttggtgaattgtgacgatcccaacacctcaagattttgtagatacggccatatttgtttttctcgtatcctagagcaaacctagagtaaatgtttttgggccatcggatccaccttgtttcccccaaacacgggttccaaaccactattctatagtccatagttgtacatagcaataaaccatcacagtgacaagcttcatgtatatcgacttcttctgaataaggaggataattctttaggttaagtgcacctttaaactctatagacgcagcaccaacgctgagattggcgatcattggaaaaacgctatactccttcaacatgagaaccagtgactcctttggtgctttaagaaattgcttcttggtaaatcccgggtttttaaataaagcgttccatagtttgcaagtagatcgtaatcgtttgagagatgtggctggaaccctagagagtatttcctctaccaaatccaaagaaagatcggacatcatcattgcttctctttgtttgtgatctaatctcccaaagaagaagaaaggtctttgactctttgtgaatgctattaattattcttcttcttttgcttatggttacataagtatatataagaaaatcttaaaagaagataaacaccaaaaaataaatcctaatcctaacaagatttagtaatatcatgtcaagctaaattcataaaaccaaaaccataaatcatagccgatcatgagcccatcagtaaacagaaattagggctttgggtgtttttttgcacctaaaccaatttttgaccataaaccggaagttttagaccgaaccccaaagttcttgggccaattaacatatttcaactcctcggcaccagacaaggtatccctattatatagcctctccttatcttggattattattacgcagtttgttgatgagcgtccatgtcatagcaaagaagtcgagtataagaaaagcttatttattcctcatagcttacaaaattaatacagcctataatcacttttatatattcgtacagcacaataataaaaatatgcttactataacatcaaattatcgtttaaactccattattatcatacgctaattacacagttgtctctaacatagtttaccattatttataaattcaaaaaattagtagattacagaactacgcttgcgttattgtacattttaaactccttcctgac

SEQ ID NO: 31265 - DNA, 2423 bp, Arabidopsis thaliana landsberg
  unsure (1)..(2423): unsure at all n locations
gggaactcaacgggccttggtgcctaaaacaaatatcaaaagagacagaaggggttaacctgaaaagtcctcgcgccgctgcttatcgttgagcctaaaatctatctgtctctcgttttgttcgttcgtaatgggtacagagagaaaacggaaggttagtttgctcgatgttatggaagatccttctctttcgtcgaagaacaccaaatccaatggtctcggacttgcggcggcggctggaggtggaagcaatctgatcaacaaatggaacggaaaggcttattctcagaggtatttcgagattttggagaagaggagagatcttcccgtttggctccagaaagatgactttctcaatactttgaactctaatcaaactctcatactcgtcggtgaaactggtagtggtaaaactacacaggtagctcaagctttcaatttcgattttggaattagtgtttagtgtgatccaacataacatttcattgtattctacagattccacagtttgtattagatgctgtggtggctgacaactccgataagggaaggaaatggttggttggatgtacccagcctcgtagagttgctgcaatgtctgtgtctcgtcgtgttgctgatgaaatggatgtctccattggtgaagaagttggttacagtattcgttttgaggattgtactagctctcgtactatgcttaagtgagtgtttttgttcttctttctttggcttctcagctttataacgtttctgttctgatcataacctttctctcctgttattacaggtatttgactgatggtatgcttttgagagaggcaatggcggatccgcttttagagagatacaaagttattattctcgatgaagctcatgaaaggactctagccacggatgtgctctttggtcttctcaaagaggtcttgaggaataggcctgatcttaagctagttgtcatgagtgcaactttagaagctgaaaagtttcaggaatattttagcggtgctcctcttatgaaagtccctggtaggcttcatcctgttgagatcttctatacacaggaacctgagagggattatctcgaggctgctataaggactgttgttcagatacacatgtgcgagccacctggagatattcttgttttcttaactggagaggaggaaatagaagatgcttgccgtaaaatcaataaagaggtcagcaatcttggagatcaagtgggtcctgtcaaagttgtgcctttgtattctactcttccacctgnnnnnnnnnnnnnnnnnnnnnnnnnngctccagtgccgttaacagaaggtggtcctgctggacgaaagattgttgtctcaaccaacattgctgaaacctctctaaccattgatgggattgtttatgttattgaccctggttttgctaagcagaaagtctacaacccacggattcgagttgagtcattgttggtgtccccaatatcaaaggcaagtgctcaccagagatcaggtcgtgctggtagaactcgccctggaaaatgttttaggctctacacagagaagagtttcaacaatgacctgcagccacagacatatcctgagatattgagatcaaaccttgcaaatacagtcctgacattgaaaaaacttggcattgatgacttggtgcactttgatttcatggatcctcctgctcctgagacactgatgcgggcattagaggttctgaattatttgggagcacttgatgatgaaggtaacttgacaaagacgggtgaaataatgagtgaatttcccttggatccacaaatgtcaaagatgctcatagtcagtcctgaattcaactgttccaatgagattctctcggtttctgcaatgttatcaggtacatcttctactcgtattagtatggtttgtcttctccaaagttcattatagatgtcggtttacttgagcgtactatgtttcacttcacttgaatttacggaaataagtctgtgtgtatgtgaacgcatctataagtatgtcatacacatgaacatctactgcatcccatgtgtcttcttaaaattcactagtgtctgtgtttgccattcaattttaatcttagagttaggttgtcataagcagctcactagtcactagtttggggtctccatgtccatggttggggagttctaagtaaaacctgatgcatctagttgcagtttctcagtattctcacaagcaaatggtatcgtctctcgcctctatgcatctgctgacctcttccatgggcatattctgttataaaaacaattctttctctagtaccgaattgctttgtccggcctagagaggctcaaaaagcagcagatgaagctaaagctaggtttggacacattgatgggagatcacccgacgttgctaaacgtgtacccaccctaccagcaaaca

SEQ ID NO: 31266 - DNA, 582 bp, Arabidopsis thaliana landsberg
aggttgccttcattcttcactattatattcatcactaaaacaagcagttgtagcatcttatcaaagatcacttacatacacctttcgttttgtttttacattttatgatcagtctgatgacactgtcagctcaccagtcaaggcagatggcagactaatttattatcggattggggacgaagatgggaacgtggatgaaacagcaaaggaagagcttttctgcttcaagggaatgggactagaagagctaaaagagaagcttatagaagagacaggtctgagtgatatatcaatctgttccaaaaaccctttaaacggaaaattatatccccttcggttacatcttcctcccaacaacacaaagatgcatgtcgtattgatcccttcgccttcaaaaggttaggtctctttttatcagttcatacttttccaatttaccaaaacaatgaaccatggaaaaccaggacataaattagacacggaatcattttctggttttctagttaaatttgagctatggttttcctgaatcatttacataactgaagagattgtggtttgtggaatcttacaggggatgct

SEQ ID NO: 31267 - DNA, 5835 bp, Arabidopsis thaliana landsberg
  unsure (1)..(5835): unsure at all n locations
tttgatttgtccatcaagtatagaagaaataagggatggggagaaaggaatgagtattagcactgtgcacccagatattgttgttcctttcgaaaagctggaattacttacagcacgtgatttggatgaactgaaatcaatctgctgtgatcctccagcgcttccaaacctgagacagtttacttgcgaaggctgtccaaagcttcccaaagctgccactgagtatttgagacatgcgtggaaggacgtagaaggaggcttctaaaccagcggatggtctttccaagcttcaagcaccataagtgagttggaaggtccaaaatctagggtaattttatatgtgaagatgtcatcaagattcaagagagacaataaatggacaggaatcagctggaatgccttcaagtaactgagatggctgaactaaagataatttgaccagaatccttgggatcttccatacctgtcactagtcaatatccgaaattgcccgaagctgccagtgagtttcagagagaattgaacgaatagtgggcgggacagcacataatgaaagaagttggatggtttctcacagctacaaatattatcttcaagtttggaggatgaagttattactacagatgtgatacttttcattaccttgttgatctctctttgtgtgactgcatactctcacaagttcttaatttggttggagtttatatgtggtgcatttgtttcaaagatcatcaagtgtacatttggagacaatgtaataagtccaaaatacttgtttggctcaattctctcattgttgtgacctgcttcctttattccgttggtgtgttttatgtactactgcttttgtttgaacgaccactaactagcatttctcaaagttggaaattttcatttcaaagactccttggtgtctacttttttgttagatctcctctttttgaatttctttgtttaaaaatgttgccctttttccccaatttgtaagcatatagatggagacgcaagttcatggcggcggagaagaagatccttggctggctccagacaaactataccatgtaatattctgcttctcaatctctcttatcttctctacgctcgcctctctctcccgctactcctttctacgccgtcactccatctggatcggatctgctttctcactcgccgccggagcggctaaagaagctgccgatcaaattggtatcttcccttccgcaggtgcttccgttagagacgccgtcgcagacgccattggagttgtgatagctgctttggttctcctcctctggaaatctcgaagatcacgtacccgacccatccttccgatttgaatcttattttactagttgctgccggttcgagaaaattcgattcagagtagaatatattccgttgaagcttgtcagtgttgtatccacggataatctcacaatttttatcaaaagtttgatcatcacaaaattttggtaatcaatctcctttgattttacttgtttgaaatgaaaacatgcaacaaacagtttatgagagtgttgttgattcaagtgaatgggttttgaataaaactcagattattgctgctgaagtatatgattcatgaaatctgaaattttgaattagttcaatatcaattattcgttttcgccatttgctcatcgagagaaacatttggcctgcttgtaacatcacattaaaaatttgaaaaccaacaaaactgaaaagattaagatgtccaagaccaagagcaaaatgaattttggtcaaacatgactacatgagtcaaacatgattttttgtttttactttttagtcgtcatctttaatattgctttttcctaactcttcttctattggcgcatttaatttttctgatatttttcctaattcaattttttttgttcttaaattaattccaatttctaagtcctcttcatctttattgctttttttattccctaactcttgttttattggcatagaaattttcttcggatcctcctcactgtctctttatactccactnnnnnnnnnnnnnnnnnnnntcgccgtcctccctttccttccctctctaacgtaagctccagatttcttctattctctgttttctcattgaaatccctagtaatgattttctctattctctgggcatttcgtgcttcaatgcctttactcacttcttctttaagaaaatattttggatttctctatgttccttatcatgcatgcgacatgcgtgaatctcttagctgaattttgtaaatgctgtatcaatttcgtctcttttgctttctctagtttttttgtttccttaagttcttccctagggtttctcttgctcttaagatttccatactatcgactcagtttgctagaaatggagtctcttttgggctttaaactttactgcatgaactatctgatgtgacagactcattttaactctaaaaagtttttcgatttcttagagattctctttagcttgtttggtgaatgcatcatcctcttggttgctatttttcatttgttatcattctttttctccaggtaaagcaggtaggatgagcatttctgatgaagagtctgagatcagcgagtcagagattgaggagtattctaaaacaccctaccgccttttacgcagtgagacttactacaaggtgaaggtgaatggacagctcacatgccccttttgtgcaggcaagaagaagcaagattacaagtacaaggagttgtatgcacatgctactggggtttccaaaggttctgccaccagaagtgctttacagaaggctaatcatcttgctttagctatgtttttagagaatgagcttgctggttatgcagaacctgttccacgccctccagttgttcctcctcagttagacgagactgaaccaaaccctcataacgtctatgtctggccatggatggggattgttgttaaccctttgaaagaagcggatgacaaggaacttctacttgattcagcatattggctgcagaccctttccaaattcaagcctattgaggtgaatgccttttgggtcgaacaagattcgattgttggggttattgctaagtttaacggagactggagtggctttgctggtgccacagagcttgaaaaagaatttgagacccaagggtccagcaaaaaggagtggactgagaggagcggagattcagagtcaaaggcctatggttggtgtgcacgtgcagacgactttgaatctcaaggtccaataggtgagtacctctccaaggagggacagctaagaacagtttcagatatttcgcaaaaaaatgtgcaggatagaaacactgttctggaagaactttcagatatgattgctatgacaaacgaagatctgaacaaggtccaatacagttacaacaggacggcaatgtcactgcaaagggtcctagatgagaaaaaaaacttgcaccaagcttttgctgacggtatttactgacacactgatatgtttccgactcatatagcatttagggtatctgactattttttatactttatctcctcagaaacaaagaagatgcagcagatgtcacttggccatatccagaaaatcctatatgataaagagaagctaagcaatgaactggatcgtaagatgcgggacttggagtctcgggccaaacaattggaaaaacatgaagcactaactgaactggataggcaaaagcttgatgaagacaagagaaaggtaatatcgttttcagtatgatacataggatacaatcagtctgttcatatgtatgcatttctcttttccgaggaaccaatgatcattttatgtattttttttgctttggcagagtgatgctatgaacaaatccctacagttagcctcacgtgagcagaaaaaggctgacgaaagcgtcttgagacttgtagaagaacatcaggtatattccttcatagcacactacttaaactgactaacaagttaattccaaattaagggaaaccacccgtacctacctttttgtgtctgagtttgaaactctctccttgccagaggcaaaaagaagatgctttgaacaagatccttctgcttgagaagcagctagacaccaaacagacactggaaatggagattcaagagctaaaaggcaaattacaagtgatgaagcatctgggggatgatgatgatgaggcggtccagaagaaaatgaaagagatgaatgatgagctggatgacaagaaagctgagttagaagggctagaaagtatgaactcagtcttgatgacaaaagaacgccaaagcaatgatgagatacaagcagcgcggaaaaaattgattgcggtacagatttctaatgctttagtgttcttgggtactgatacagttgcattttgcaattataacaatatgatcctgagaatcgttttcgtttttcgcatctaaaataattcagacatggtcaaacactctagtttgttggttatctttagttgacaactgaacttgcaagtttaacataaacctgtttgatgggatggattgaatatgagtttcaatttgataagattacggtgtatgacgtctgtaggtctctgataaaaatcacagatatttaccactatatcttgtgagttattaattgatgggagaacttgataaacatcacaagactcaaaaggttgctctttgatccagggtttgacaggattgttgggtgccgagaccgatattggagtaaaaaggatgggagaacttgatgagaaacctttcctggatgtttgcaagctgagatattctgcaaatgaagctgcggtcgaagctgccaccctttgctctacatggcaggagaaccttaagaatccatcatggcaaccattcaagcatgaaggaaccggggatggagcagaggtaggttcattcattttacaagtctttatctcactgaatcattgctttaggttggcgccaatatgactttgaaaagtttcttggccactgttttagttaaatatggagtaacctgtgatttctgtgaacgttgatacttgtatccatacgttggtacaactgtttttgtgagttagcggtaatggtcttagatggttatggttacaggaagtggtagacgaggatgatgagcagctgaagaagcttaaaagagagtggggtaaagaggtgcataacgcagtaaaaacagctcttgtggagatgaatgagtataatgcaagtggtcggtacacaactccagaactgtggaacttcaaagaaggaagaaaagccactctgaaggaagtgattaccttcatttcgaacgacataaaaattctgaaacgcaaaagaacctgaaggtatgctaaatcttctacagttgacacaggtctccttacaaaaaactcagaaacgtgtaagagtctttataaggtttagggtagaaactcgtcaacaaatactgcagaggcatgatctcttttgttgacttcagttaaagaacttgaattatgatctggtctggctttgttcttgtgccattttggtttgaactgaagaatccaatggtcttctacttttggttgcaggattggagaagcaggaagaagaggaagaataaatggttaagctttatgtgatataagtaactgagaattgatgtaaaataattaggatgctcgtatgcgtatggagattggagactaatttctttcacttatcgttgaacctttttatttaaaagcattcgaatctttaagttatctctttgtttatgctttatgtttaaaatttttgttaatagccaccaaaaatcattgagtaaaaaaaaaatgatttatcattttatcagctt

SEQ ID NO: 31268 - DNA, 2027 bp, Arabidopsis thaliana landsberg
  unsure (1)..(2027): unsure at all n locations
caaagttcagacacggtttgacagtgatgttaaggaacggaatgctacataaccagggagcaacaagcggtttctctcactgggtaagatttcttnnnnnnnnnnnnnnnnnataacccgggaaagttagtgtttagagaccactattcactgttaccttgagctttggacattgcaacgtagattactaattataccttgaagcatcgccatgatcaccatagtgtttagcttcatcattgattgttaccacatcagaatctcccgcacattgctctgagaacaatgcaaactatcttagagatatctgcttctgtacaagaatgaaagggcaatagataattgaaagcttaccatttgtgtgaccaaaagtattcttgcatcccatgcatctgcagttagaggagcatccaacgcccatcttgataaagtcatagtaacatccaatggttcagaagaatgacattattcaaaatttaagtgcgaacgaagaaggataagtgaaaccaaagttaccataaagcattcacaatatttctttgagcagcctgatttcctgcagttgcatcctcttttgtgtcttgctgaagcaggagtcttgctgttctcgacctacagatgtaatataaacatgagacaaaaaaaaaatcctcagtactatctagttgcagtcatactttaatcagcgaatcaggacaagtctatttttttctgtattatgtagttgatctcactattgatctcatgatatgtcttacccataaatctataacagtatcagaagttgagaccacttttggagcaaaagctaatgggttgcgggctttaatcacttcacgacttttcataactaggtcttcatgaatgggcttattgaaacaattttgacatgaacaaggttcaccacagaatagaccagcggaaaaacattcacaatacctgtacagcaaagatatgaatatgtagttaacgacgggttggtgtctatgttctacacaacctaaaattcagtgtatttaacaacttaagctgagttgcagaaaaggtatgagctttttggacaagaaaaaggtataaacttttggataaaaaagttctggaacatagaagctgacaatgctgcactttcagcgagacagaacaacatctgcaacagacttcacacatcatctggttcacttgaaagtagtatccaatgaaagtgactcaatagcttttagaaaagtgggaataaaaacctaaccatatcatttaaagaaaaacagacgtttttggcatctgaaaattgtgtccagggaatgattgtaaggaaagagcttacagcttcaagcattgtgatttcctacatttacagcgcttacagctgccaagttcggcaagtccttgagacaattgcctgcattaatcagtatttcaagtataagttttgtattcatagctaatagttgatggctggacaagattaggaacatcgaatattttccaacctattttccattgccatgagttggtcaaaacattctccttccactgatctctcaggaggctccatgattttgacatcactgaataccaccaaatctctttttgtggagacaggagttgagaattcatcttcaatattataatgaaatgttgtagaaggaaaagcctgaccatctttgattttttttttttttcggccacttgagactgaggggttcacgaaaccattcaagtgcaggccaatcgttcgtggaatgggtagaatctcatcagtgtcttgtttactggtgtctaaacaattttgtggactgggagctttattgatagaggtagaatcaagaggaagatcatttgtagaatcacgcaaaggtatccttttgtgagaccctcccatgtcaaaagttaagcagcgcctgcgtacacttcgttgctgtaagagtcaatttataggtattagctaagttccacagtttaaatcaaatcattaactagcagatgaaaattatttctacttgcaatataaaagcaaatgatctaactaa

SEQ ID NO: 31269 - DNA, 768 bp, Arabidopsis thaliana landsberg
gcgctttactgtttccgtccagataaagctctttttttggcgattctccttcttgttcttgaggttttctctcagtttccgtagtcttcaacttcttcgtggtccgtgtttctaagtctcaacggtggaagtttttggtcgagtttctagcgatgtcggcagctatggacaactttgatggagatgtctttggatgacaaagacgaacctttcgagatgccggatttgccagatcttatgtcgtgtgagaggaataagctcagtttaataggaagggttctcaaccccagttgccaaccgatgaaacatctaattcgtaatatgccaaagaagtggcagaaggaagggaaagttaaaggagtagctctctctgatgaaagattttagtttattttcgactccaaacatgatctagaagatgttcttgcgaaaggagtgcattcttttaatgaatggtccattattgtggatagatggtatgagcatcccccggatgattacttgcggtttatgccgttgtgggttcaaatttggaacattcccgtgaattactatactgagaaagctatcatgaagcttggagatctgataggcgaggtcaaagaggtggtgttcaaccccgattttgcatcatgctcaaggagttcgctaggggttaaggggcctcttcgattgtcttttagacctttaaagggagaatcccaaaggttctttcaaattttccaaaaaattggggagaaatacaagcaaaacgtggtggaaaaattt

SEQ ID NO: 31270 - DNA, 1320 bp, Arabidopsis thaliana landsberg
cgtatcaacgactccattgacttttcccaaaacattacgtacacaattgtattcttcaagttactactttcataattctgttcaaactaaggttctaatttcgtgaatgcatgcgtattataacaaattgcacttgttgacaaaactttgtataacaaaaaaagacatccgtgaaatttctaaggcctgagagcctttctcttctttctttctttttcggaaaacaaaaagtatttgaacaaagcgaatatgaagatgtcttttgtagtggagaggcgtctattctttggaaaatgctactgaataatcttttaaaacaaaccattaataattctgactttaaggaaattaagcaaataagttaattatgtagtcatgtcgtcatcaaatcaaattaataacacgcatctatgtagtcacgccgcacaccaccgttgatcatgccaccggccaaagcatcgaggaaccatccgatcgaccacgtcattattcctatctattttattccatcatcccctgagaaaagcatggaattatattttatgtagaaatcaaaattcagaataaaaatatatacccggtccgttacgtgataagaaaagaatatatacccgttaggattaaaaaatttaaaattgtacaaacggtctagtgtgagaaaaatacaatttaaaccaaaaacaaaatgtgagaaaataaattttgtttgcactttccgagaaaaaaagatacttagaacaaaaaaaataatagaaagtgactggaaacaactacgaaaagggacggtgttcctcagtcaatttagctaagctatataatataaactcatcctctctaacaaatctcacgaaacgaaacaataaggaatctcctgcaaagaggattagacttatacatatagaaacataaaacacacaaaacacaccatgtcgtattcaacattcaaaagatcactggagattgaggtaatctcagcggaaggactcaaggtagatcgaaaaccattgaagaagaaaacatacagcgttgtgagaatcgatgagaaatcttgggcttccaaagtggatgaactaggagggagttatccaatttggaaagatagatttgatatggagatgccaataagcgcaagtgtaaggtttatatccattgaggtttactatcgcacaagtggtagtgggagggacaaaaacgttggttacgccaagattccggtgacggatttcatgggaggttttgctccacaagggcatttgaatttcttgagttacaggttgagagatgagtatcgtgacacatgcggaatcgtcaatgtgtcta

SEQ ID NO: 31271 - DNA, 1885 bp, Arabidopsis thaliana landsberg
ccgtgtttatgattatttcctagtcacctccttgtgaaactgtttgatgctactaatgtacttttttcttgtttatatcatctgtattttcttttgcctggggtgtttcttctgtagcgttaatcttcccacttttgtactttgaaagtaactgtgtttttctgtttggcaggttcggatgaaagctttatgtgtccttgaggccattttgaggaagaaggaagatgagaatttttcaattgtacatacctattttagtgaaaacttggatgccatacagcggtgcgcagagtctccacaatcttcccttcgagaaaaggcgaacaaggtaagcttctgcttgttataaccattcacaaaactcttttttggcattatgctaatttgttggttaactcgagataccgatgttgtgtaggttctgagccttctaaatggtggacagtcaagtgggttgatgagcagctctgataatactgtgaagcgagaggctgctgttgatttacctgacttgattgacaccggggattcagacgatactttgaacaatctgaatgctatagatactggcagtacagtggcgacagcaggtccattgatggatgatgattggtttggggatagctctgacattggactgagtagcagcgagaagaaaactgatgacgacccctttgcagatgtctcatttcatccgaatgaagaaaaagaaagtgcagatgacctcttctctggaatgactgtcggggaaaagtccgctgctgttggtggtaatcatgtgcctgatctatttgatatgtttgggtcaactgcaaaacttgaagcagagccaaaagatgcaaaaaacattaatgatttgatgggaagtttctccattgacgaaaacaattcaaatcagaaaggctcgtcttcaagcactcttccacaggatttatttgcaatgccgagcaccaccagccaccaagcaccggaaaatcctgttggaggcattcttggctcacaaaatcctgggtttattcaaaacacaatgcttcctggaggtgttatgccattcaattttcctcaagggatgatgatgaatccagcttttgcatcccaacctttgaattacgctgccatggcaagcttgttagctcagcagcagcagtaccttggtaatatgtccaacttccagcagttcggcaatctgaacgctcagggtagcggaaatgttctttctatgggtacaagtggagggaatcagtccgcactccctgatatattccagccaaattttggtaatcaggctccaacctcaacaatgaatggttcgaaaaaagaagataccagagccttcgatttcatttctgtaagttttgccatcttgctcctgatctttgattctaaagtttggtcaatctgccatttgtctttgtacatgtgacatcaaatctcacacacataatgtctagctcgattaaaaccacctaaacatagtcagactagatctacttttgtggcatagttaaaaaaccttcgtttgatgtacatacactcatggagcaactacataaatgtttgtgtgatgcaggatcatcttacatcagcccgcgacacaaagagagtatcttgatggttgcttacaaaattccgtcttccagtgttaaatgctatttcatgagatgtggacacaagggtgcaggaagctaaaacattaatttatgagagctgtatagacttgaggagaaaatggagatagctttataattcatatggtaagggtttttgcttcttttatctgtttcctcgttttgtctttggtttttcttcttctttggagtccattgttcttggcatgaacatgtagttgtagaagtgctttttgttgttactagatgtgtttatt

SEQ ID NO: 31272 - DNA, 2569 bp, Arabidopsis thaliana landsberg
agaggcgtcaagtgcattctagaccgcgaaagaccccaaacagcttgactataactgttttcaaaaaacagatggtccctagattcatgatggccattgcaaagaacacagtccgggggaatccctagaccccagcttctgagcctatctcttgtgtgaagtctattccaagtgaccacccaagatatgaacgcgtgtttcggaatgcgatccttaaaccacacagacttatgccaagagacaggaacaccacagggatgtaaagccagccaagtttttgccgctgagaaaatgtttgaaggagaatgatgatcttgcttccagaggtaaacatcatcctgctcacaatcaaccatacttccacagtcaggcaaaatgttttttatcagagagatgataggattcctgcttcgggataaggagagccaccaggtattccctcttaaagcgtctttaaccactgattgagaaggcaaaccaacaacttgcggaccaatcggaccagttagatgaataagcggtccaagcccggtccaatagcctgatccaattatcgtaccagaaactagttgtttctccagaaccaatctcacaaaacaagaaggggtctagctatgtctccagaatactatgtctctcagtttacataatatattgtacaactcctctctaataaagtattcacattcacattccatatggtagcagagcaaacgatactttttataaataaataaataaaactaatctttcttctctttttctctagccgccgcctctgctctaatggccaccgaagctgttgacgtcgctgcaactactgtcttgaatgttaacatggctaacattaccaagctctctcaatccaactacctcatgtggagtctccaggttcgtcgcagattaatattcataaatataacttaatttacacctatttggacatgagggaggtatctaactatcgacaatggaaaagtcatagatatagcttttttcgggcggctggatccatacgacataatgcatttcagtgttggttaaagtttcaaaatgtcctctttatggatttttatttgaaaaatatcctattttattttttcttgtaaaaattaatttttaatatataaagttactaaagtaacctcattaaaatttaataataactaaaaagaatttaaactttaaaaataacaatccatgacttaatatttcaaattaatatttgatttaactacaatttaaaagataattcttatttaaatatttttatacaaaattttgttcaaacaaatatataaataaagaaataaattttattaagtgatacattttaaaacatatttagatattattttgttaaattttaatatatatgataaattttttaactgtgtttatcttaaaaatagttgaaaaatttattaacaaccaaaccatatttcgaaactgaacataatatttcgaaaccatatttttgaaactgaacatatttcaaaatgttttttctttaacttttttctttctttcacattttcaatcatgtgcttttgagacgataggttggtgtggcattcacacgtgcgtatcgtggaaatgtatcaacaattttacacgcctaatgaaacgttcctttggttaggttggtaattgtacttgcagcttataatgctaaacaaagatataaatccaactaaaaacgctgcgttttttgtttccacatctctttctctcttaagtctcaagcaagaaaaatgggtgtgatctctccgattgagactctgttctttaagtctcaacatcgtcttcttcaacctcgaaactattcctacccactggttttgtacaacactcgacaagttgcgaatttcccacgtaacagcttctcattatcttctctaggtgtcactttctttctctgttttcttatgaaatgtatattcatttgtttagtctttatttcttgtttttgatgaatatagttctcttgtaggatcattctctgtagattttccagtacgaagtaagccgatttcgcaaagtaagtaaaatctctgctaataactctgtttttttaggggtcaagtaattcagcttttgatatttggttttgtgtgttctataatccaaagatggcaagtcaagttatccttgcaagagatatgtttccgaatctgactcaaacgaggtaaaacacgatcaacaaaattgcgacttttctcgctttcttggcaagtaacagttctgttttgtttcagctgtaccataagaaggtttcttctattatggaaacattaaagcaagcctactcttttattcctcatggaattctgttaagtacaatattagctcttgtctatccaccttctttcacatggttcaagccaaggtgtgtatcaacctacttactaatttgatcaaaatcttaattagacatctctctttattactatttctccttatttaggtactttgtacctggcttagggttcatgatgtttgctattggaaacaattctaatgaaagagactttcttgaagcacttaaaagaccagaggctattattcc

SEQ ID NO: 31273 - DNA, 832 bp, Arabidopsis thaliana landsberg
  unsure (1)..(832): unsure at all n locations
attaagttaagaaataaaaaatttgagataatcagaatatgaaagtagaaacaagaaatagaatagactataatggtaactatttgaaaaatgttcagaaaagaaaattaaacttaaataactataaattaaagttaattgtaaattttattttatggatcaaatttataaaatttatggtagatatatatatatatatatatatatatatatatatatatatatatattgatataaatataagttataatagtagtttgatattttaacttaattttaaatcttttggacatatctctcatatttattttatcgtcaatataaaattgaaataaatttatgaaattatataaacacaaaattttgtattaaaatattatattctagtctaagaagattatctattgaattttgttcttccaaaaacagtattttaaatttattaaaaaataaggtaggataggtagagttagaactgtcaaatggtcgtccaatacattatggacggtccgtggtcagcccgcaagtaaaacggatcgtatggtctaaaaatcgattttgtttgcggacataatgggctagtccacccggataattggttggcccaattttttaaaaatctagggttacacatgtgggggaaattaaattttagactttcccgctatctcatcgtcctacttctcctcgtctaaggagattcttcgtctctagctatttcctcgtcccaattctaacaaaggtaccaatctttntagtctttagctggtcttatgcttncaatctagggtttgatgtgtatcatttgttcatgggttngtgataatccgag

SEQ ID NO: 31274 - DNA, 2166 bp, Arabidopsis thaliana landsberg
  unsure (1)..(2166): unsure at all n locations
tttattagtaagcaaatgggaataaatttttataaactgaaaattcttccaaaaagagtaattcaaagtgggaataataaaataattttaaaatttcaaataagaaatcgacaaccatgtaaacgataattataagatagcttgtattccattttttcacaaaaataaaaactagaattgttgacaataacaacctttaaatactttaaatgggatcacttagacacattataataagtaatactctaccaatatagatgagaaattcaaagtatcaataaaaccacattaacaaccttatgttcttgttagttacatacatgaatgataacacatcaacaatattaactcaaaccattagattacatgtacgatcaacatatattccacttgtaaactgatattctcctaagaaccatttaatgcttttgcgttttttattcttagtttgacttacaatttcagaatagatgtaaactacaatcatatcaaatacaatcatacaaaaaaagtcaaagaataataacaatttctttcaagtctaacaactacaaagacggaaccaatagatttgatgtaccatgtttcgaaaatgctactatagaggttgaaattgtgatttcttggtatatttgatcgatataccactgctattttaaatgaatgttgaaattaggtgtgatatgcgttgttagttactagataacagtggacgaaaaaaaaaactttaaaggaaaaaatggatatgtatcgactccaatcttcttttattgatcaatcatccatcaattatccatgcatgatacatacatcagaatcaacacatataattaactttgtttttttaggaaccatattaacatttttagtgatcttggatcctgtgagaacgtacacatcacacaaattgaaggaatacaaattattacgaatcatcaatatttatgatccatgaaatatgatcaaagatccacaagtgcaaacaccaaagctgtcattgtaacaacaattctccgaaatattacatttcctgtcataaaaataataataataaatatttagagccggccctcaataatatagtttaattagctatcataataaaatattacacactatgctgattaaatatgataaaagaactatagaaatatgctgacctttaagaacgttaaaggaaaacgatccgctaggatttggaacgttctgtggcggcgtgaaaaccagcggcggcgatggcgtctgtggtaaagaagaaggtggcgatgatttaggcggtggagatcgaggaggcggagccgatggagatggcggtggagataacaaaacagaggtttgaaacctcaaaagacatttaggagtaaagatcttggcgtaacttggcaaaccgcaacaagttgaaattctaaagaacgcaactcgaagacaaacggtgcagttgaatatatcaagatcaggactacactgaaccattgtgtctaaatcataagaaccctctgattgtgtcnnnnnnnnnnnnnnnnnnnnnnnnnnnnnnnncaaagaggacgaagatacgttgaatatcaattcgctgaatttttcagtaagtgtttgattgaaccgagtcgggtttggagcagagcgaagagagtaaatagtgatgcttggtacgatttccaattcagaggagaaggaaacatttgagtatcgaaccatacactcgtcgtagtatatgacggctcttttgttaagannnnnnnnnnnnnnnnnnnnnnnnnttgcggtttggacacagtctacgcaagatgctgtggtgatgtctcctttacagaggaaccttccatgggcctgggccagggctaaaaccttctgtggcgtttgaatagtgtccgagagaggaagactcgcggagagaggcgagtagggtgtcgcggttggtttcgtatgaactggtttgtgtaaagttgttggtaggattgcagacagtaaatatgtggtcaggttgagacatggtttggtgagataacaaagagaagaaaaagaagtaaaacagagggatagtgagggtaattatgattcttgccattttgttctttgttttttttgacaaaacagaggagattggactttatagtagaaagaaaactttctttctttttgttgatttattcaaaatgatgtcgg

SEQ ID NO: 31275 - DNA, 2174 bp, Arabidopsis thaliana landsberg
tatttatttttatttttattttttcatatgtaaatttaatacccgttaaaatgggttagcaagaatgtttatcaactgaagattacggtctaaaagaagcccatgagacgaaccaacaaacgtgtcaagaatgtctccctccggtcagattgaaccatcttgggctaagttaacctggcgctaacatgcccgatagccgataggccaatgctcattatagtgattttgacgttaaacacgttacaagtacaaaggaaagttcgagtcttcgagatattaatttgagtaatgttaatacgttatgaatcttatgatatagtcgaagtcaactttggccagctaaatctaaccaaggtcaaagacaagtttttttgtactctttcgaattgtgtaatcatcgtaaaattgcgcaattatcattattaggcattcatgtggtttatatatttccaagtttctctttgctttacaccatagtaacaaacttaaaaaagaaaaaaaagaaaaaaatcaaccggtcgatgattcaaggttttttatttttctaaaagcactccgaaacggttaccgggagcatcgtcggaattatcctaaattccctttctttcagccttctgaccgtaactgtcctcattgcttattctctttctagatcggattacctaacaagttttggactacaatgcatgcatatcaaaatagtttgtcttttttttttttttgatatatggacataagtttcgttgacaacaaaaagagagagaagttacaagaaaatacatgtttttggtttgttttttattatgacatccatcatgcatcatcatcaaataggcaacatccctcctttctcaaatccatattctcaaggcgcaaaaacccgcattatttcatctcgtttctaatactacgatgatctagagaaagtacacaacccaaacaaaacaaagaggacaacacgatttgcttcatacaatattaatcaataatttttgtagccaacaatacgtaggaacacattacacaacaatctctcaaagaccgagcgagaaggggaaaccggtcgacgataaccagcctccaccaccaataaactgaccagccgtatatttttgagcttcagcagcagccgtaattaccttaaagcccctccacttcactctatttgcagttccagcccctgctcctgtgttcgaatactctctgtaagtcagagtgttcaacgcaaaagtcccggtccactcggaccacccttcgggtcggatcacgtcggagatagccgactgcattatcaccgtttgtgaatactccttccatggccgacccaagtacgtcggaaaactacctttcaccgactgtaaatccgacgtggcaccgatcctacatttctggataacgatccctgtgttctggttaggatccgttcttccctgagctgttaccatgtttttctgaccggaattagggcggcgagcgtggatgtcacagtcttggagcacgacggcggcgtttccgaagatgaagtcaacggttccggcgatgagacatttgacgaagaattgacggttagagtggacgtatagagtgtcttgataagctaacatgtcgcaattgtagaaggcggagaaatcagaacccacacggagagccaccgcttggtgctttgacggacccgccgtgttttggaaagtgatgtcacgagctaagaatctctcgccgacagcagttgggctccacaaaaagaaacaacggttaattaacggcatcattagctaaaagactaattaaaacaagacttcttttgcaagaatatcacatttacttttacgaaaatgttaaaactaaaatgttaatattttggtgttataaaggggaaaaagaaatgcgaattataccgaagttgtaaatgaaatgataaaaaacatatttctattttttgttcacatgtaataaatttaattaatggacaaaattttgatagaaaagtcaacaacaatgaaacaaaaaaaataagaaagaaaaaaggtactccatccctaaaactaacggctctcttcacgagtggatgagccataaaaccaatccacataacgtgactcggaaaagcatatgaataaagccaagaaaataatggatagagacactcacatgactcagatcttagctaagttttt

SEQ ID NO: 31276 - DNA, 1034 bp, Arabidopsis thaliana landsberg
gcctactacatctaaggaacccgaggaacctttgtcggaatcggaagaccaattgctgaactggatagcagccgcgatatcgtttggacctggtatgttttgtggatttgtgatcggacatatcttcacttcatacaaacataagtggttcatagctcgttaagcccatctctctcccggtcaagtttgtagtacggtaactaagctcgctagttgttttttctgtccttgtaatttcccatttagtggttgcattataatttataaacagtgtcgacgttataagctgttatgttctcaccatagtgtgtaacgtggtccatgtttgtatagttgcatatgtatctctattataaatctttaataacgtgtcttgaaattcatgtttaatactatatcccatagccatccatttatcttatttggaaatattttgtcggccacaatgttattgttcacattagacttactaagaaagaagataaaccttgacgagtggctttttttctttcttcacctcatgacctttaattattataaacccatttctcacggcattactttagacacagaagtgtgtgtgttacttttctaccatttattttgttagcttgttgtttcagttattttttgtattccttttatctaagtacatgcatgcaaccatgattccttcattggccgctttgaattggatagtatcatgttaaaatgacccattgattttgggaatacttttttggataataacaactatgtagatgggaccccctagatcgatatcgaagttactgaatctaagatcaatgctaaacatgacaatatcctttcacaaaaactactctgccccaaaaaagaagccatttaagagattagaataaggggttttgtttaccattgcaaatccaaaaggaggagctattcggtgactgatatatcaaaaccagagtgatgattttgagtcaaccattgcttcagatcaaagtcgccgacggtgacgattatgagtgaactctgataataatgtaaatttt

SEQ ID NO: 31277 - DNA, 2303 bp, Arabidopsis thaliana landsberg
agtcttctactagtttgtctttccttgggtacgttttaaaagttgtccacataaaaaatatattcattgtttaccaatggaagactttccaagtcaagctccttacatagaattttcttatttaaatagaagtgcataagcaagacatgtctatcacataccaattgaacaaacaaatcgtcttcatttccacaagttatcatgattcgaagccaatcttattgctttcttggtattactattaccatctatttcttcttttgtcttcttcccttaccaaacacctttgcttctcctcccacacagtctttgtgccgccacgaccaaagagatgcacttttggagctacaaaaagagttcccgatcccttccgttattttacaaatatccatggaacaagagcattgactgttgttcttgggagggtgtcacatgtgatgctacatttggagaggtgatatcacttaatctcgtttcctatattgccaacacctctttgaaatctaacagtagtctttttaaactccgacatcttcgtcacctagagctttcaaattgcaatctccataggagagattccttcttcaattggaaatctttctcatctcacatatcttgatctttcttataataaattagttggtgaatttccggcttcgataggtaacctaaacaacctagaatacatggatctttgcgaaaatgatctcataggtaacatccctacttcattttccaacttaacgaagctttttgaattgtacctcaatggaaatcagttcatgggtggggatatagtattagccaacttaaccagcttgtccattataaacctctccttcaattacttcaaatccacgatttctgctgaccttagtcaactccacaacttagagcgattttcggtttataacaactcatttttcggaccttttccctcatccttgctcacgattccttcgttagtcgatattgttttaagtgaaaaccaattcgaaggacctattgattttgggaataccacttcatcatctaagttaacaaatttagatgttagctacaacaatcttgatgggctaatcccaaaatctatatctacattagttagtctcgaacatttagatcttagccacaacaattttagaggacaagtccctagttctatatcgaaattagtcaatctcgatggtttatatcttagccataataactttggaggacaagtccctagctctatatttaaattagtcaatctcgaacgtttagatcttagccacaacaatttcggaggacgagtccctagctctataataaaattagtcaacctcagttcccttgatctttcctacaacaagtttgaaggtcatgtacctcaatgtatatggagatcttctaagttagattcagtggatctttcttataattctttcaacagtttcggcagaattctagaacttggggatgaatcattagaaagagattgggatcttagctcaaattccctccaaggaccaattccccaatggatttgcaacttcagatatttttccttcttagatttttccaacaaccatcttaatggctcaattccacaatgtttgaagaattccactgatttctacatgttaaatctgcgaaacaacagtctaagtggattgatgccagacttatgcatggatggctcacagttgcgatcacttgatgtcagcctcaacaatttggtgggaaaacttccaaaatcttttatcaattgtgagtggatggaatatctaaatttgagaggaaacaagatcaaagacacgtttccattttggttgggatctttacaatacctaacggttcttgtgctccgatcaaatacattctatggcccagtctacaaagcgtctgcctacttaggctttccaagcatgcggatcatggacatatcgaataacaactttgctggatcattgccacaagactattttgccaactggactgaaatgtcatcggtatggcaacgaacctatgcgcacacttgattacaaaagaaatatagctataccagggtcaagctacatgggagatagtgaaaataatcatcaagattcgattgatttggtgtataaaggagtagacacagatttcgtacgaatctttcgagccttcaaagccattgatttttctggaaaccaactctccggatatattcctggagctattggtttgttgagccaattgcgtcttctcaacttatctggcaatgcattcacaggaaacatcccaccatctttggctaatatacaaagctgagacgtaga

SEQ ID NO: 31278 - DNA, 3602 bp, Arabidopsis thaliana landsberg
actgaagactcggttagacgaggtaaaagccggtgatgagctcttgtgactgtgacagtgttaactagatcttagagcagaagaacaacaaagtcatcacaagacaaatgtatcaggtgaagaatcgcttttattcattcgttgattctttagaaaattcattttgtgtcagaaattgtagatttgctttgagactgttcctcagctagcatgtattcaacttttgtatctcctcacttgaatctaaactacaggtacgtgacccatgtatacatttgttactcttacactaaattgcctgttctggagattttagtctcagagtgcatacattctcttgttgaattcgccgttgagaatctctgactctgaaggcatatgagatagtgagaaagatttcgatttgcttctctctttccttaagcttttcagtttagattcctcgatcctatgcatgaccacacagtaacacattgcacctatcgtggttagcataatcgtcccgccaataatcgttgcacaaatcgccagccaaatgtcctccttacccacaacgataaacgaaagagaaacaaaggctacagatatgaacaaacaagccaaccacatgagcttgttgatcacaaacacaagattcttctttgccttctgctcaatcaccacaactgaagtctgcaccacaacaacagccaaagatatgaacagcgccaagctgtcaaatatgaagaagactaaaaacggggctttgccggctatgcgggcttctcctaataacaacagtccctttgttctgtcttcttcatattgcccaggaatggtgaagattgctgcaaatgcaactgttgcaattaggacagccacaacggttgcagagtttatagcgttgtttaaaccattgatgtgaagcttcttcagtctctttgcgattctccgcaccctaacacccgtttggcgagactgttggagctgagactgtaccttgtgtttaatgtcactgaccgtttggttaagttgcttagccgggtttcgaggcttcccaagatctttagctgttgcagctcctgcttccttcagaaccgacacaagctctggatttccaatcttttcggctatatcaagtgcagtatctccagccttattcatagcattaaggttaattccatcaaatgataccaaacatctgactatctgcaagcaaaggcaaaatgcagttcatcagaattcttgtagattgagaaactgaggggagggggaattagcgatgatgataccttaatacggcctttgtttgtggcagtgtgcaacggcgtattccctttactatcctcaacactcaaaatcgcaggatcaggtttcaccaactcaagaacaatcccttcgttctgacctttgacagccatgtgaagcgctgtttgtcccttcttatcagttctaaacccgatgcttgcatcattacctatcaaagacttaaccacttctctgtgccccattcgcgctgcagaatgaagtgcggttttaccattgttcttagctatcttagctaaatgagaatccgtctttaaaagaaagtttaccacttcagtgtgtccttgtgttgccgctgtgtgcagtgccgtagtgtttgatagatccaccgtcatagccagattcggaaatgtctccaacaatttcttcaatgcctctgcaaaagacagcacacattcaaagatatatgtcaagaaggtgtacaacaataacaaggtcttcaagttattatcagattctctaaagtttcatttaccaatatggccttgttttgcagcgacatggaaaggatcaaaaccgttgcgagctttaactgatgcagtatcaagatccatatgtttcaacatctcttcaacaactaatgaatgcccattttctgctgcactataaagaggggtctctccttctagattctgctttgatgacaactccttcaactcttcaatgccgttacaagctcgaatcaattccataacctttcccaaattccccgttcgagctgcgagatgaagaggagaatctcctcttttaccaggtgagtcagtcttcttcttcctctcaccaccaacattcatgaaacttaactgtctctccattactaccctaaagcttttctgcttctcaacaaacccacgaaagcttctctgcctctccattgccctctcctgtttctccattgctcttcctttgattccatgtttctcaacaacattcacagctaggaaactaacttgcttgtccaaagctcttccctttctcacctgattctctgcaccaacgcatctgagactctgctgttcctccacagagttacctcgaacgctctcttgcttctccataacaggaaccagagaactcatggtatgcttctcccttagattacacaaagatcttgaataacaactttttctcccaaatctgaaagatgccaactttgtttgaagaatccgtgagctcttttccagcaacccgtgtttcgtaataacagaaccagcttgaaaatggaaaaccctgacttccctgtgatttccagatttcttgtaaagattcaaaccgatgtgatgaaagaagagagaaaaaaaaaaaaaaggttgcagctgatttcagtagagtgtagctgaaacccaatagattgatttgtaaatctcaatgctttttgtgggcaaatcatgtaagattctcaggatatagggatagagagagagactgtgatgagtgactgcatcttcagctgttttctttattaatttcgctaaacttccaaaatctttagtaatattagtgattactttttcttttgagttttgaagcaacaaattcttaattactatgtcaattatctccagtttaaaactttatatccagttaaagcttcttttctctaatttctttatatttttgttgtccaaatcaaagaccaaaaagcaaaagcacaatgtgatggtgacaacaagtcaaagtcttccactttgttggttactgaaaataatattttattaatataaaaaaaaaaatttgtatgttacagaaattggtgatcatataccttgttacagaaaactatttgaaaaatcagtttcctaataacatttcacagtgatatcatcttaaccccaaataaattcatcgatttagacaactagtaggttgaataacaccaagatttttcccaacagcattgaagcacaaggaagtagcaggagttcctttgttgtaagtaagctttatgtcttgtaatgtgattcccgtgcatggattgctcttgctacacaccagcttcattgcttcctgcgtcgccgaagttccttgtatgttcttggacgtcacttgggttatcttcacccccgaatgctaacacatacataaaagataataaatctttaattatttgactaagttaatatagcatatttgattagtcttaaatttatcaaaaatatgatatggatatacctcagtagggcaaccttggttggacggacaatagttttggtcgattatgatagggttttggacgttcctcatgattagattttggaagaagacgtttctaacgaatccggtactcggcctcgccc

SEQ ID NO: 31279 - DNA, 3148 bp, Arabidopsis thaliana landsberg
aagttgaaaatcctgctagagcttggcagatatatttgtttgcatataacaacagaattagatttccactttcttcaatgagaacctaatctcactttgctttacttatggaattacaggcacagtttcttaaagtttcctgcgaaataccagcgacaccaattgaagttaggaacacatccaaaaaactggaaactcctaaaggtggtgaacatttacgatcttccccttcctgtaactctgaagtagtgtttcacttgaatgagaaaaagaatgagccctgtgaagaaatgggaagatcattagatacttcagagcaaactcctagcaggtgaaactgctaatgttactttgctagataatatctcttttagctgagcttttgaaaagtaaaagaatcttggttctcctttcaaatatctagaactggcatgattgcttgcatatcctaacataaattcttacatcaggcaaatagttttagaggtttcatggagctggaatttactctttttctaactttctatcagttgcttgaccgatgcccggaacaatgcaaggatctcttctgcatctagtgatgatagtgaagaaagcattggtactgtgttcagggatgaggtggatagaaccggcgttagagaaaagacaaagtcagtgcggtctgaaattgactttggtcaatcttactcttctagttcttccaaaaacagaactgcaagcaaacctgaaatggttggaaaaacttctatctcagctacctcgccttatacaacctcaatgaagctatccgatgagattcaaacccctggaaccatttttcctgcaaatatggaatcagcaggaagagagagacgtagaatcaggtctcagtttgtgcattcagcttccaatctaattgtgaatgcctccctatgtaagctccacgaagattcaaatgcgaacctagaacaagctaaagttcaggcttacaaagagaagacagaaaatgaatctcccacatcaacaatatgtggggaaaagttggaagagagttcagatggaaaaaaacagataggtgaaattagtagttctcctttatccataaatcctggagacagacctatcattggaatggttgctgctcattggaatgagaaagagcattctcaaatctcacccaaatggtgggatggtaatgggataccaaactctacaaacaagtacaaagaggtactctcctgtttctttccgaatctctaggtttcttcacatttcatgtcattcattatgaatatatatatttttttttggcactcattatgaatatatgagtttctttttataatgcaggaccagaaagtgagttggcatgcaacacctttcgaagagagattagagaaggcactttcagaagaaggtggtcaaggtttcattcctccaaggtattaaccgtaaatctcattgataatctataggagaagtgatgaaacctaaataagcaacccccataaatgtgtgtgatgcaggaaacttgaagtgatgatggaggaggttgaaggggacacagacatatcgcagctgcaccattcagtgcaaccaaactcggtagtttccttctgaaagtctccttggctttcgtacagatcagtgttacttacatatggctatcacattactcatgagcaaatgaaatactcttgtttctggctttaaaaggagctttaaagatagtattaaaaaataaagtatcaacagtgatatgtttatgaacctcttgagaattttcttcaccagcactcttttgatcttttatgaagtaatcataatctgccaaagaaattattaacatattattgtcatgacgtatatgtgtgagacagcagtcgctcaccatgtttcatattttaaaatggagcaaagcagaggtcccgccaagacctttggcattgatgtaagtagcgtctccttttaattgaggtctctctgtacttggaggattctcttcagacacaagctctctaatcggtccgtacattctaggattcggtcttactccagtggtaaagaaacatgcgacagacactcgagctcttgttgctctgttcgccaatactctgtgctccaaactgatgaatttgtcgtttgttataagctgcatcaaaaccacaaaacccaaaaatgaacaatagggaagataagttatacaatgcaaaactgagcaaaaatgcatcagtgaacttgcctgtaaaagatctccgatgttgatgatgagagcgccggaaacatgaggaacatcgaaccagtgcccttcacgacgaacctgaagcccttcgatctgatcgggaagaaggacagtgagaaaagagttgtcggagtgctgacttgtgcctaaagttaggtcaggctctggacacggtgggtagtagtgggagagcatgagcaaacccttagagcaatccatgtcattgaggtgattaggttccaaccctagagcttctgataaaagctcgaagagaaatttacccaaattcatcacttgctttgaatattccatcataatatccctgaaacaactcagtgattcaaattaccatatgaacaaagactacacatgaaatcaaattagagcaatagagtcatacctacaaatctccggaagatcctgtggttttggagtatctggagccatggtacaagagaaagtgtctctccaatttgctgctggagaactaaagagatcgaaattacttaaatacagaaaccttctgctgaaatcgcgactgtagaattctttcctcacttcttgtgattgctcgtggaagtcacgaactccttttttcatcttctcaagaagttcaagcgaaactccatggttgatcacctggaagaaaccccacttcgctgctgcttctttaatctcttcaatcgcgttattgcgcttaatcgcgtcctggaagtcccgtcctccgagatcgatcgttgggatcgtcttgagatgtagcaggtccgagggaagtggttttggggttgataatttgacagttggatgatgaaagatgcgtggaacttgtgaaactccagagtcgacgagtcctttcacacccgttttcgtttcatcgaaagctttaagctcactggcacgatcgaataaaggatcggtcttcat

SEQ ID NO: 31280 - DNA, 3201 bp, Arabidopsis thaliana landsberg
  unsure (1)..(3201): unsure at all n locations
tgtaagtataaatctgactaaactgtcacagactcgaatttatttgacaagaaggaggagaaagtaagaaaggactggactcaaattctataaaactacacaaaagagaaaacaagtcaatcattgctatagagtaataaaacatctctatacattttgagtaggagagattcaaaaggggacacctaaacgggcggtatgtttgagaaggagaaacctttgtatcctttgtaagcataatacgcaatccgagtatagtaaaacccgggaatgaacagaagacacccgaggacgatgaagaaaatccctggtttcaccatcaaaaaaatcaaacagagaatgataggtcattgatgcaatgatgagaaagaagtagttccggcaaaacggaagaaaaagcaaatcaaatgaaatcaagtttaagtacaatgctgatacttgctttcgctttgcagtattgcattggggatgtatgaaatgcattaatgaattacaagcccagaggaagaagagcaaactagctaatttgaagtggagatccttcccttttttatctcacagataagagaagcttagaatcatcatatactagtttctatcggaagtttactaatcattctaacaatgaaatcaaatcgtatgcctttggaaaacttgtgtctattcatccaaatctccagaaaacagagagcaaaaggccaagctgaaacgaaattacactccaccgtagctaaccagagcacttgcaatctatatctatcagcttaattacctaaattataacataacttccccaaatctaatttttttcctaaaacaatctagctgaaatcaattactgttttctaaatctctcaaactagcaaagataagtcccacatattctctcatgaattcccaatttctactcatagactggatcaaaaaatggggaataagtaagaaaggtgaagaaatcgctaccgtggcctcgatcaccgccaactcgattataagccatgaagaaaccggagacaattcctagggttccgaacacgagtaaagccaccgcgagtgcgatctccttcaccggcggtcggttattgacggtgtatgaagtctcaatcataatgtcctcgtccgttatcgagaacgcatggtcgacgtacgccattttacacagcttccggatcaaagatcaatgggaaacaatcaggaccgatctagaagaaagcagaatgacgattgatctagagctcgagaaagatgaaatcgtactgtttgaattttaggtcttcagatgttatgagtctcctacgacggtgacggattagtttggtgcaaatgcaatttcttttggtcgtgaaatctactcaacgtactatgattcaaactacgcgtcgtttgattattcttttctccgaaaacggcagaacgtgcgagattgaacaaatcaaactaatcagtgggctatatataacaaaccagaaaatactctctgtttttccatttgtttttttgatgatgacatcatgtatatttaccaattcaagagattcaggtcaagaaatcaaaccaaaaccgaaccataaagatcagagagatttatggggaggatatagtttccagagagcaacagttgcatcttcagacgcagannnnnnnnnnnnnnnnnnnnnnnngtaggacacagcgttgcactgcaaacaaaacacatgaaggcatcaaaatacaaagatttagaaaatggttgtctctcaactgttgaaccagtctaagaaattttcacataccgttgctcggtggtactttagtattgctagagcatttcctttgcggtaattatagactcgtattctgtttccaaatatgtaacaaacaggagaatagtttttagtcatatgcatcaactttttttcacactggacgaagtctaattgatttattcatatgttttgtttcatattgtgaaaatcagtgcatagcatgaggatgctaacctgtggtcccaaccagccgtggctgcaattttcccatcgactcgaattgaggtgcccgatacaccgggcctttccaaagtaatctctttccttattgtacaagaaccctacaatcatatgaaaaaatgtcatggaatcagtattaaactatagctttacggcaatcacacaagtgcatcctctctagcagatgtcaaacttacagttgaatggttgagattatacatcacaattttgtcatctgcccctcctgagattcctccatcacatgatgatgcaacactaagacttaaaactgcataaagaatacgaattaagtaatttggaaaattcagagagcaggaacaaaatataagaaaaatctaaatacagaggatggaaacaagacctggctctgaatgaaacttcacacttgttagaggaatcttagcattgcgtatatcccaaagaagtattgaaccatcctcataactgcgcaagtttggaatgaaccacccattataaaaacaaagtatgtaatcttgagatttgtctttcttgattaatggaaaagagcttaggaaagagagcatacccagctaagacatgtaagaaaccctgtgattcaggagggcaaaacaattgaacagccatacacattcctgcagatgaccatatatacgaccttgatgaaagtattttaagcaagttcaaaggtgaactaatttgaaattttttactgatgctaaaaaacatcaattttaacaagaaaatgtacatatgaaggatctcactgaaagaacaaatatgagctcacctcttcctttggtagaagcattgggggattcgtcagggctactttgaggaagctgtattatcttgtctccggtattgagatcccatatctctacctttatggatagaccaaatcacaagaatgaaacacaggaaatgaaaaccaataaaagaggagagaagaaacaattttatgacttttccaaaacaaaacatatatgaatttctagtcacctcagtaggttgctcccctactactgctacaaaagtggtaccttcagcatgatctttatctgctaaatttttatgtaatatgagcaataagaagaaaaacagttattttgctaacaaaatctttagacaacgcaagtaaaacataccctgaagcaaaccagaatcctcctcagatcgttcactatcatcagcaatttgaacattacatgtgtct

SEQ ID NO: 31281 - DNA, 2339 bp, Arabidopsis thaliana landsberg
tacaaacagaaaatctagcctgtaacggaatattgtcgttgttttattttctttttgcctggctgtatagtccccggtatagaaataacaaaaaaaatattcgaaaactttcttaaaaatagattttgagaaaagaaaaaaaatggttccttgttcctaggagaacaggaacagagttgggtgttccttgtttcatctcacattgaaaccaccggagagagagataatggcggaggggcaatccccggagaactcaccgccagctcctcctcctccttctcctccgtcacctccctcttccaacgatcaacaaacaacatctcctcctccttccgacaatcaagaaacaacatctcctcctcctccatcttcatctgacatagctcctccacctcaacaacaacaagaatcaccacctcctccttcggcagataactcctccgatggttcttcctcgtcgtctccaccaccaccgtctgactcatcctcacaatcacaatctccacctcctccttcaacgtccccgccacagcagagtgacaacaatggcaacaaaggaaacaacaatgaaaacaacaaaggtaatgatggaagcagcggcgatggaggaaacaagaacatatctcatactcctccaccaccttctaagacttcggaccctagctctcactcgcaaccaagatcgctggcgccgcctacaagcaacagtggctcaaattcgtcaagtaatgatggtctgaacattggtgctgttataggacttgtggctgcagctggaattttattcattgtcatgatcttgttatgtgtctgttgttttcggaagaagaagaagaaatcaaagcttgatcagatgccgcactacggaagcaatgcttaccccgcaggaaaaagtatgtacatataaaaaccatgaaccctaaattttgtttcttgttgcccaagaaatagacaaatcactatctcatctaactatctacaaaaccttgaaccctaactaaaccccggcccgtaccatttcgtaagctttagtttcacctaattcttctaccctagtttcttcttagctatgaaaattgtaaatttttgtcacttgtttccgattctttctttttttcccatcacatctcatctaagcctttgtcatacttctatttttgtttgttttttagctgggggtgatcaatactacaaccaaaatgctgctacacaacaacaacaacattacaaccaaaatgatcacattgtgaatctgcctccacctcctggatcagtgggaacaaactgggtgaattcaccgccaccaccacctccaggaaattggcagccaatgccgtcgccaccagcaccagtgtcaggaggcgcaaatgtgatccaaagcgacgaaatgggctcaaatttctcatcaggtccatacgctccatctctaccaccacctcacccttcagtggctctgggattcaacaatagcacattcacttatgaggagctagcatccgcaactcaaggtttcttaaaagaccggttgttgggacaaggcggtttcggatatgttcacaaaggaatcttgccaaatggtaaggagatagcggtgaagagccttaaagccggaagcgggcaaggcgagagagagttccaggcagaggttgagatcatcagccgcgttcatcatcgacatctcgtgtctcttgtcggatactgcagtaatgcgggaggacagaggttgttggtctatgagtttctccctaatgacacacttgagttccaccttcatggtaattaatgatgagttttcttgtgttcctgggaaggattatgacctattaaaaaactaacacaaaattttcacaaaaaaaatcaattgaattatagggaaaagtgggactgtgatggattggccaaccagactcaagattgccttaggatcagcaaaaggtcttgcttatctacatgaagattgtgagtgatttatctcatttcatcttttcactttaactctaaataaatccaaagatatttacatgtttgtacctgaaaattgtggttaggtcatccaaaaatcatccatagagacattaaagcttcaaacattctccttgaccataacttcgaagccaaggtatatactttagtgacctaaaaaattctgtttcttctactctttacttggaattacaattttctctcttgacaatattttgtttttaaattaatctccaggttgcagattttggtttggccaagctctctcaagacaacaatacacatgtatcgactcgtgttatgggaacattcggatacttagctcctgaatatgcatcgagtgggaaactaaccga

SEQ ID NO: 31282 - DNA, 1734 bp, Arabidopsis thaliana landsberg
ttaggtattgaaatgtgactttttcttgtacattctactatggcttgaaaggccatcatattcatgataagctagataagcaagtaggtgaatgcagtcttcctgaatacaaacacaacattaggaacagtaaactaatcactggtttaagtgaacaaccttcctcttaccacaaagatgatgatctgaaatctttcctttcaacatgttgatgatctgtatttaaaacgaatgtgagcatcattcatactcttgtacaggatcaactgttgctgtggttttgatggataagctggggagaaaagtgttgcttattgggagttttgcgggcatggtaattgttgaggcaaaaagtgctatttgaatcaaactttacgcagctaatatttaataacgctccatgtatgtagatgtaaatgtttatcatctttaacaggcagtatcgctgggtctccaagcaatagcatatacttcgcttccttcgccctttggaaccttgtttctctcggttggaggaatgctgctgtaagttttctatcacaacaacagcactggaaaagggggatgttttattttgataaactaggggtgtgattacgaatgcaggtttgtgttgtcgtttgcaactggagcgggtcctgttccaagtcttctcctgtctgagatatgccctggtcgacttcgagcaactgcgttggctgtttgtcttgccgttcactgggtatgcctttttttttttttttatattctctttgtggacttttttaggaaatcgataatgttgaaataataataagcttggagaattacacgctacaacaggttataaacttctttgtcgggctgctgtttctgagaatgctggagcaactaggttcggtgcttctaaatgcaatatttgggttcttctgtgtggtggcagtcatctttgtgcagaagaacgtggttgagactaaaggaaagagcctacaagagatagaaatcagtctgctctcttccacccagtgattgatctctttattctgagaattcgtattattcttctggctctctttttttccttggagagacacaagtaacgtgtacctaatatggaagtaggagtgagtagtaagtaggtaaacaacatgtaaggaaatggatattattcattcgagtatagccaacgtttcaactgattttgtaataaacataagaccaaacttcattcaacaatggtaggttctcaactcatgtacagaagtgcacctatctaatttttttgttgcatcacattcatgatgttcccttattgtatagtctgtctgcaaacaaacacctatcagattcttctctgctttcggctgcttgccttggctttttacacttccactattgcatctgcttattcttcaagacttggtggcatgactcaacaatttgtcacctccattcatttgccacttgaaacaccttcccgttgtatggcaaccacaggctcgttacatctaagacaccggaacgatgctgctgaagcgcagcgggtccttatgcagtagtaacagtacctgcgacaagtcaattcttttaaatgtatgtaacaactacagcacatactatgaattcaacaagtcaataaaatcacttctgtgtcttctccaaagtcagatacacaatcatgtgaaattttttgcttctagtacaatcagttatagtacatgtctggggagagagttaactactttattctgatcc

SEQ ID NO: 31283 - DNA, 3835 bp, Arabidopsis thaliana landsberg
tctacataaactagggtttgtggtcttttgaaacaagtgttttatgatcttttgtattatacaaaataaaaagacttgcttttggactgatcctgtcttggtgaatgattcgtattagtagtctttatgagttctcatttggtttggattttggctttcagggtaagaagaggaaggacactgtctgcattgctcttgctgatgagacatgtgaggagccaaagatcagaatgaataaagtagtcagatctaacttgagggttagactgggagatgttatatctgttcaccaatgcccagacgtcaagtacggaaagcgtgttcacatcctgcctgttgatgatactgttgaaggagtgactggaaacctatttgatgcttacctgaaacgtaagttgcctttttgttttagatccttatccagttatgcaattttgatttttctttggatgttcttgtttggtttgagatattattagagtgatttcttaacaaagattgaattcttttcaacagcttatttccttgaggcataccgtccagtgaggaagggtgatctcttcctagtcagaggaggaatgaggagtgtggagttcaaagttatagagacagatcctgctgagtactgcgtggttgctccagacacagagattttctgtgagggtgagcctgtgaagagagaggatgaagaaaggctagatgatgtaggttatgatgatgttggtggtgtcaggaaacagatggctcagattagggaacttgttgaacttcccttgaggcatccacagctattcaagtcgattggtgttaagccaccgaagggaattcttctttatggaccacctgggtctggaaagactttgatcgctcgtgctgtggctaatgaaacgggtgcctttttcttctgtatcaacggacctgagatcatgtccaaattggctggtgagagtgagagcaacctcaggaaagcattcgaggaggctgagaaaaatgcgccttcaatcatattcattgatgagatcgactctattgcaccgaaaagagagaagactaatggagaggttgagaggaggattgtctctcagctccttacgctaatggatggactgaaatctcgtgctcatgttatcgtcatgggagcaaccaatcgccccaacagtatcgacccagctttgagaaggtttggacgatttgacagggagatcgatattggttttcctgacgaaattggacgtcttgaagttctgaggatccatacaaagaacatgaagctggctgaagatgtaattttctagtcatagctttttctgcgtttgttgagtgtaatgtttattgaatgctaaattcttcttgtggttgttttccaggtggatctcgaaaggatctcaaaggacacacacggttacgtcggtgctgatcttgcagctttgtgcacagaggccgccctgcaatgcatcagggagaagatggatgtgattgatctggaagatgactccatagacgctgaaatcctcaattccatggcagtcactaatgaacatttccacactgctctcgggaacagcaacccatctgcacttcgtgaaactgtgagtattgacagtactctgcttagaacgagatcaaagattgtatctttgcgtaaatctcattccaaatttttttctttgctttgcaggttgtggaggttcccaacgtctcttggaatgatattggaggtcttgagaatgtcaagagagagctccaggaggtaaattgctaatatttacttttgcttgggtctgtctattaattgtaatttgtaacctgagccgtgtgattgttcaaatgcagactgttcaatacccagtcgagcacccagagaagtttgagaaattcgggatgtctccatcaaagggagtccttttctacggtcctcctggatgtgggaaaacccttttggccaaagctattgccaacgagtgccaagctaatttcatcagtgtcaagggtcccgagcttctgacaatgtggtttggagagagtgaagcaaatgttcgtgaaatcttcgacaaggcccgtcaatccgctccatgtgttcttttctttgatgagctcgactccattgcaactcagagaggaggtggaagtggtggcgatggaggtggtgctgcggacagagtcttgaaccagcttttgactgagatggacggaatgaatgccaagaaaaccgtcttcatcatcggagctaccaacagacctgacattatcgattcagctcttctccgtcctggaaggcttgaccagctcatttacattccactaccagatgaggattcccgtctcaatatcttcaaggccgccttgaggaaatctcctattgctaaagatgtagacatcggtgcacttgctaaatacactcagggtttcagtggtgctgatatcactgagatttgccagagagcttgcaagtacgccatcagagaaaacattgagaaggttagagatcccatcgccaagctctttatccaaagattgttatactctccaatcgttgaactgaagctcatgttttttttttgtttcaggacattgaaaaggagaagaggaggagcgagaacccagaggcaatggaggaagatggagtggatgaagtatcagagatcaaagctgcacactttgaggagtcgatgaagtatgcgcgtaggagtgtgagtgatgcagacatcaggaagtaccaagcctttgctcagacgttgcagcagtctagagggttcggttctgagttcaggttcgagaattctgctggttcaggtgccaccactggagtcgcagatccgtttgccacgtctgcagccgctgctggggacgatgatgatctctacaattagtgataacttctttatccttttttttgttaagttttaaaactcgaattctctacttttggattactggggaaagtgatactgattctttcctcgtgtttttaagttatccgaatctcttgtgtttgggttttaatcaatgttcttaattttcgtttcaatacttgtttggtcgttcattacaaatggaaaaaataaaggattataaagtaagttaaaaagattgcaagtgataagtaattgctttataagtggtaagtatcacaaatgttcccacttatcagcaatttccgcatatcaatgttaatgctctaagatcggtactttcttttatagaatcttggagccgaggatgtatttttttttgcatcaatggtggttaaagaagccaaaagaaaggatgctttattatgtcaacaacattgatgtcaagataacaacaaagctgctcccaagtcttaaacataaattgaacaaaggccacatgttgaagattgaagatgaacatacttaaaaacgatatcttactgttcttgttcaaacattgaccgttaaatacttcaatgtttagccttcagcacctattccacgtgctctaggacgtctgacagcgaccagcggattgactatgccttgtgactctctacccagacccgagccttcgacgaaacccattctcgtcatcatcctcgacccaaagcctgttgtgtgctgctcaaaggctcccaatcttttgtcccagattcttccagaaccagaagcaccattgtcatgggtgatgagtttcccatgagtcccggaggacgaacatctgtatcgtttagcgctgttaatgttattacttgacggactagggtcttcagtggtactggagaaatccagccataacccaagtgatatcagcggtgtacaggatctattggctgtgctaacccttagcatcgttcctagagcacctcatctatgaa

SEQ ID NO: 31284 - DNA, 1350 bp, Arabidopsis thaliana landsberg
tggcagctatttttgccgctgtaaccgctgtcttcgggatgaatttgcaagactctgttttccagaatccgacgactttccagtatgttttactgataacaggtattggatgcggttttttgtattttggttttgtgttatacttcaagcacaagaaagtattccctctctgaaaacttatgttagagaagaagaagaagacgcatgtagtagcttctaatgtaaagatgaacaactaatgtcttttgctgagcttaggcttaacctctatagtgaaacaactggatgtgtttaagattaatgataagaaataagtttaagagaaagaaaagcaaaacacagaagacaccatcacattctatgtcgaagcaaattcaaactagtgaaaaaataagacagagaagaaaattgaaccgtcatccttaaactttggaagaacatgcattagtgaaacaaagactaagcaaatcctggaagaaaccattgtttttgatctatgtaaacaccgtatctcttaggccatgttattctacttgtggcaagattgaagataccgcaatttgaaggacgatcaaaatccggccaaagatcatcttcaacgaaacagattgaatccctcttgattccatcaccaacatcatgaacttgtgctctcattgtaaccccatgacaaaagatcaacatctcattcatcatctccaatagaatgcactctctcccatttgccactttcaagattcatcttaaagatgtaaaacaaaagttcctcttcattagtctccttttgtttccgtttttttaagctcaagattttaagaacctctcctgattctgcaatcactattttcctcttccaaatgtattcctgcggtttctcatcaaagcgaaaaggatgattcgaatacgggtttgtcaatccttcttctttgggagaatctccagagaaatcataaatcttgatgtgatgatccaaagtatacagataaagcttgctgttcttataagccatatcgaaaatacttccactgttttgattccacttcgaatcatatcctttcttgagtgagaacaagtatttctgtttgaaaaattaatccaagcaacgaaataatcctttgttctctcgtttatccacagaacagctgttgttttgcattcttcgttgtcgtcgttgaagagttccctacagccctttcgtctaatagatggaagcttgatcgttttgatcgttaacaggttcaaaatatagaaatcgagaccagaatctaccagtaggagacaattcccggagctagccatacaatatcttccgttcaagcgacgacggaggactcttgttttgaaactttc

SEQ ID NO: 31285 - DNA, 1152 bp, Arabidopsis thaliana landsberg
  unsure (1)..(1152): unsure at all n locations
agatcatcggaacattcgtgcttgtctacacagtcttctccgctactgatcccaaacgcaacgctagagactcccacgttccggttagtatttatttttatcagttataagatcgttagttaattacatgatatcattaactaatactttgggttatgaattatgaaacgaaaggttttggcgccacttccgattgggtttgcggtgtttatggtacatttggccactattccgatcaccggaaccggtatcaacccggctaggagtttcggagccgccgtaatctttaacaagagcaagccatgggatgaccacgtacgtttctatttcttaattatttaaaattaatcaaattatggacggaggaaaaatactaaagtgtttttggtcttacataattacagtggatattctgggtgggaccattcattggagctacgatagctgcattttatcaccaattcgttctaagggcctcaggctccaagtccctcggttcattcagaagtgcagccaacgtttaaacttagccacgaaagaaaaaaagtgtgcctacaattatgtagaaacatatcctcttttccactcgtatcttagcttcttcctattttctatttctaactgtgtgattccatattaaatcgagtgaaatgtttttcaattcatctttgcaacgtatgtaagtttggtgtattgagaaaaaaaatcgagaaagacaactttttcttcgcttatataccctacacaatgtgttgaatgggagatgaagaacaaagaaaccaatttaagagaggcaaacacaatttagcgaatacagatgaatgaactacaagcattgccattgttcttcttcatttctacaatttagcttcacaaacattccaagagagacgaaacacgaatcaatgttcttctagtttatcagcaagatacgatactaaacgcagattcaatttcctaaggcaagttcaagcatttcgtataaaattgaaagaaactaagcataagcataaaattgagattagataaaaaagcagcaataacaatccaaaactgacttgtcgttgttctaaacacaacataagaagaagaaactaaaatctcaaaaggcaaaggaaacaaacacaccatcatttncaaattcttcagttc

SEQ ID NO: 31286 - DNA, 1171 bp, Arabidopsis thaliana landsberg
gctagcatggttacagttctttagcttttgggaaccggttgtggtactagttcttaacctcaatcaaacagatgacatctagtcatatttttctccaaaacactaaccaaccttcttgttgcttctaaaagctttggtagtgtagtcgaagtccgtaggagtctttggctttgcatcttctaaatatggagcactactttagcttttgggaatcagttgcggttctagttcttatactcaatcatatattacatctagtcatattcgactccaaaacactaaccaagcttcttcttgcttcttaaagctttgatggtgtagtcgaagtccgtatgaatctttggctttgtatcttctatcaaggaaacaatattgatagagaggcaaaagctatgtaacaaacaagaacttgtattctccaggagaagactaatcaagcttggttcttactttcttgatgaagacgtatcgagaaagcaatgaattcaaaagacgaggatcctctcctcagggcttagaaagctctttaggtgtaatctcaattttattaatcaaaaggtgattacaacgttgataaaaggaaactacttatagggtttaaaagataaaagcaaatcatgaaagcaaatcgaatcgcagattcgttattatcctagtaacaaaaagaaagaagaaaactaaaagattatcctagagggttctcggataagtaagcccatgagaagtatacgagaagcccacaaacgtctaaaatgcgctgcatcaggtccccttgggtgggaaaagattcgaccgcgaatcaagcacttcattgtcaccacggaacggagagagatacttcacgttaaacacatcagacgtacgcaaatggggagggagtttgacccgataggcgttttcattgatgcgtttcaggacttctagcgggtctattttacgagacttgagcttattatattcatgaggaggaaaacgttcccgggtaagcactacccacacaagatcgcccgtgttaaaaatcaactcgcgacgcttgtgatcagcgcttctttgtacttagctgctgcaacttcaagatttccttgagcatccttgtgaacttgctacaactcgtcgacaaaatccaaagcgttgccatgcatgcgtgttttgtcaggaagagttgttaagt

SEQ ID NO: 31287 - DNA, 3071 bp, Arabidopsis thaliana landsberg
atataaaacagttgtgatgccgaagaaataaaaataatcactactgttcatacgggccgggccggcccatctgcaccaaaaaatgttagataaccttataagtaataactctatgcatgggctaattatgtatgttgtacttgcctaaaaacgagagagagattaaaaaaaaggttaatattcttgatgtctaaaggccaagtccccaagatcctgtttttgatggttaatatgatgatacgaacgaactatgagtttagcgatgaaagcgagagttccttttgaaaaggtcagaaatcttgaccaatatttaatgttctcatgagttacaacacctttgacatttctgtattcttttatcatttccgtttaatcttcataacttgcaaacttcaaataccaataattcgttgaccaaaaactgattccaatagtttgagaaaatatctcccatatatttctccgaaaatccgatgcatacttttcagaaatcgtaactctttaatgtaaaaaatttaactctgaatcgaaggggatgttattggattgtgactttgaaagagttttaatgactttaaaaaaatatagaaaatagataaaatgaaagatattaaatgacttttagagagttttgtataatctctatgattacttttccaaaatcttgtaaagtctttctaacttaaaaagatttgaaatgattacttgagattttatctatttgaaatattatttctttcatattttataaaactgtctcgcagaaaggttctacataggttttgtatatgtcaaaagtgaactactctcccaaaatattttactgtgcttttgttaaagtttagaggtacttaagttctcatataaaaaatttacacatagttcataattatatagaaagattagagagagggtttaaaagttacgttcatgatatttcttgaaaagattagagagatgtcataacgttacatagattggcttttatttaatgggtcagaagatgatccatgtcaattctaaaaatcattcacaatctctctattcttatgatactttgtatgatttcattctgcgaagaaaaatgtataaaatcataaaccaataacacaataatttaaatcattaacaatcctagatacttttgttttaattgaataacacaaaaatttcaatgactttactaaagtataaattcaataactccaaatttataaagattttagattacattttacaaatcagaaactaataacattaaattttaataatcttaaacaatcttaattgaataacaaaagattcttcttaatattataaatcattaaaaaaatccatataaatcaaaaaccaataacatccataagtttgaacgtgactaagaccaatagatgtttccattggaatcattcaccatttttcttcttaattaaaaactagaaaattgacaaaagacacgcaaacgattccaacgacctctcacccgccaacacaaaacgcaaacgcagacctcgatttatatatcttatatttaaaaccatcttctaaacggctttacctgttttttagctttaatctctcttctctctctcaaattctctcctaaaatcctaaatattaccttctccatttgtttcttttcttcttttttgggtggctacctataatccgaaaaccaccatgaggttttgtgttttcgggtttttatcgcttttcttgattgtttctcctgcctctgcctggttcttccctaactccaccgcggtaccaccgtctctacgtaacactacacgtgttttctgggacgctttctccaatttcaccggttgtcaccacggccaaaacgttgatggtctctaccgtatcaaaaaatacttccaacgttttggttacatccctgaaacgttttcgggaaatttcaccgatgattttgatgatatcctcaaagccgctgtcgaattgtatcagacgaatttcaatcttaacgttaccggtgagcttgatgcgcttaccattcaacacatcgtgatcccgcgttgcggtaatcctgacgtggtcaacggtacttcgttgatgcatggcgggagaagaaagaccttcgaggtcaacttctcccgcacgcatttgcacgcggttaaacgctacacgttattcccaggcgagccacggtggccgagaaaccgccgtgacttgacctacgcgttcgacccgaaaaacccgttgacggaagaggtcaagagcgtgttctcacgcgcttttggtcgttggtctgacgtcaccgcgttaaacttcactctttccgagtctttctcgacgtctgacatcacaatcggattctacaccggcgaccatggtgacggagagcctttcgacggcgttttgggaacattagctcacgctttctctcctcccagcgggaaattccacctagacgcagatgagaactgggtggtctccggagacctagacagtttcctctccgtaactgctgcggttgatcttgaatcagtggcggttcacgagatcggtcatcttctaggtttaggacattcttcagttgaggaatccatcatgtatccaacgatcacgacagggaaacgtaaggttgacttaaccaatgatgacgtggaaggaatccaatacttgtacggtgcaaaccctaacttgaacggcacaacatctccaccgtcgaccactaaacaccagcgagacactggtggcttcagtgccgcctggagaatcgacggttcatcaagatcgacaattgttagtctcttgttgtcaaccgtcggattggtcttgtggttcttaccgtagataaagttttttttttcttacttcaattcttttagtttgatttacctcatatcttattctttttttattaaaggatggggatatatatacacacatatttagacattggttcctttctacagtttttgatttcacatatactacttgtatataaattactttatgtcctatacctatgtttgatttcgtgttatacattttcttagctttctttacccaaaacattatagcgcgctcttgtgtgtgaacccttg

SEQ ID NO: 31288 - DNA, 1954 bp, Arabidopsis thaliana landsberg
atatataaatatatatatatatatatatatatatatatcacacagccaaaatctaaggatgtgtattatttcatggatcataaaacctaagctatgttcttgctttggccagggatgatttgtaatgttactccttcgcattcttgtatatctaccactaaagactaaaaggttggttctagatgttgtaagcaactaccgacatatgattgaaacagccacgatcacaagcctagagctacgcaaaacatctaagttcaattatatatgtgatcaaagatagaaacttgacatcagcacagaccacaccgtattctaaacaggagaaagaacaaaagacaatagaacagaaaaaacgcaacaactataaagatagcgaccagtgttatgaaataagatagggtcacttacactctcagagaacatgtcttgcaatgcagtagcaaggttcttatcttcactttcatcatccaaagaattgagaggtaaagactcagggatgggttcgctgatcgccttgtctttggattcttcaatcacagtttggtgtatataaccactatcatcaccatcagactcttgagcatcatcagatccaacacaagagatatgctttacgccagtagaacatataatgggactggaagcagagctgctctctgcatctttgaaatccaacccaccacagacagagctcatatccaaaagtaactgcaacaaacacaaattcaaataccattaacaagagaactctagctcaaacaacactttagccaaaaaatcatatagccaaattacctcgttcacacaaaacgtcaaaacaaaaaccgaaagatcgatcaataacaagcttgttttcttcgattagcttactccgagctaggaaatgcgtgaaaacaaaccaaaccgaagagaaaattgaaaagatctgaagagatcggagaaacaaaaaaacagagaaattgttgtttaactaagattaccacgccaatcactcttttgaagaggtttcaaacgattagaacttaaaccagaatgataaaaagtcaacgccggaaccaaagaaagaaggagtatctcagaggacacccgcattttctctatcctcttggaaaccctagaagaagaaatccaagagctacccaaaaaaaaaacgaattcaaatccgacgaatcgaagagacagatctcagagctatctaaaaatcagtaaagaacgatgcttgggacaatcagaggcgacaaacactatagccgaatcatggtaacaagaatccgaacaaccatatccaaaacgaaatcacacgaaacccagccaagatgttaaaaagctaatctgagagaagacggatggatcaaacgagttttttttatattaagatagaaatgcaaagaaaggtcaacaagggagacgaagacgtggccaccttactcggagcgaatcagaaatatacacgtgtctcgtgtttaatactcttattttatgtgtctgaatttttcccgctagagcccgatcacgagggaaaaaatgggtcacgaatgataaataggcccagttgtaacgtttgttcactgaaaagtgaaaaccttaaacatcaatcatcaacatcgtcatcactaaacacagttagaaatcaccatgaagtgattaaatcaagggattaagataaaaccaaatggatcagtatgattttgttaaagtgaaacattctttaacataattactcaagtatatgatttaccattgtgcccacaaatctctgcaaaatataactagtgttgctccccaccaaattagtggaatcgtgaagaaccaaaagagttatggatagaaaaaaaggccaaaaaaccctcagaaacggaagaagatatcgatcaccgatcaaataattttttgttcttatgaagaaaacgattttcattaacaaaggaaacttttcattcaaagatttacc

SEQ ID NO: 31289 - DNA, 975 bp, Arabidopsis thaliana landsberg
  unsure (1)..(975): unsure at all n locations
cactcctgaaagtaagttcaaggccaattgtagactgtataaagtaactcattaatgtaagattatgattcttaagtaattcacaaggtaacaagatttttcttagtatttaaacagctaattaactagatcacaaggtaacaagacttttcttagtacttaaacagctaattaaggccaatggaaacaggattatgattctaagatgcaatcaatccggaaaaatcatcagttcatgggtggactgtgtgagctgcaatgctctgttttctctaatgctatcaaccttctttcatagggtttgccgttttatgctcacaacagaaggcaatgcaccaagtatctggaactgattggaccatatggtctctttgtgtggacttagatttgatctctggagaatcaggtgctgcgtcgaaattcccaatctcctacctggaacagaaagaatataatgttaagcgttgatagcttgattcacataagcttctaacgtttacgttctatggctaaggcaatctacattctaaccagaatcaattctaacatcactctgcaaactcagataaatccatctcttaagattgtccccaaagaatcgcaacgactaaagaacagagcaatatatcttctacagcaatccacacaacacaccaacaaccaaatcaacaatagaaattaaggaaagtggtctctagtgtcagccaaatacttatgctcgttaatgggaagaccaataagtatccctaatcgtaagtatcctacgacctaagttgcaggttttgtaattcttcttctacccttaaacttcccatactaaatccaacaaccaaggatgttttcaactaaatttacagagcttaacagcttcaagctcataatctccatctccatctgttatttaggagatagtaccttatgaagatgatgaaggagctaagaaagtgccaaaaactggnttgatcttcatgagac

SEQ ID NO: 31290 - DNA, 540 bp, Arabidopsis thaliana landsberg
catccaagagcgatcaggtctaaccatgctctgccccagatattatccaagtgttaattaggagtgtccgtccatcatgtattatcgcatctttcttgacaagcttctctactataggcttctctagaagatcattgactaaactgattgtatagctttcagaaagagactcagatttggatgtgacaataacaccatggttggaggcaatatcgagagtgttaggcacagtaactatggaagctgcctctttaggggagtgattttaaaagcatcaaaacaaggaaggacgtctccaataaataatccaccttcacaaatgaaactcaaaaatcagcatccacacatccttgtctgttttacatagcttaaaaaaggaaatcaccgttgtctttgaaagcttatcttgcacatgaagcgatcgcaagaatatgatcaaaaaggagaggaacaagactatcagggccatgagctgcaagataaggaagtgggaggaatactttccatcgtatgaataatctaacctgtcaacacaatgtg

SEQ ID NO: 31291 - DNA, 2155 bp, Arabidopsis thaliana landsberg
  unsure (1)..(2155): unsure at all n locations
aaaaacttctcctgatacatgtctcttttctttctgtgcagtattcgataccaatgcctaaaggaggaagagaggcaatcaccaagaatctgattctacgggaagatcaactccctcaaaagcttctccaccctaggaccaagaagaaagcaagcaaaccggttagtctcttcgtgtcttctatctcaaactcaaatctgtaactttgattgaaatcttaaggtaaattatgctgttgtttccagggtgatgagtacttcgtatcagatgatgtgttcttgaaccatcatagtgatagaaaggcgccattgcagcctcctgtgagaaaagctatgtcggttttcagccagaaaagaaaccctaatgacaaccattactctcgttctatgcactgatctttgtttctcctacacaacaaacatctcctgtacttcagatgccaacgattttgtctctattttttacttttactttttctttctgattgttgtttgaagtccaaaactagtttgaaaaggtgagagtttataactttttattcggttcacagatgtattcctctagtttcaagctacctgtcattttatcttttttggctcaacacaatttcattcgtcaagaacttggtatacaagattacacctccagtttattggtattaacaatagaccgaccgtaacaacctacctgataacttatccaaggcatggtcggtactatcaaaaccgaatgcaaaattgaagcaaaaatgttcgaacaagtgtatgtcaatgtcataactacaaagccaattttatttactcctttcatcgtcgtcttcgttagaaggcgaggccagcgctagctcggcccacgccaaagaagacgatttgaattctgcagaaatggacacagtgattctactctctagtgtctcacaaagcgcttgaatcgaacaagaaagcttatccttgtctttttcattctggtccaagttcagacattggcttgccacttcacatactgcctcaagttctttttgcttgaaatgcttgagctcaggatccaccaagctagccatcacatctggtgcaccaaggtttttctcccttacctgcaatatttaggagtttgaatcagatcctcagcatcaaacgcatgaaaacacgtaaaccgctaagagagagagagagagacttattataagtactcagctttaagcttatagagaaaagctattcttacccattcaaccaagcaacctctgtcttggcaataagaaggtcttccgcttacaatttccagcaaaagtatgccaaatgagtagatattcccttgtaaatccatatctcggtgttccattgcattgggaagtacacatattgctccttcattacagatattcttcaggttcttctctaatctcacctgaataatcttccagcattcgaaatcaaccagctgcatagaaataagaggatcaaaataagagtatagagatagtagcaaagcttagctaaccgcatagaaaaaagaggatcaaatttactttgggagtaaaatcttcagtgagatacactgcagttgagctcaactcagagactgtaaatggaggatggagttcagtatgaaggtacttgagaccacgtgcgatgcctataacaattttcatgcgttttgcccacgatactaaactcccgtccgcatctgcatcaaatttttatcatcatttggtatcattatcagtcctaccaaagaaagagctctgaagaagtttgattatatattacagtggagatggtcgtatagtgtcccgtttgatgcatactcaaacacaagcattcttgtgaacggtgtactctctttacagtatcccagtaatttccccgcattctcatggtttaatctagccaaagccgcaacctgaaacaatgaatattaataaaatcaagtttaatactgatgttttcttgcaagtgacttggtgataaacaaccataagaagaagaacctctctctggaaattaagctcaagatatccagtccaattttcttctttaacgcagagagagataaccgcgatctcagtcccgccttngatcgttcctttgtaaatctgactatctgcactagaatcaatgatgttgctgaagtcttcacatgctacttctagctc

SEQ ID NO: 31292 - DNA, 1720 bp, Arabidopsis thaliana landsberg
gagttttgctttgcattaaacggataattgatttatataacatgcttctcattctcttcatgcaattcttgataagtcttataaggagtcagaaaagttaatattggttgattgagattaacactacaagagtgcatcaaagttaataacaaaaatctcagtgataccaacatgatctgcatataaatactggtcaactttttatttggataattttctgacatggaaactagaaaaaacgttaagattgtctaagaaggagatttgcagctgctgcagttttcttctgaagctctgcagcatctccacctacaaatttatccatttgcctcccatctttaaggaacactactgttggagttgcatccacgttccattcatgactaaactcctgtatcaaacatattttaacacccaaatcgctcagtttcgagatctctcatcttcacaaagaatcattctaagtaacagaagttgattggttacttacagcgagctcttcgacgtctatagtgacaaatatcattgaggtgtatgtggatgcaagctcctggtatattggtaatattgttttactaggtaaacaccacgaagccttgaaattcactacaagctgttccatgttacaaagaatcagatcatgtcgagctatctgcagaggaagaatgcaaaacaacatagaaaggcaaatcataggaggaagagcttacaattttgccatgactattagcttctgtgatcttctcctcccacttctccattctacttaccggatggaccttcccttttataaagtaggaccctttctggctcctagcttgagtcttgttccttctgttgcaacagcagatacatgaacacacctgtttcagaacatgagattttctatcaccattttcatctgaaactgcacaatgcttatgaacattcaacgggtttaataaaaatttgctagttagattcgacatgttctccatgaaactcgtaaattttaaggtaaaggtcttacctttttacaacaagaaattcttgtacaatgattccccattaactttctatactagcttggatcattagctctttgaatcaacagcacaaacaaaaaaccatttttctcgatattaacaattctaaacagataaggagaaatttacagatagaattataaggatctcaaataaaggaccgagctatttatggtttgatgaaagaagaaggttaaaaacggattacttctagatcttgccaacttaagattgttcatgttcttgcatgaataagagataaatccgtgatcaaagatcaaaagtttctgtgaaaagaatcaaaaacatcaacaagaaggatccagagaacgttcaatttaagcaacaaaacattatatttgtcttgggttacatcatacatgcgatgggaaattggttcgattaaccataactaattttgtagaccagaaactggttgaagacgacatagaaaatgacgctgtgtctattttgggcgggctatggtgggcctttattaagcttacaccagtttatactttggaagacaaaagttctaaaccaaacggttcttcacagcacaggctgctctaacaaggagatacatcttgtatgaagaagaatcagtaatcacaatagcatcctctgataaacatagccagggaaatttatttctcgaaagttagcaaacacataaaaaaactgggatgtggaaa

SEQ ID NO: 31293 - DNA, 3031 bp, Arabidopsis thaliana landsberg
  unsure (1)..(3031): unsure at all n locations
ttctaggtatcttgatagcatctcatacgatgtactatcaacatccgatgatgtttctcaacacgctcgctgtatttatatggtggttgcaatttgcaaagttcccgcacatgcacaaggttcgcatctttggaatcaatgcagaacaatgaaattacgctaatgagatttggtatatgtctaaactgctcttcttgaaatggtcaatatcacaagttggctaaaagaacacaagccagttttgttatcttcttttgcccaaaaaacagatcatcttcttaagtttaaacccgaggttaagttttttttctttctaaatcctataatataatatatatacagtcgacattgtcagttttggattgttacttactgttgttatgtgaaaagacagaaaacgaaaaagaaggatgatttgttgtgtgtggtgtcattgctgaccaagtgtgccatgtttgatgtgactctttttccttgactaaacaaaacagcactccaatcggtcttttcttttatgtcagcagaatttttgtactttgtaatatcccactgaaaatgaatctatattgtgtaaatatcgagcaaacaagtgaattcaaactgactagtattgttgattacatttgacactgttctggttcggaattaataaatttgtcctagttggttagttgtgaattatataaatgtgaaaacaaaaggtatgaatcaaatgagaagtgttgttggagagtcaattgcaacagcaactaaatctacgagctagattgccatttgcccacagagactcaaaaggtaacgatgacttttggaatgcgactacaaacaaaacgggctttaaattgtccactattagttcacatgttcatatctctctctttttataacacctaagataaaatggttataagctgaattctttaactaaaccaaactcatcatctgccactttaccatcataaccctctctctctctcttcatatgcttagcacccaacaaacatgtgttgtagtattgatcttctgtgcgagagagttgttggagcaatgatgatggtacgaagtccaagaggaatgttgggggtaggtccatttttctatgagtaaaattttattttatacttttgcatttgaatgaaaaagtgccttaagaaactgactgtgttttgtggtctctctttctcttcaaacccgcttcgactcaatcatcctttcccctttcaagtgttcctaaacaaacaaagaaccaaaacgatttcataacgagagtcttttctcttgatattcttcactacaagggttttagtagaatttttgtaagtataaataaagtgtacacatgtgattaatatcggaattaaatgggtttcgggtttagcgaaagtatacactagcatattgagatgacaggctttatgtctcaaagaggacaatgaccatttctctctacacctctgaatttggtacaccggcctttacactaactaaaattgtttcgtttgtgacactaatatatacaccataaatatatcaagattaatggaaagatgtcataaagttaggtaactaacaactgagattgatttaaaagagagtctaaatacatacagtatccatccccaacccaacaaagttaataataatttttagaaaaggagaaggaaaccaaaggaaaaggactaaaatagtaagcacccagattatatagttaaccctctcatctttttaaaacatgggtgaaaaatgtaatcatttcttctaaaaactctcatgggatggggtccatgactaaaattattgccatgaaccaccagatgcagcagcagaagcaccagcacttaacatgccactccaaaacccaacagattggtcagcttctccttcttctttctcatgttcatgatcactatgctcatcattattctctttcagattgccattcccaccactattggtgcttgatgatgaaactggaagtttgaggaggctctcaaatggcagcaacggccttccattattagtgccactggacccctcttcttgacgtagaggatccccaccatcaagagagaatcccaaagctggtctcatgaactctnnnnnnnnnnnnnnnnnnnnnnnnaacccggatgctgtgtagaccgatgaatcatgaacatttggataagacatgaaagcagggcgtgagttagaggaagcagaggaactagagatccctaaaagctccaaagccgaggaagttgagaccagtgggttgttcttcatactgctgctgggtactacttgcagaaactctgggatactactgtgatgatggtgaccgatcccaaacccttgagaaaacgccaagttgagatctttaacctcgtgggcgttcccaaacccttgagaaaacgtcaagtcttgaactttagtagcggctgcttcaccaatcttagggttaagatgaggaagaggaggcgtaggcgtgttgttgttggcaaaaagaggtttctttgaagaagaagacgaagagggtgaagaggaagaggaattggaagaagatctcttgttctttcttgagcttcctcccacaggaacattcctaagagatccaccttcggtccaatacctcctgcattttctacaaaagtgacgtggctggttaacgttgtagttgttgtagtaacaaaatttggtgtttaaggagttgcatcttggacatggaagaatcttgtctggtttcttcagttcagttgttttctcttcttccgatgtaattgttgtgatctcgctgtgttggtcatcactgttctcagatgtttcttttgactcgttgttaagattagatgacagcttaagacttgtattgtcagtaacagattggttattcatctgaaaaaaattgaaggaacttggattaggattaacatcatgaactagtttcaaactgatacaaggactagagaaaatattaaatctttagcatttcttaacaaataaaggtaagaccatgaaacataccatgtgtggtcgaagtatagagaaaaag

SEQ ID NO: 31294 - DNA, 3897 bp, Arabidopsis thaliana landsberg
aaatccattctagagattatgattttcttttgttgacttgctacctctttgttcttttaagggagcctccagtgacgagtcatcccaaacctcagcacttccattggatgcatcttcaacatcttcttccattgatagccgaatatactctctatgtgcaaaacggtcccagtctgtcaatgtcgggttctcgcgctcctgttttcgtttgacatgttgaaatgttataagaggcccattgtgtcaagaaaacagcaaggttgaatatcaaacgtggagtagtacctgacgaatgaggaacggatcccgggtttcaaatgccataaatttgtttagattaaaaaggatgttgaagacgtttccagagagctttgagcctttcagttcatgcagcgttatatggctttcgatctgtggaaggaaataaaaaacaatcaaacacatgacacagtcgcgagagtcagaaagaaaaactgggaacccaaactacttctgggactgtcatatatcttccttaatatagaaagaaaaaaacaagagacatattgttgaacctcaggtccgatcatatcaatcatctgacataagatatcctcgaaaagaacagcctcttgcgccatgcactccattctatgcaactgctcttcataaaagaattgcatctcatttcgcgtaataatcccatttgcatccaagtctatgcacttaaacctagtccaacgtatacttgtgtcagataaaaagacttaaaatggtatctgtctgcaactttcggacccttctatcacaacttaccaatattctaggctaggcactgacgatttatcttcttccgcaagaatgaaatagacaaagtcctcataccccatcttcccttcaactttgctagtgaacttcctagcaacctgagaagaaaccaatgcatcttaagagcaataataactttgaacgaggaaagaactcttaaaatagaagcaatataaataaaatcttcaagtagtaggcattaaagagcaaggttttttagacagaacctgggagaatattctgtcgacaatccggtaggtaagagcatggtttccatatcgcataagattttctttgtcaatcaggaaatcgtgatccgtatccagctcccagaacttgcagtatatgacatagaaatgctcatacgagaagtatctaattgccaaagtgaatagaaaagtgatgttaaatgagcaaaaacaatactataaatacaacaatagcacgcaaatatttttgtcagtacctcaacactttgttaatatcttcttcttcatcagcatgtagcatagcatcaattaagtttccccgtttaagctccctaaatgtaattcgaccattgccagatctatttatgtaataaaatattcggtaggtgacagtttcagctgtttcagcaaaatacaaattgtatcagacagaaaagcatccttaaaaatttagctttgataccggtagcagcaaataccaaagaatatggactccagatatctagaaagcaatcaaagtgttctcgtgaattcattactaactgacgcatgattcataaacaagctccagaatttattttttctaatattgattatatctgcaggattcatagactgaagatgattcattccgtgcttgaaagctttatggatttgcaagttataagatgatgtctaacacaacaaaacaaagaaaccgtatcttataaacattttaaaatccatacagagtaatgccacatttattactgtatctcgatgcatcaattatcaaaattattttctttcactagaaatattattgatgtggtaaccattcgacagatttagataagtacatggcaaacttattcactcattcttctcaactagggctgtagctaccaatatacttcgaagaataaaatgtacaatcaaactcaattactgaacaccattactcaagcaatatcaagaagaaatactattgatgtggtaaccattcgacagatttagataagtacatcataccgaaaatggcaaacttattcactcattcttctcaactagggctgtagctaaccatatacttcgaagaataaaatgtacaaccaaactcaattactaaacaccattactcaagcaataccaagcggaaaaagaatacattagataaattaggaaatgtaaatgaagttgagacctaaccatatctttcttggaattcaggtgtggattgcaggaactctaggccaggatgcgtcgccaacagttctttaagtagtggtttgaaatcatcctgccatgaaaaaaagaaaagaaaagaatagaatctggagtataaactcgctttcatgactgactgaatatgcaaatcaaaagaaaattaccttaacaatgaaactctgatctttctgctttaggatcttgaagatttgggtcgttgtatccattatcaacatgttcccgtttacccaaaaatcaataaatgcatctctgtagaaacaaacacgaaaaactgttatactgggtggtgtttcagtaaactatgcagacatgaagaggaagcaccatacaaaaaaaaaagcatagaagcagcagcacacacctagtaacaaaacctgtattgttgagatcgatcttccggaaaagggaagtggagaagaaagatgggagcttgcagatttctctggtgactaacttgaattctgagtattgattgaaaatggagaaaaaagttaataaacagttaaaatataaatagtagaaaacaaatgactgacttctaaccttgtatctgcaagccatccatgtgaccataaaagaagtgattgattctaaacatacattgctctttaatctcgcttggtggagggcgaccattttggaaataaaactagaatcatttcaagttaagaaatcagtgagttaactccattccattactatatatatataaagaaggaagaaaaagaggaaaagaaacctgaggtataggctctttaacaggctcgttgactactttgagagtagaacctaagttagaaggggctctctgtttggttgtacggggtgaaccacaactccttggtgaaagcggaggagcacttcccgcaggaaacatagatggtatagtggcagaattagaacccgatgcacttccagtaacattgataggagctccagctacagcatccttaagcaatgatccaacctagaaaaccgattaggaaacgagaaaaagattagactagagtaacctaagcatcaatgtaacactcaccaacactatcaaagaaagatacgaactttacaccacagagttattaagcaaccgaatctaagtaaccacctaaggcatcattataatactcactaacacaatcagagaaatattcgaactttacaccattctcagtaagctaagcatcattgtaataactaacactatcaaagatcccaactttacaccaatccttaacagaaagcagagagtaattaagcaaccaaatctcagtaacaacctaaggcatcattgtaatactcactaacactatcaaagaaagattcaaactttacaccaatcctcaacacaacagagtaagtaagcgaccgaagtatcattgtgacattacgaaagaaagattcgaattaacagagagtaagctaagaagcatgagtgtaagcatagtgaaaaagcaaaaacctgtcgctgagcttcgggaagagaaagccactggtcgaagagcttctgagtgaatccaggtttagaattgagaacaaaggaagacatttcctgaagctgcaacaaatctgcatccaaacaagccatatctccgggaataaccgtatccaccatatttaatcaatcgcatcaaagtcgagaagatgagagaatgag

SEQ ID NO: 31295 - DNA, 3511 bp, Arabidopsis thaliana landsberg
atgatcttcaaggcatacacagttccattatcctttttcttcttcctaacaacctgattcaattacacatgagcagaagccagctaaagttaacttagagcaatgaaaaagttttccatttcccataaaaaatctccaagatatgaattgattcatgattcaaaccaaattgcagaaaagatgagatttttacaggaaaaaaaatgtgaaaagaatagaaaaaatgaaaccttagaataagagccaacgccatagatcttgccgagctcgaaatcatggtaagtgaaattctcctgaggagccttaaaggcgaagcttttgcttctggaaatagtttcaccatttgaagatgaattcccttgaagagtaagctttgaatcaaattccttgtccattgtcaacatctccaaacttgttctacatttcgacgagacccatcagaagaaaacacagaacgacccaaattggatcttgaagcttatgatgttatttttcaggtgctgctgtgagtttccaatttcgaagaagaaagacgagaaatttcaaaaggatgaaaagggaaggagagaaattcgaagaaggggaggtgaagaagaagaatcggaggaatgaatgtgacactttcttcatcatttcttcttcttcgttaattaaaaataaaattagctgtaagaaaataataataataataataatggagattttgagtaggccttggaaacactctctattgggccataaaattagataaaatgttttcgattcgaacccaagcctatcgacaaaaatctatagctcgaaccttgaacttgatccgttgttcgccagccagcctatatttatttgtcctaatttttatttgcacctccggtccaatggggaagtggtccgacgcatggaagccttggttaactaagagggctttgattatctcacttgtacatgaacctgttgaagaatgaatgtttctcagctttttattttacgatgcttctgtattatccggttcccgtcgaacttgctgttccttgtgttataaacttctttttcttggtttagtttataatcatggatatatcatttaaattgtatatacagaggaaacaagtatacaattacacaggagaacaaaaaaaagtttaacctaattacacagaagatgagggccatcaaatgtagtatcataacttttttcttacaaaaaatctgctatgctcaatttattattgtcaatggagcaactaactagtgaacaaaaaatgcagtttagttttaaagttatggagtcatatagttgttatttaagttgggttctttttgaaatacatatgtggaatgttctgaaaagaaattaaatctacatctacggtgagaattatttaagtagatatttcaagtaaaagaatttgttgtcttcaattgaagtactgcaactttttgcttaattgtttattttgctgatttgctatttcatattgaatagaattagaaaatataacatagcctcattacatagttcgatgttctgtcttcctgtctaaaaacaaaacttcaatatcgtaagttcgtaacaattcccatactacaaaattgccaaaagtgaggagaaagataatcaaaacgctcaagcctcaaggtggaaaacccattcagtttttcctggcaaacctttttaaactcgttggtagctcagcagcagcatcttctacgattcttctcttcttaatcgcggcattgtgctcttgctccgggaatgttcgctttgcattctccaccatctctttcttcttcttagtccgcttgctcggcttattccttcctttcgtcttgttcttcagctcagtgctctttgctgcttctatggccacctccttctcagcttctatctctcctcttgatggcttgtctttcctcctagagggtctcatcgcaccaatctttgaagggtccagcatgattgtctcaggtggaagtttatcaagaagcgaatggacttccttctcccgtctctgtttcgatgtttcaaatggattagccacccaagaatcgaaattgggttctccagaccctggaattagaatgctagaccaacccatcgagtgaccaattccaataacatcctcatatggtctgaacataaccttctcgatttgataacctttcaccatcgagtggttcatgtatctagtgtagttatgtgaagaaccaccactcgaatctcctaaaatctgaacaaacgatccagttccagctgctagcaaacctttctgactgaaactcagcgtttttgcatgaaaactgtgaatagtctgaacttcctcgaatttacgtaaatcccagatcttgattttacgctctttaccggatgtagccatgagatgaccatttggatgaaatgcgacagatgacactggcccagggtgacactgcatctggacaagaggtgcttggctagtgggtttccacattgtgacagttccaccggaatgtcccaagccaacaacactattgtaaggattcacttccattacatctgttcggcctttacctgttcggatactagcgaccatgcctccatgggttacatcttgataatgtagctgcccagacatgtttactgatgcaagcaggaaatggttctttaggaaccgaagtctggccactggaccacgttcctgggatagacaaagtttagagtcaataaccaagaacactaggcatatgtttcttttgttcaaccgaaatgtataatctcaccttcaaacaatgcagctcagttccatctctcccataaatataagcatacctgccaaaattcgacaagataagatattagaccatgcacctccaaatcacaaggcccaaaaatgtttattgtattagcattgaaatacatactttttctgtgcagctgcaaagaattgatcattgtgcaggaatgcaacatcgcgtactgtttctcttacctgcagatatcatcaatttctgttgagaaccaaataaaattttacaaataacaagcactgataaaaattatgataaaatagaaaagcagacctgaatctctttaattaagctcatattcatcatgtctaaaagagcaaggtgacctttgcgaccaccagctaacatatgccgaccacttgcagtaaaatcaagtttgtacgggccaaaatctacatatgttcaccggtgtcagtaaaatgaattagaagcacaaactgcaatgaggatatttctcccacagactaaccaaacttaaaattttacatagataagatatgattgtctttcagaaaaagctattgagcatatatacctgggagcactatgtcatattggtttcttgaacttaatatatctacttcgttggcaatatctgtctgctttactcgccatgtcttctctagaccttcagtctccaagtaacctgcctcagcaggcaagagccactacacacacaaaaaaacacaaccacgtcaaaagacaataattaagaactcaaaacaag

SEQ ID NO: 31296 - DNA, 1227 bp, Arabidopsis thaliana landsberg
tttttacttacacatacttagtttgttttgctataaattttatcttaaataattactataaaaacatattaatctttaaaagatttatgtgaatctaaaaactctaattttgttatatatcataaatatgtaatattttcttttatttaatctcaacctcgtggtgtacgcgatattataaaaaagtggtgtacaaatagtagtgtatgtcgaaaatgaataatatagcggtgtacggagatgatgtaaaatatggtgtacataatattaacagtatatatgaaatgatgagataatgagtcataccatacatcacctcgtacaccgtatacaataccgtacaccttcacctattttgtacatcccatatacaaaaaatagaatcatttttgtcaagtgataatgtacaaaagaaagtttaaataatagtatacgagatttgtgtacataaaagtgtacaaatgttagtgtacactacgtaagaaagtactactttcatttaatggtatacactatcatggttaatttaatggtgtacatgatggtgtacaccatcatattaatataaatttatgaacaatcattactttaattaataaatatgagataaatagaaaaattttagaagatatgtataaaatgatttggtgtataagtgttagtgtataaaactatgttttattgctggtgtacgagaatgataattaaaaacatataaatcatcttgtctttggaagaagaaattatttttaaaaaaatatttttttttttaataaaattcaaaaagatgaatatgaaaaaaaaataactataatataataaaaatagttctaaatagttaaataatataaaaatttagactcatattttctcgtaaagtggtatttgacatatttttgtcttttagctttacaccttttagagtatttatagaaaatagattcgatttgagatttcacatcatcaattcacctaaccaaatccgactattaagtgcaatctgaaagtgactcaataaccatctcacaagcatatcactattataaagctaaagactttaccaatttcactattatcaaaccaatcaaagtacctacagcttttcgcatttttggaaaatcacaacactggagcaatatatgtcgcgaaagagaggatatttgaactgacccatgactccactagtgacagcgcgaacagcgcaattgttacaaacctcttgagctc

SEQ ID NO: 31297 - DNA, 821 bp, Arabidopsis thaliana landsberg
ctaaccaatgtagctattacatacatctgagagacatatccaagtaatatagagtatactcatcaacatactgcctggtctaatcacccaatgcatgtgagcgtacgtcagttgtactgtatatacagtacagtcttctcttgaattactgaccagtcttatagtttctaattgagcatagaatcatatgtattgatgtatcatatcagaattcaatgctttctaagaattttagaaaaacttcatgctgacatgaacctatgttattgtgcaggttgtggactttggtgagagtggccctgttagatgttcacgttgtaagggctacgtgaatcctttcatgaagttcattgaccaaggaaggaagttcatatgtaacttgtgtggtaattattactctttccgtatagaaaagccatataaaatgggttactgctatatcaagtgcaataatgagtaccaggttatgaaagaaactataactactatacgcgagaactaaagtctggtttactttactgatttgaaggaaatattatgtgaatttggaattcacctagaattaggactccctttgaattgctatcatcctaatcactttaggattttgatgatgtggaatggttttgtgatccattttctcatcaactctctttgcacaggatacactgatgagactcctcgtgactaccagtgtaatctagtccagatggtagacgtagggatgctgatgaaaggcctgagctgtgtaggggaactgttgactttgttgctacaaaagaatatatggttagtttgttaacgtttctgactatttacgc

SEQ ID NO: 31298 - DNA, 4147 bp, Arabidopsis thaliana landsberg
  unsure (1)..(4147): unsure at all n locations
gatggcaatgttaatcgggttttgtttattcaatttatttatttattcttcaaattcaagtgcaaacatcgctggtttgtgcaaatctttaaaaggagctgacttttcatacaactttttcgtgggaaatattccaaaatgtttagaaaaccttccaaggtattctatcatctatgctgtcttttggaactctctaagtcttcaatttagtcttagaaatgctcttttgtggtcactaggacgagctttcaagggaactgcatgcaaaacaaggatcttaagcatagatcttcttcccaatgcggtgtgtaagatagaataattttcactttatcgacatacatgttcaattagtcttggttttctgaatgttatccctgttgcagctaatgcacaactggtcaaaactcatggaagcccgagcgctgctcctaagcaccaatcagctcaaatggtggctaagcaccatagagcatcaaaacctaaatggcttctagctcttgagatagtcacagggtcaatggttggtttgctccttctggttgcacttttctctgcagttcaccgctggaacaatagatcaactctcatcattccttggaagaaatcttcaagtgaaaaggaaaagttcacagtctacgtaggttagaatctttcctaattctttaccttccaatgtagaatccatggagcaaagaactaaaaaaacgtggcatgtttttattttaactacagattctgaaatgctgaaggatgtttcgagattaacaagacaagagctcgaagtggcgtgtgaagactttagcaacatcattggtttatcagcagatagtcagatctataaaggaacgctgaaaggtgggtctgagattgcggtgatctctctttgtgtaaaggaagaagattggactggatatcttgagctctatttccagagagaggtagcttcctctcatgttatcatcatcaccaagccacttggattgaacaatctttaaacatatcctccttttttctgagattttaaatccatctcctcactgtttcaggttgcagatttggctagattaaaccacgagaacacagcgaaattacttggatattgcaaagagatctcaccatttacaagaatgcttgtttttgagtatgcatcaaacggaacactatatgagcaccttcactgtaaatagtctaacttacctcagagctttgttgcatcatcctgtattgttttagctagataaacattttatgtgaaatattttgatgcagacggggaagcggcgttagtatcgtgggcaagacggatgaagattgttataggcatcgcacgtggtctcaagtaccttcatatggaacttgatcctccgtttacaatctctgagctgagctcaaacgcaatttatctcacagaagattttactccgaaggtaaagtaaagtgagacctgcttgttatctgagcaatacaattagctaagctaagctttatgttcacattctttcttttttctgactttctctgatgcagctggttgatttcgaatgctggaagacaattcttgcaagatcagaaaagaatttgagaaatattagtagccagggttcgatatgtgtactcccaaacggaatggagagccgatatcttgatgtgtcgggtaatatctatgcattcgggattcttttgctggaaattgtcagtggaagacctccttattgcaaagacaaaggattcttaattgaatgggtaagacaaaaacaactcagtttctctaaacacttgaaactgagttacttcctcctcctcttttttcaccatttatatcaaaaactttgttactgttagcctagtaggaatggagtcttctgctcagggagagacgagttttcgtctggatgtggaagtcttgaccttgttcacatttttagttatatcgcacctcaaatgtggtttttgtggcaaaagttttgaatttgaaacgtatctattgcattttgcaggcaaaggagttccttgaagcaccagaggcaatgtcgggattggtggatccagagctgaaacattttaaccaagaagatcttgagacggtatgcgaagtggctagccaatgcttgaaccgggacccaaccaacaacaacaacaatcacaacaagccctcagtgcaagagctatgcgagacattggagagcagaatcagtctgtctatttcagcggagcttagatcatcttctttggcttgggccgagctggcgcttgactcgtgatgagaatgatgaaaggaaagaaaacgagtgttgaatgatgcaatgctaactaactaaaaaccaaactctcaactctgtaaatcaatcgactgattacaacatttgatattgtttttttttgctctgatcttgacgagtgtgtctgtgttcttgattagttttgagttttgggtggttcaaagtgtttgtaaatgaagagatgaacatagtttctgaaagattttctctattatttgaaaatctatgagaggttgaagaatgttaatgtagtgtgtttggatctaacctttaatcttatattatatagagcattgtatctattgtttgacatgattagtctcattggaaaaagcttcaaggcaatcaatttgagatcaatatcagtctcagacaagtgtttgcggaccaagaagaagaagaaacgtagttgaagttcataaatcataatgcatggatcaacttaataaaaggcccacatttaggcctcgtatcagtctaaatgggccacacaagtcaataggcccatttatcaatgctttgactgttttcaatcttcaattttggtatgacttcttcttacgaggttgagtgccataaaagattagacagacacgtaaaatagattccattttacctttagttaaaacagatatggattagccaagtttcgttagtatattgtcatattatttgattgaaacagaaaaaaacaagtaaagattacttaatcattcttaatcaggcctgttcttaattatcaaaaaaaaaaaagattacttcatcatgtcgtaataatatcagtaatcaatccttttttttttgtcatcactaatcaatccatttttttagcgaaccttaaagtcaaaggtgttgttactttggacgattaaatttgaattatataatttaaaagaaaattggaatttaatctgttgaggttgaaattctctcttttcatatatggcggttgaaatttaaaagtaaagtattgtttggtagggccctatagtttaaacatttacaaatcggcccacacatttttgtcattttagatgtcgtaaaccgctttccctcgtcttcgttccaatttaaaaagcaaaacaatttcaaaaagtctcatcatttcccataaacctaaaagctttttaaaaactcaaattcgatacgagaagaacaagattcgcgcacaagacgatcgannnnnnnnnnnnnnnnnnnnnnnnnnnnnnatgcataaggaaagagagattcagcgagcgttaccctctggtgcggaagcaccttaccaggtctcgcgacggcggcggaggatcatcgtcggagacggcggcttttgagatcgatgatccgatttccagggcggtttttcaagtgttaggaatgacttgctctgcttgcgctggatctgttgaaaaggctatcaagcgtctccctggaattcacgatgctgtcatcgatgctctgaataatcgtgctcagattctgttttaccctaactctgtcgatgtaagctatgatattctctcgaatctcggttgaattgtttctgagaagacttgatttgggatttaggttttctttttctgtgtaattgtggatttataggtggagacaattcgtgagactattgaggatgctggatttgaagcatcgttgatcgaaaatgaagcgaatgagaggtcgagacaagtttgtacaataagaattaatggtatgacgtgtacttcgtgttcttcaacaatcgaaagagttttgcaatcggttaatggtgtacaaagagcacatgtggctttacgcaattcaagaagttgagattcattatgatcaaagaaactcgagctatgatagactattggaggagataaaaagcggtgtttggctgt

SEQ ID NO: 31299 - DNA, 1933 bp, Arabidopsis thaliana landsberg
caccaatttcgattcttttcgtatttttctctgagattctatttttagggtttgttctgtgtcacaagtgccgtgtttgatctactgcttttattttgatatgcacgagatctgtctgtgttcatcttttttcatgtttgcatttgttccccgtggagtaatttaatttaagacctttcgagaaacttgtctgtttaaatttaagactattatgaatgaagtcaagtttgagttttgactagagtctctatctggtacctattgcttagccttgactttctgtgtggtttaaagaggaatttgtggcacattctgctgctgtcaattgtcttaagatcggaaggaagtcttctagggttctggtaacaggtggtgaagatcacaaggtcaatctttgggctattggtaagcccaatgccattctggtcagttctcggtctactgtttcattatgtgttggttataagttagtagagtgtttctatgggattcactctttctgagtatctcatttgtgcttgtttgctgtcagagcttgtatgggcactcaagtggaattgattcagtgacgtttgatgcttcggaggtcttagttgcagcaggagctgctagtggtactatcaaactctgggatctggaggaagcaaagggtcagttcagcagctctatgagcatctaaagtgactcttctcattctctggttagtcagccacagccggctcgtatatctactgagtatgttattttggttgcatctttgggtagttgtcagaactctcactggtcacaggtcaaactgcgtatccgtgaattttcacccttttggtgagttttttgcttctggttctctagacacaaatctcaagatatgggatataagaaagaagggctgcatccatacttacaagggtcacactagaggggtcaacgtactcagattcactccagatggtcgttggattgtatctggaggagaagataatgttgtcaaggtttgtagctgcctttttcctttcttagtatgtattggggaggaaaactagggagtcaacttaatagaattcaaaatttctattttttcgaggatactttgaagaacaataccacattttgtgaaataggcataaactggttctgagagatggtagtcaaagtcttgaacaaatatctcagagtaggctctttatgtgtggatgagaacatgtgattgtttactttaatgatacctctatgcggctgaccttactatcctagggggagaatttttcttagtgctaaaatacgctcatactacctgatcaacttggatactcgttattctttgtttcatctcagagtttgtactgtttaccgtaattgttttcctgaaaagcaagtaacctgcaaattttgctctctctcttaacgttggactgatatgtgggttgccttcaccaggtgtgggatttgactgctggaaaacttttgcatgagtttaagagtcatgaagggaaaattcagagtctagattttcatccccatgaatttctgctggcaacaggtctgtataactctaagtagggaaacttcgtaacattgaagctcctagtttttcgggtgacatagatttatcacaatgatatgaacccgatttattcttaaagttaagagtgctataagcaaaattacatgttgtaactaaccctgacatcattagatcactgtagcatcatcgtctctttgtaactcacaattttacagctttctcatatgttaagtgttaggatttgacaggagagagacttcagtagtggatatttcttcttatggcattgttttccttactgttcatttgaattatgtttgtttctgcctatggccttaggttcagctgataagactgtaaaattctgggaccttgaaacattcgagcttattggttctggtggaactg

SEQ ID NO: 31300 - DNA, 1122 bp, Arabidopsis thaliana landsberg
ccgcctgcaaataattggttcatttccatatcacaaccaagattacaacatgatttaaccaattctcatgcataatatatatacataccttcatgaaatcttcatggatcacgtagtcccgctctgctcggattgcaaacattccagcttccgtgcatatgttacgcagatcagcaccattgaaaccctttttttggaccaaagaaacatttggtgagaaactcacatattgaaagcaacattcactatctcagtaatgtaaggaaaaaactaacctctgcaagtttgacaatagcctcgtaatcgatttcaccatgtttggcgataccagctgcatggatcttaagaatatccattcttgactgctcgtttggcaaagggatctcaatctttctatctaaccttcccggacggagaagcgcaggatcaagcacatcaggcctgtttgtggccattatcattttcacctatacattttcccaaactagtatcaaacacatttattcacgctcatttacaattaatagcatcaaaaatttagtgtataaccaatttttggaagagatacaattcgatcaagatatccaacagatttcaagacaacgatttacaacatcacaccaaaatctcacgcatatgtacaccaggttaaatatagattataagttcagaattcagatttagagagcagtacctttccgaggttgtcaaacccatcaagctggttgagtaactccataagcgttctttgaatttcacgatcagcactagttccctcactaaaacgacgcccaccaatagcatcgatttcatccatgaatatgatacaaggctaatcggagggaaaagatttataataagtcaagaatgtgatacaagccttacagaaaataaaataggaaagcatatatgacctatagagagtaagacttacctgatgttcacgggcatagttaaacatctcccgaatcagcctagcactttctccaatgtacttgtctatgattgcactggatacaacctagcaagaggaaatatatttgattaaaacctcaggatatgtcataacgtaaagttccaaaacagcgtagtacaaaactaccccttcaagaagttagcatc

SEQ ID NO: 31301 - DNA, 1549 bp, Arabidopsis thaliana landsberg
caacagttgctaaaagttctacagaggctgagtacagagctctatctgaagcagcttcggaaattacctggctatgtaagcttctgaaagaactcgacattccacttcatcaaacaccggagttgtacggggataatctatcatcggtttacctcactgcaaatcctgcctttcacaagaagagcaagcacttcgcgaatcattaccactacgttcgggaacaggtagctctggggactctccgggtaactcacatctcgaatcaatttcaacttgcagatatcttcaccaagtctctgcctcatggtctgtttgcttctctccggttcaaacttggcgttgatgttccacccactccaagtttgagggggactattaatggagatacaaagagatcgatggagaatgagattgaaaggtcaacaaaaggtgaagataacctaatcgagtaagaggacaagagacttaggtcaaattcagacacaactctaaacggtgtagttccaccaatgttgtctaaagattcagataagcccaagtccaataacatggtctggaagtccaagacgaaacaaatgtccagtcagcctgttagtgtgcaacggtcatctacaaaagaacaagaagacaaatgtgtgaagcttgtggctaaggcagctcctaagaaaggcatctccagctgtcctagtcaagatcttatcttgactaatagattcaaatgtttagaggatttaacctaatccatatgctctatataaagaaacctaatgtaatcaagttaagatagtgagagataagaagagaaatgtttactcacgttcacctctagcagccgcagtgcttctactttcatggtatcagagcatcatggctaatcaatctatggacctctatacttatcctgcgttaaatatagcaaattgtgttactttgaaacttaatcagaaaaattacatatcttggaagtctcagtttgagtccttcttgtgtggtcagaacctacttggattcgtaaatggtgccattccagctcctactcctgtcttgcaagttccccaagttggaggttctgttatagcggttccaaatccagactacaatgagtggttcagggcagatcagattgtgcgagcatgacaccttggttccttatctgaagatatgcttgttgaagtcacatgcaccacaacatctatggagttatgggtcgcgcttgctaaacatttcaacaaggtatcatcgaccagactctttgaactgcaaagcaaaattcagacatcagaaatgctagatacacctatggatgtgtatttaagagatgttaagaatatctgtgagcaattagcatccataggaagtcctgtgtcagacaaaatgaagatctttgctgttctgaaaggcttaggcagagagtacgaacctattaaagtctctatagaaggaatgatagatctttctcctggtcctacctttgaagaagtttcctctaggcttaagagctttgctgataggcttgcaagctacaacactggtcttgaagtttcaccac

SEQ ID NO: 31302 - DNA, 2139 bp, Arabidopsis thaliana landsberg
tttgtcgtgattgtgctaattatctctttgacggaataagttaacctctttataataagatatacagtatattttaaataaaaactcttgtttatactcattttgtggtcgatagaagagttttgtcaattttaaatgcccatttatccttcttcttcttcttttttttttcttttttttttcgtcggcaacttgtctcaagtttatctttcttcaatataatttagcagctaaattgtaaaaagtaaaaacagtttgaccaaacaaaaattaattttatttcctatataatcagattatttagcagctggaattgcaaaaacagtttgaccgaaaaaaaggatttgtaaaacagagcacctgatggcgtcagggaaccttccgtgggagttggaggaagagatattgtgtcggcttccacttggatctcttgttcggctaagatccgtatgtaaacactggaacgattttttcaacgacaaatggttcatcaagaaaagcttgggttgtgcacgtcctcagttcatcttcattaccgattccaagatttattcgatagagatcatcggtctcgacggcgttgatccaacgattaagttacatgtgctagactcctctggtatcccttaccgtgaatggaaatttgcttacttaaccatcactgcttgcgatggccgatgggttcttgttttgtaactcttggattagtcccaaggggacagctttttggaatccgtggttgaaacagattaaatggatcgagtacgagaataaaggtttcaatgtatgtggcgtaggatacgataatactaggcctgagaaggtttacaaaatcttggggtatttagagtgtcgccgtgaagagagctcgaacgcatgctaccagagagttgcgatctacgagtgtgcctctcatgcgttcaagtttattgatacttctaacaaggtctggttcataagcgatgttcaacgatacagtgtgtgcttgaacggaaatctctattggctttcttttgatgactttcgcatcctatgctttgatttctcgagggagatagtcaaacccttttgtctccttccgtgtcggaagtttgataaatgcgatttacttgccctccaagttttcaagggagataggttatccttgttaaatcaatgttgtaagacaaggacgattgagatttgggttacgaagaagaagattgattctagtaacaacaatggatcagacgaagttgtgtggattagcttgttgactttgccaccaaataacttgccaaacttatttattgtgtgttatggcattagttacttcatctatgacaagaccaccttaatcatttattgtgaagacgagaacacttcagcggcttgcatctatatcatcaggggagatttgttcaagaagtttgaaattgattcctctgctttcttttgttatcactgtgtttatgctcccaattttatccctcttcctttaatgtaaaagttctgaataataataagatgctttttagtgtttcacattaagctctcaattcaacatttatttcactactagtttaaaccaattgacaaaacctgttcagtctatgttacaacttacattttaagatgtgtggaattagttatgaagggttcttattaaactttttagatttcttaaaaataaaaatctcttcattactaattatttaacatttcttaaaaataaatacgcagaaatgataatgttaataattcccttatatcataaattccttatttgctttttttttttactattaaatctaaaatcaattaaaatcctttgattcaataatcatgataacaaaattttgtctttctaatggagtatgaaatataataatacatagttatttctcttctcgtaagagcatctccaaaggcaaaatcaaatcttcatatttaatttgaggtttcttgttctccaaaggcaacctcaaaactttaaactttgatcatttcttttgttttgctttttggtccttacaagtatttatatcttataaatactcttactaatttcttattctatcatattagtccttcaatttttatgtctcataaatataaatttctgttttcaaatataaaaggtaaataaacaccttaaag

SEQ ID NO: 31303 - DNA, 1738 bp, Arabidopsis thaliana landsberg
  unsure (1)..(1738): unsure at all n locations
cctgacgtgtaaactcggttattctgaatatagaaaacctgattttttgtttactaaagagttaaaagacaaaaactacaggtacgtgcaatcatacattacatcgaatgcacatatgagagaaaaaagttgagacagaacgaaacaatggatctaattaatgcttaaaatccatttgaacagaattggatatatgaaaaacagaagcttccttaataaaagtaagtactgaacaatatgcattaagtacaaaacaacactacctagacaaacaaaggtttaaatttacaacccattacaatacaagaacttcaaccaactaagagtaggacctaaggaagatcataatttgttaacagggatccaaaatatcttctttgttatcattatcttcaaatcgtagctagtcatcttctttctcctcatgagtgtcattaatctcatcaagttcctccgtctttgaagacgtaggtctcctaaaccaagtcaccaaaccatattatcacctaaaaagcaagaaaacgtttgtgtttagaagaaacacacacacaaaaaaaaggacaacagagaatttgtaatgcatagtttaaagggtatgctacattctacatatcctcttataaaatctcgtatatgttgtcaggaaatttaatcggaacaaaattcaatttacaaaacctaaaccgannnnnnnnnnnnnnnnnnnnnnnnnnnnntcttctttacgacaatcacctattaataattgcactagagcaccgacaagaatttcaattaggataaagtataatttagattggtatgtttttagtttgaatttataactgaatcaaatatagttctaacaattttcaggaatcaacttttactttagtttggtctgtttgaactcggtagattagaaatgttacgtttttgccaaaataaatgattttttttttgaaaaaatgagtttggaaatttgaaagagaagaagaggtaagtaaaataataaagcagctccctttctctctctgcttccttgtgtgtgtctgtgtgtcattcacatctccctcctctcttcttcaccattagaggagagaaaacacactttcaaatatatatataagtataactcatccaacaactccatttttatcttcttcgtaaaggaaacaacgacgtttactccaagatactgttcctcaatctgcattcttttccaatcgatctaaatttggtttctgtgctgagattggctttctgggtgttgctggtatgctatagtttcttcacctcttcgtatggattggttccccatttcgttgttactgatctattcgagatttcagattgcaaattgctgttgacaagctgagatcttaaggtgcttttgcagtagctgagatttttcgaggtttttgtctgttcgtgagtagaagaatttggatggtcgccgatgtaagggtttcgtttccgctatgaacaccaagcgcgcctacaagctccgtatccttttctctctgatttcatcttttagggtttgtttatttctgggacttattgattgactccagtgtcgtgcttgatctgctgctttttgctctggttcacgagatctgtatgcacttcgtagctttgtgttttgagttttttcaagtcatttatgacatttcggtatctgtgtgcttctaaatttataaacttttagtcaatttcttctttgactagagtctcataccagagtattgcttagcct

SEQ ID NO: 31304 - DNA, 4210 bp, Arabidopsis thaliana landsberg
acatccgcaattacctgtaccaaatgaaataatgagaagtggaaaatgtttacgtggtgtttttatatacatggatttgaaaggaaacaaacagaagttgcttacagcattatcagccatcttctctattgaacttatcgagtttttaatatcatttctttcccaatatctacggacgacctgcaaatttggtgacattatttagaagataaacaatgtttatggaaacctatgaaggattactgctagcattctaattaggaaacagaccaaaagcattatcatagtgtactttcatgctgttacctgtaacttagccaaacgagagtgcatagagctgacaaattgatcgtgttgccccattatgtctgcaactatatcttcttcgctagctgaagtgattccttgatcaactggcacatgatttcctctctgcttgagctgtatgaaaggaagtaatgtcatcagtatctctgtagtaactgggaaattttatgtctgccaatacgctgaagatgcaggcccagttgaaattgagttctaatgaaaaggatctgacatctgactaattactcgtcactctttattttgtccttcctcattcttcggttttacagtttctattttatagtctcagatcccaaattaaaaagaaaactaaaattaaaagccattaccatattggaagggcgactgtttggtgcagtcatatttccaccagaagaactcgaaacaggaccctcaaagttagaaaatcttcctcttctttccctatttagaacgagggaatgcagtcttcctagtatgtcaaggcacacaattagaatcttttcttacgcacattaaaagggaaaaacaaaagaaaaaacgaatgttgggaaagagttacctccttttcggctttcagtaggacttgaatctctatttgcattatagctaatcaagtcagctggaataaagagttagttagcccagaactgagaacagcatccagaaaactcagacacatctatctataatattgaaggaccaactaaacaaaaagttgttttactgaaacaaattgtactacaagcaacatgtatacttaaagactgattcctaggatctcataaatataaacccaagtccctcagaaacttagaaaagtgttctccagatttaagatgccacgatgtcttagcaatacgaaatgccatttatatttgctctaaaacaaaggaagactagaaaggcttgtaaacatacagttttcgtcgtgatttctcggaggtgatctcaccagtgatcttgaattaaaccttccaaataccctgcatttgctctctttatttgttctctcagctgtatcccaggagccaccttcgtcactaggatatgtattcccatcttgtaaagtgattggttctataggttgagactgagacctttcaagaagcgaactggttggtagatctggctcatttctgctgctcgacagccttcgagaatcagcggcctttgactgcagcgaatatggcatagttcttccgataatgtcaagttctgctctggattcagatgcctgctcaattattggctccgatctggggacgattactggaaaataatcctctttattgactactggaggattcgcctttgggttagctcttccaaaatttctctttgaggctgcaacattagggacaactgtagaaataccagaagcactttttggagcactggtcaaagtaaccctgtgaggagagtctgatacacttcctgtggcttcaacaaacagcagacaaaccaaaagatgtgatatcatttagtaagcagcaaaattataacaaaaaagtgaaaagagaaagaaaaaatagagcaaagtaaaaacatacatgacagggttcttgactcttttactgtgtctgagctgtgagtagctgaaaaccttccgagaggctttggttcctttaccaaaggatctgaactttgagatactgatgaccttccagtagactttgtatcttttggcaacggatccgagttttgagaaactgataattttccaagagactttgtttccttcaataaaggatccactttctgggaaccaggcaactttccgagaataacctttgagctgttatcgttcagacctgcttgatctctgcctgagcctgatgttttctctggatgagaatttgactgagtggcacctccactcataggctcagtgcgctgagagtgtcattagaaaattgaatggagagcttagagataacaagtatggtacaggccaaactataacaaagcatgtagggggagagagagagagatataccgagaggtctacaacccaaacgcctacacaattttgattgtatgagcaaccgagaagctttccctcgtgaacattcatatccgacaagtttgaccatccaacatccactccatcatgacatcttattggctcccatgagaaaatctacaatttgcacaggattaaaccaaaggagtgaggttagaagagtacgtatgttgttttcgaaagcatacgagttaacctaagaacgaatccttcaaaagatgagttgttcaattaacatatatctaatttaagaatctacatactcgctatccaagtatagaagattttaccttgagactttcttgctatccacaaagcacagtctttccatctggattgaaactcaagcaacggaccccggcagtctagcgaaaatgagaatattaaaggtagagggaaaataaaatgtcaccaatttgacttagcgtaaaacaagttgtacctcaggtccaccagaaccaatcagctcgaatgtttccagatcccagaattttacagttctatcagctgaacctgttagcacaggcaaaaacagaatgcttcaaatatttgtaatcacactaattttacatattccatgtaaatatttaggtgaacgttaacagagagtgagagaagtagtcattattaaaacgtcggcattctattgttatctacacaacacagcaccattctgaaaatatctatgttacacacaccctcaataatatgaccaaagaaatgaaaaatactttagatgcatatttacttccagatctcaaatcacagagctaaaaagataagatggccacaagagtttcaattacataaaaagaagatgacgccatgacacagggatctatataactggttgggctgggctggtaaccgcaatacagttgtgatcagacactcttagcctagaagttttattttgtgttggtgttagaaatttttaagagtaatacaaacctgttgccagtaggaattcatgaggatgaaaatctaggctttgaatttgcccttcatgactcttaaactcggtcagcagttttccagctgttaaatcccaaacctggtaaagacaagctgcatatcagatccattaacacacagaaagataaaaaaaaaggttcccggtaaattgcttttcaagataacaatacagtgcgctgagagaggtaaagaagcaataaccgagagagatgaagcatccgaaatagttggccagggtggtctatgtgggttttagcaaaatgcaaaagaatagtacgtcctaaatactctcatatagcatactcagctcaggtgcagagaggtaacactaaatagtcgcaagttctcctccacacttaaaagggcatgcttactacagaacgtcattcatgagatacatacaaagagaattagaacaaaagcttattcctaccaactctcgaaagccagttcatagtctataaccaaaagcgcagtttcattgctccaaattctcccaaaggtaaatccaaactaattatgtcaactaagcagctgtatttccctcctcagtagacaagataaaatcacatacccagaactgaaaaatgactagtgacatgaaagcagctaccaaccttaacaatgttgtcctctcctccagatacaacccagcgaccatctggggtgaatctgagtacattgactcctcgcgtgtgacccttgtaagtatggatgcagcccttttttcgtatatcccatatcttaagatttgtgtctagtgagcctgacgcaaaaaactcaccaaaagggtggaaatccactgagatgcaattggacctgtgaccagtgagagtcctgacaactactcaacaaagcaagtgaaagaacacgtaagtactc

SEQ ID NO: 31305 - DNA, 5317 bp, Arabidopsis thaliana landsberg
aaatttaatatatagaacctaaggaccttaatttattagatgaactggtgttgtggttcaaaaaaatataaatgggggtctaatttgtgattttagaaaactgaagaaccaaattgagaatactaaaaatatgagctgttattgttatacatccgcgccaactgaattttagggccgttaccttctctctctctctctctctcttcttgtccacaagaaaagttagagctcttctctcatctccaatttctctctctctctctccttcgctcttatcctctggcgattttttccagagattctccgattctcgaggaggaggaggaggaggaggaggagggagagaaggagaaggacattttcgattcgattgatgtgaaacgctcctacttgattcccgtcgtctgagatcggagttatcatcgaggattgataatggttcccgaatcatcatcgaggataatgagtttttctggcgatgatttcgaattcgatattgatttcgaattcgatgcaccgaggttctatgatttctctagacctgagctttattccgagactgaagaaatcgaaatctggtttcaatcctctggaaactatcctccttcacgtaagaacacacattcatcttcaacgattctctttactattcatattatttatgtatttgtgtgatttatctcagcttttagcccaaagttcaattggaaatttgagccatttaagcaaattacaaacaccatatcagagtctaagcctgtggagattatcgaatcctcggaagccgagaccggtttgaattgcaaagataaattcaacggtaatgattctgaaatctttgtttatgcataatgatgcttcaatgcagttttgagacctttagtttattttgttgttgttgttattgtcaggcttcatatattataaccaaaccgttaaagatgtatccaagaaaaaatcgaaatctaaaaccaaaacaagtaactctactttgacaagacctacggcttctttgcttgcaaggcagaacaaacctttagatatttactctgttcaacttctgacaaggtactaaaaccaatgacgaaaccatttatgtgaattttattttgtggcttcaacaacttgtatttgatgtttcagatgtcagcgatcattagccaagtttggtgaaaatgtatctccgatcttagtctctaagttacaaaaccaagacatcaataggcaaaaacaggaagctaaggtgtgtatttctcttatggattttgaaattgctaattctagatatcattatactgataggtttcaatgagtcattgtttttttctttaaggtggctcatgttagcagcagagccaaactcactgttccaaaggaaccgaatcttagaactgcagaaagatctgaaagacacaggtaaaggactctgttcagaatgtttgtttgttggctttcgtataacatgttgtaagttttaatcttgagagtttcaggtctaaggttaacacacagagagagcagattgccacatcaagttctaaaagacacattaggaacaaaaacgtactttatatcctcttttgtattttcatctcagtttgtttattaccaccacattctcagaagcttatgagtttggatcttgcagattaatctggaacctgtttcaacatctttggctaaaactaatacgccacggtcccaacattttcaggtataatgtatcttccaatagctacaaactcaaagtgttataatcgttcctcatccattaacaaaaatttctgcatcaggcatttcgtttaaggacatcactgagagcgaaggaacgctcttcaaatgtaagtcacgaatctcattgtcgattcttcacctccatgtttacatttagttaaatgatgtgtctcacattgcaggctaaaaccgatgtcgtacaagagaatgatgctactaagtccagaacgttagtgccaattgctttgaaactttcagtgaatctacttttcctaaaacgttctcacacacattttctgcagactaaaaaagcccattgattccttaaaaactaggatagtcaaagaaaatcacagcagaaagataaattgccaagtgtatgaatctaaatcttcccctctagacccaaaggtaattcagtttttttgactaaaaatccatggaaaagtcctacttttactccaaaatcttccttttcttgacagatatcaagcaaagaagacctcgttgaagcaatccgcatcgaatatggaaatcagagctcatgcaggacagatattaacaggtaaactaataagcaatcatctattcaaagctcaaatagttcaaaaaagaacaggccagaatattatatcagacgccattgatgatgtactttgaacaggagcctggatttgtgccggaaattcgattctcaggaagttgcaaggaacctaatcactgcttaatcttcattttgaagatgttctttcattttttatacatgtaacacacgcattcctatgtctatatataagtaaacgtgtatacttgtttagatatatgcatagagaaagagatttttttaaataaattttggttgtgggatagtgacatgagcttttaaaacttaagaccaaaagacttcacagaactcgtgaacatgttcttgggagaaaacaaacattaacttcacatatccgtttctttcatataacctttgttcttgtcttaaatgcttaccataaattatttttacttacccaaaataccccttgtactacctaaattcactatagaaaaaccatcctttccttccaatcagcattactatcttccttaggatacaagaaactaaacaaaagccctggaatctttctcttatatgctacttttggagatgacttcacggaactgaacaaaccattgagatgcttctgcatcaggattcctaacttcattctcttgctgcagctttttggttgagtgatcaagagaaggtagcttctttgctacttgcagagatgggacaagagagagcagaaccctagagacttcaagcattgtgggtctctctaaagggtttcgctttgtgcataagagagccagctgaaatgtcttcctgatatgtcccaagtccatacaagtcacagtaacctctggatcaactgcttccatcacagtattatcatcagcctttgacaatatctgcaacataaaaaaaaaaaacgttaactcttttaaggttcaaagatcataatctatagtgattcttgattcatataccagttgatgcaagttagcttcgttatccactgctttcttcccagtgagaagctcaagaagaacaataccgaagctgtatatatcggatttctcattgattcgtgaagtacgagcatactctgggtctatataaccaattgttcccaaaacataagtcgaggcatgggttttgctagctggtatgctcttagcaatcccgaaatcagataaatgtgcttcgaaattctcatcaagaagtatgttcgatgacttgatgtcacggtgaatgattcgaggagtacaatcgtggtgaagataggctagtccttgagcagctccaaccgctatcttcaaccttgtctcccaatcaagcttcactttcttcaatgacccttttcaagaaaataaaaatcaaaacatttttaccgtttatctgcaaatcaatctttcacaaattgaaccaaaaaaagttagaagaacttaccatgaagaaggtcccaaagtgatccattttccatgtagtcatagaaaagaaggttgccagtaggagacaaggcatatccatgcaagctgactatgtttctgtgcctaatgctcccaatggtctcaagttctgtctcaaattcccgcaagttatgcggatactgattgtagagtcgcttaatggcaataggtcgggaactttttaatgcacatttgtataccgtgctagaagcaccatatccaattataaacttttcgttaagattctcagtcactctcatgatatcatcaaatgtatgaattgccatgtccatgtggagaatcactagcttggttaaccctgagaatcggtaaagattgatattgtcatataagaacagaatatgagttatgaagaagtatgaaggcatcatcattaccttcagcttgttttgaggagccttgtagaatcttcttctgctgcattgatctgtaaactgcaaggaaaatcatacataggagagtgatgacgccaagaacaatgcagatcaaagcacctctggagaatactgaaaagaacaagaaaagcaagctcaaataaacaagaaaaaacatctattgaagaaaatgcttaatggataaatctagtagatacctcgagatttcggtaaaggaccgcaaatagatccaacccagtttccacaaagatatggatttccaacaaagctatgcagaggttatgaatttagttttacaatgaaagcttatgcgtattgatcataatgacagactactgagagaagcttcatacctggctggagcaaaacgtgagaagtttttcattggtgggactatcccggagagattgttgaaggagacattcctaaaacgttttcgaagaaagaagaagaaaatgttggattcacaaatcttccaaagggctaatattgctcataagcaagtatctcttgcagaagaacttacagattgacaagagtgaagcagttcgtaagctgatctggaattttcccatgaagcttgttgttgttcaatattctgtacataaacataaagatcaaaccatacatctattttgtatataatacaaatgataagatcatattattaacttacaaagagtttaaattctgcaattggccaagttcagttggaataactccggagagcagattgaatgatacatcactacaagtaaaacagataagtcagaaaaaaaatatgattttgatataaccaaaagaagcaactataagctttacatcatctgaatgcttcgaaggttcccaaactctgcaggtaattgtccactaagatggtttctgctaagatttctgtttaatgaagcaaaagattaaaagttatcaaacacaagaaaaacatttacaaatttacaactttaagtgtaaaaaacttacaatatgagaaggtgttcaagatcgccaagcgttaatggtatagaccctgagaagttattgccagacagatcgctggaaacaaaaacatatgacgagtttgcagcaaattcaaacttatgcataaaaccaaacgctgtaacgaagatgagaagacatacagt

SEQ ID NO: 31306 - DNA, 2330 bp, Arabidopsis thaliana landsberg
  unsure (1)..(2330): unsure at all n locations
gatgtaacctatcaaattcagcaacttcaggtttcaattcaacgaatccttcatctgattttctgctactgttctcatcttcagaatcagaccggaatagtctcctccttctcttactgtagtatttcctcttggctttatccatttccggatctccagaaccgggtcgaccctgttcacgctccatagccagtttattgtcgacccatgaatcgaattccggctctgctgagtcaggtgcaccggattcgatggctttagggggacgacgacggttttgagagagagatgattgtgtgggacgattgatgatcatgtcgtattgaagtgggtatcgagtagatgttgtggagaggaagagagaagccaagtagggtttatggatgtttctccatggtttgactgaggagaagaagagaggagaagtcattgacattcttgctgaagaagacattagtcttgtgaagtgtagagatttcgccattattgagaacaaaggaggcgggggaaagatgaaatccacctccggtgattattgcagtggttctccaacggagaagaggaggtgatgatgatgttaaacgataaattaaaacgacacgatgttttctcttaaaggtctaagacggcacgttgtaagtatatccttagaagcctcgttgttgactattgcagattaatgatttggtttggtttttgtttgtactactgatatcgctgcctcactagattagattattgcatgctgttaaacacgttgtaatacatgttgttgacaaatttttgtaaatgaaagactaatgattagtgactcgtacaaaataatgttaatacatataaaacaaaatgacttatgaatggatactatcatcacatggactaagcacaagttcagatattgatctcaagatccttcaaggaccaagtttttgttcttagtataagactaagaggtctgatgatgtaacaaaatcatgtttttgataatgtcttaatatcagaactactgaggcgggtaggcacaagctttactggctcaacgataaatccagatttccgacattcttcttctagaagtttgacctgagatggcccctcagggcagaaaaccaccacagctcctccgcttccagtgaactttgcagctgcgccgatcttacgtgccacttccaccatctctatgttcatagctcccaaacattcatctccaaacatactcctagagaaagaaaaaagaatcttgaattgtgtttgccttttattttgttttgaagattttctaatttgttaccttcgaagatcgaagttacggttcatgagttccttgaggttggagtaatctttcttaagcaatgcagttcgaccttcttcagctaattttgcaatttctgccattgatgatattataaactcatcaccgtctaaccaccttctacgaaccgtgctatgtacctgcatcatcaaacataaacaatgctcagtgagaaggaaagtaatagaatcagaagcagagtagtgaatagctctctaaccttgccagagtcactaggattctcagcatagatgagatgcagaggaggaagaagattgatatccattatagtgtatatcccatatccaactttatccatatgctctttactaaaatcctgcaaaagtaaagaagatcaaaacagagcaaaatcgatgaaaaatgaaaatttccatgtcaaaaagagtggcaaagatcatcctcaccatgtgaacaagaccaccaccatagacttgagcaacacggtcttgaagaccagcaacaataccaagttctttctccgcattaagaataaggttaggtcggacttcgattctgattgattgcctgacattgtagaagtcgagaaggcagctaagagcagcagatacaattgcactagaacctgaaagccccgtctgaaaaaaaacatcaaaactataggcttcagtataacatatatcaaaaactgaattcataatttacaacaaaaagagtttgtaacaaacctgtcttgggatattggtatcataagaaagagtgaagtttttgtcatgaagttgtataccattttctttgcaatagtttcggaatactttgcaaatcgccattagtaaccttacacctccatagtatccatcattttccaatcgataaacctagaaagaaagacaatatttcagctatttagcaatgatcagtgaaagacacaacacatactttgatagattcataagccacanatctttcaatcaaagttaaaaaccaataaaaatacatttctaaacaaatgcagnctagagaaacagttcaatagaga

SEQ ID NO: 31307 - DNA, 5668 bp, Arabidopsis thaliana landsberg
tcgacatagtactcatatgagtagaggtagtttctcaactgaagatgaaggatcggtgggaacccgtcacaccatctaagcagattgatggtatggccgctcgggatctcatcgacatccgacattatcaaaagatcatcttcttttatacctgcgagcttgatcaactggtcaagtgcaagcctttggaatgattcctccacaaaggggttttcgcctttcttgaaccttcctccaacgttcccataagtcagccttggctcaacgaatttgaaattcttctccctgttgtctgcgaaagccaactgttttgacagtccggtgaaagttgagttagattcgagaagcacaaactgagtaatgtaaggatttaactcattccaacggagagtgagcatatcgatctcgttactgaacaaggcagcatcaaagactcttcttggagattcgcggagtttccagccatgaagattgcagagcaattccatggaagtgttctcgtgatagtaatgcggaaggatgttaaaaggtttaggaggtgattcccatagaggtctcaagaaatatgtgatcttctggccgtgtagatagatgccgaagatgaagagtggcaggagagtgaagagaaacaggaatgttttgaaatcgagtcctcttagaacacatctaagccttgaaatggccttgcctgctcgagaaccttcctgtaacatatatataacaaaagaagagattccattagcaaaagagttgatattactcaagtcactcgaagcccggtgaatatgcaagacttcatataaaacaaaatgcagaaatcatccagtctggtcttaagtaataaacactctttagtaggattaagaatgataagacatcctaagccttgaatcaaaaccagaataggatcagatgaaaaataaagaaacaaaagccaaacctgtccacaaacatcttcgcagatagtatccgtcttcttagaactacgataaccatcggacatgatgatgatgattagttctcaggaaagtcaaattttggacgaaaaaaacaagtttatgaataaacagaaaatctacagaaaaagaaaaacaagagagagtggtctagttctcggaggaggatcaaatccgagaatttctgtcttgaaatcgatccttctcctttcaccaaaactgtaacgccaattatagccgtttggtgctttttagcttccatctctacaattatatctgcattcttcaattggccaaataaataaattacattgttcaattcttcttcttctttatagagtaaataatttcatccgtcagatctcgtagaggcggtatgatcttacggctttaaattaaactgttattttctctatttgccaaaatcagaaattcctttttttaacctagttctagttaaaatagtaaaaggaattttgaaccgaacgttaaaaaaagaagtctcgtaactctctcaattatgagacggcgaaatgaaacccccaaagacgttaacgacgacgacggcggaggaggaagaaacaaccatgcggaaacagccgccttcgcctccaaagccaccacgtgtcaattctatgctccaatggtggcggagatggacggtgttggtggccgctatctggattcaagcattcaccggcacgaacttcgatttctctgcctactcttccgacatgaagtcttccatgggggtttctcaatctcggcttaactacatggcggttgcttcagatttgggtaaagcattgggttggtcttctggtttcgccattgcctatttccctgtctccggcgtgcttttcgctgccgccgcaatgggactcgtcggttacggtgtccagtggttatccatcgccgatgtgatcgatctaccttactctctggttctggtttgctgctccttagccgggttaagcatctgctggttcaacaccgtcagcttcatcctctgcattcgacatttcaaagcgaaccactcgttggccctgtctctcgttgtgagtttcaacggaatcagtgccgcgttgtacacgcttggccatgaagccattagtgggaaatcatcggcaagctctgatatttaccttctccttaactctctcatccctctgatcgtctctgttttagccctttggccggttcttactaaccctaattcctctgaaaccgatactacgcgaacgcatgacgaaaccagaatcttcgtagtcttcaatgtcttagccttagttacatgcttttaccttctcttgccttcctcaggcacctacttagcctcatcacctcgttggcatttcctcggagctattttccttctccttttcccattgtgcgtcccgtttctcgactatattcaccgtgctctcgagtcctgtttccaccaccacagctctggctatgcagcggttaacattgaggagcccaagatcctcaaaatcaaaagtcagaagagtaatgcggaggaggaaagtgatcaagtgagactaggagatgaacattctctcggaatgcttgttcgtaagcttgagttttggttatactacgtagcttatttctgcggcggcacgatcggtcttgtttatagcaacaacttaggacagatcgctcagtctctaggacaaagcagctcaaacgctaaatccttagttacactcttctctgccttctcctttctcggaagattgctctcctctgcacctgacttcacacgcaagaaactaaaatacttgacaagaacaggctggttcacgatttcgctactgccaacacctttggcattcttcatcctcgcgtattcacccaagaccaaccagaccgcgctactagaagttgcgacagcacttatcgggttaagctcggggtttgtgtttgcggctgcagtttccataacttccgaactctttggacgcaacagtgtcggtgtcaaccagaacatcctcatcacaaacattcccataggatctctcttctacggctacatggctgggtctgtctatgacacaaatgccagcctcggcaggaaatctgtggtggctgactcggttgtttgcgtaggaagaaagtgttatttcgtaacgtttttgttttggggttgtttgtctgttttggggtttgtatgtagcttgtttctgtttattagaaccagaccggtttatcaccggttaaaattgaacagaatgtaaaactgtgtagagtattatcagctgcctgcttataatggtatagattggtaggatccaagaaaagagtgaccattgccttcacacgactcagccaattatcaaaagtgttgtacaaaacattaatgcttagctctgttccaacttcatatataagaattaacatatactaatacatagttggtcattttaaaacttgctcgtgattcgtaaatttcccatcttaaatgaattagacaaattagccatcattatgaaagagaaaggttaaattagatgattagcgggcaataaaaggttagaattgatattatcatgtcattcgatagtgacacatgtgactagtttgacctttaggagcgccaacgtgtcatatatcagcgtaaattccaaaacaaaacaatctagtgtgggacccaaatactgttataaaaaaggatcattaaaatggatatgttaaaaaaagaaagtaaaaaacgcgtcagggaagagaagatggatccgaattccacggtttccggcgatggtcaggcgacggcggcgatagagcatcggtccttcgctcggatcggatttctcggaaacccgagcgatgtatacttcgggcgaaccatatcattgaccatcggaaacttctgggcatccgtgaagctggagccatcggagcatctcgtaatcaagcctcatccattccatgatctcgtccagttcacctctctcgaccatctcgtacgttctctttccatttcttctcattctcctctctggatctctatttatcctccaacattgttgttattctcctctctttgtttggatgcattttcaatattaatattatgatttcactgaatttcaggctcatcttttttcattagattccaaatcatttgtttattagtttgaattgtgtaaaacatttttcacgcttcatggctctaattctgagattttgtgtagctgaatcgtttgcaaaatgaaggatactacggtggggtaaggttgctaatggcgatatgtaaagtattccgtaactattgcaaagagaatgacattcaacttcaccaagccaacttctctctttcttatgataccaatatccctaggcaggtactgatcattttccttcccctttctctctatgtttttttcttttctctgccaccaacgcttatcttttcaactttgatgctccttccagacagggctttcgggttctagtgccatcgtatccgctgcccttaactgccttctcgacttctacaatgtcaggcatttgatcaaagtacaagtccgccctaacattgttctcagtgctgagaaagaacttggcattgttgctggtcttcaggacagggttgctcaggtctatggtggtcttgttcacatggtcagtgtctcccctcctatctcatacattgccgttggttccatcggttttatgactttttatcatcttcttcactttgcaggattttagcaaggagcacatggataaattggggcatgggatttacactcctatggatatcagtctcctccctcctctgcatctcatctatgctgagaatccgagcgactcagggaaggtacttacacttattcaatgattctggtttatgcatcaatcaagtgaaattcctcaaaaagcatttatgacactagaactcagatctttggggcataactcagtagaatttagaagtatctctctgttagatgtttcataatattagcattgccttctaatgcaggtacatagtatggttcggcaaagatggttagacggtgatgagtttataatctcatcaatgaaagaagtcggaagtctagcagaagaaggtcgaactgcattactcaacaaggaccattccaaacttgtggaactcatgaaccttaatttcgacattcggaggtaaatataattccagacaaaactcgaatatatacacaactcgagattaaactccatgctcacatgatgtttaaatagatgggagtgagtacacacatctaatagtgattgatgtgtgtttttttccgataggcggatgtttggggatgaatgcttaggagcaatgaacatagagatggtggaagtagcaaggagggttggtgcagcttcaaagttcactggaagtggaggagcagtggtggttttctgccctgaaggtccatctcaggtgaagcttctggaagaagaatgcaggaaagcgggatttatgcttcagccggtaaaaattgcgccttcatgtttgaatgattctgacattcagaccttatgaaagccttgatcaagtcttcttattcacacgatagagtcattttacagagaaataaacatgtgagcttttatgtctcagttggtagggtggttggtctgtttctttttcttgcccatatttattgtttgttacttggcttataaacagtatgttggttttgattcttttcacataagatccaattttt

SEQ ID NO: 31308 - DNA, 4265 bp, Arabidopsis thaliana landsberg
  unsure (1)..(4265): unsure at all n locations
gtgctctttcgcgaattagatttaattaattgaagttacttctttaaggtcgtgtagaaacaaaatgtataaattataaccacctttcaagaatccaaaactcaaaaccaacgaaagtacgaaactataacaaccggaagaaacaacacacaaccgaaatgctaaaacgttgttaacaaaaacaagtttaatgtgtaactttttttcagctaggctaaaatcctagaaggttaaaagatatataaccttttttttaacaaaaaagagagagtttaatatgtaagttgcaacaacagggtaagtttgaagaaatttactttttcttaattccatggtaagataataacaaaattacaaaataattcttacaataacaaaattagatcaaaaacctaaaccacaataaagaaaaagaatgaaaccttagtgtcatgcccatatatatttattactttctatgtgtctagaagacctaaagttgttaagagtagttgaactcttagaaagaggtccattgattggatcaaaaagaagacctcacgatgcaaattaaaaaaacaaaaaacaaaaaaattatgattagaagaaagctttgaggaatgagttatgaggcatagcatgatgaggacattcagcccaacatcaacgttcggcccaaacgtctgcgcaagcccaatccaagatacgattaaggacttggtcatgacttgactaagtctctcgcatttctgtttcattgctaataatgtggagtgttccactaaagtcacttttccatgattccatgtttgtaggagttaagctccatgatttgtttcaagttgttgtaaggaggtgaactccaagtatttatataaatgaaaaagccaaaaagaggtagtcattattacccaaatacaatcaatcttaatttgttatcttacaaattctctaagctttgaagagggaccattatttggtatcagagcacttttttcttttcaatcataacgctccgacgttccaagcgaaaggggaagcagatcgcgtctccgnnnnnnnnnnnnnnnnnnnnngcgaccaacaaggagaggttggaagacttggagacaagtcaagaaatgatgcaggatgagttacaaaagatgaacgtggctatggtagacctgaagggcgaactggaggagaagttcacacgactgatggaagcggtgagcaatcgtgacagtggcggctctgcaggctcacgaggtagtcgcagaactgatgggaaccgagcccacgcaccagggtatcggggagagcacgaaaattcgtttgcggctgtagacgttccaccggagagaccgcgacacgtgaagctggattttccaaggttctcagccggagatccaacggaatgggtgagcaaagtaaaccaatactttgattaccaggaggtgccagtggagcagcttgtgcggttcacttcgtttcatctcgacggagtcgccaacagatggtggcaggctacagcaagcgggctccgaaacgatcgtatttcgatcacgtgggaagtttttgaacgagagctctgggctaggttcgggccacacgaaggagaaaatttccatgaggcgttgatgcagctgagacaaaccggttcgttgaatgattatcaagaggaatttgagaagcttcagagtaacattcacgaatggtcgcaagaagcattggtgggcgcttttatgggtggtctcaatcactccatctctgaaggaattcgaatgtttcagccgaagtcgttacgagaagtgatcaattacgctagattgcgtgatggacagttacagagacagaggaaggagtatcgtcgaccaacgacattccccagaaccacgacggcgacccctgtctcagctataccggaaaatcgcagcaaaaaggtgcagggtcagacaccgaagaaactgtcatgggacgaattcaggagaaagaggagtctgagactctgttttagctgtgacgagcgttacgcaccgggccaaaaatgccgaaaacctcaactgttactcatggagggcggtgatgaggaagaggaggaggaagaacttcccgacaatccaatcgaacctgaaatcaccctacaggcactaactggttgggatacaccccgaacgttgcgggtacatgcggtggttaactggcaggagttggtggcgcttattgacagcggctctacacacaacttcataagtgagaaagcggccaatcgccttaatctgaaaatcacggccgtcaaaccattcaacgtgagggtagccgacggtcatccacttcggtgtcgaggttcgtatcagaaagtcaccatggacctgagtggtgtctcatttgtgctcgagttcttcgttttacctctacaggggctggatgtggttttaggcgtccaatggttggagctgctgggcccaaccttatgtgattggaaggcccataccatggaattcgaatgggctgggcagaagaggatggttcgtgggctactgtataagcccattacccaagtccagccagaggagatttctaaagaggcacgaatgggccaggcctgttttgcactcaccttccagccagaaaacgacgccgctcccccacaagtccccatcgagatgagttgtcttcttcaacagttcgaggaggtttttcaggtgccgtcagaactgcctccgtctcgcgatatcgaacaccacatcacgctgaaggaaggcgtcgaccccgtaaacgtccgtccctaccgctatgctcactttcagaaggcagaaatcgaaaaacaagtggaggagatgcttcgatccggcttgattcaaccaagctccagtcctttctcctcaccggttctcttggtcaagaaaaaggacgggtcttggcgattttgtacagactaccccgctctcaactccgccacagtgaaggatcgattcccaatcccaactgtcgatgacatgcttgatgagctacatggggccaagttcttaaccaaattagacctcagcgctggataccaccaagttcgtgtacacctaccggacgtgccaaagactgcttttcgcacacacaacggccactacgaatatctggtaatgccattcggattatgtaacgcaccatctacattccaatcgttgatgaactcagtctttcggagtcatctacgaaaatttgtgctggttttcttcgacgacatactcgtgtatagcagttcatgggaagaccatttggaacatgtgcgtgtggtgtttcagattctccagcaacataagcttttcgtgaaatttaagaaatgcgagtttggaaagttggagctggagtacttgggtcattttatctcaggagaaggagtgaaagtggatcagtcaaagattcaagcaatgcttgactggctggcaccaaccaccatcacggagctacggggttttttggggcttaccgggtactacagaaaatttgtgaaggattacggtatcattgcacggccattgacgaatctgttaaaaaaggggaagttcgaatggaatgaaatagcagaatcggcattcacactactgaaggaggctatgatgacaacgccaacattggccatgccaaactttgatgccccattcatcatccaaacggatgcctcgggcgatggtataggcgcggtgttgactcaggacgggaagcccttggcgtttatgagtcgctctttgggagtagcaaagcagagctggtccacctatgctcgggagatgttggccattgttattgcgatccgtacatggcgaccatatctcctaggacgcaagttcattattcagacggaccagcggagtttaaggttcctcctcgaacaacgcatcctcactccggagcaacagaaatggatgggtaagttggtgggttacgattacgagatcacttacaaacccggtaccgccaatgcagcagcagacgcgctgtccagaaagtcgggcagcccctgtctcaacaacatctttgtacctcacacggctgtctgggaagagctcaagcgcctagccacgacggacccgtaccttgtcaagatcgggaagctcgctaggacaacaccagggcagccatactcgtgacgaaacgggctcatctgcttcaacaacagagtggtacttcctccgggatcccatcttatctctgatttattacaagaatatcataattgtgtcatgggtggccattctggggtactgcggacttttatacgactagcacaaatgtttttatgggcatcg

SEQ ID NO: 31309 - DNA, 2758 bp, Arabidopsis thaliana landsberg
tatttaaattggtaatttaacagtggagtttttttaaaaaattcattagttcggtgggcatcaaacaattcaagaagtagggaataatcatttttgtacacaatgagactagcattataattatgtcaacattaaaaccatagtcattaataatacatgtcctttagttaggtaacacagatcttggtctctgcccgcatgaaaaatgtttatcttttttcctttaaatcaagtccaattgccatttataccaatatcacttaactaactaaaccagattttttaaccttattatcaatgatttgatcattaaccatacatagacgaatcttttgaaacagagaacctgcatcaacttacattcctctgtcacagcaagtaaaatccaaagcacatatatacttacaaaaaaagacagaggattgaagcctgttttgcttgataaggaagacgtaagaactgtgctgaaatggttttaagccaacttacttttcgcagaggcaatgaaagcatcgacaaggcggagccatgctcgacgccaagaacaatcaacacacataagtacaagaatacctatcaatgcagtcacataagttgcagcagtactccaatagaagaccaacatgtcaatagcaacttctttgtcatcttcttctcctccattggcattttcctctgagttcttcttagtttcacagcttgtatcggttggcggtccacagagaagaggatttcctaagtagctgttctcgtcgaaggtgttaaattgctttccttggggaatgatgcctgataaattgttgtaagagacgttgaagacagcaagagaagtgaggttggttaactggtgaggaatgcttccttgtaacatgttataagaaagatcaaggctctcaatgtcctgcaatttagagaagctatccggtatatgactggactagacattgtgagacgtattcagggctcttagtttgaagagatcttcgagctctgctgggataacaccagttaattcattgcttgacagatccaagccatacatgtaatcaagtgttcctctcatgtacaagtcatatctctgtttcaccgcaaattcaacttgggcattaaaatctaccgagtagtctagagaaaaccgatctgacacaatcaaagactcgtaatatacttcggtgtatatctccataaagtttgagagcaagctcgccggataccaatctgaatcagcattactatgtcctcctgagccaaatgatagattggtgacacacgaaggtatggattcattcaatcgattgtgagcaaaatccaacatccttacgttgcttaaaccgcacagctcaacaggaatctttcctgtcaagttattctctctcaacagaacaacactgatgctcggggtgctcctgaacagtggaatgtttccagacagtttgttgtttctcagatcaagcaaccgtagcccgtaccacaacgtgtctggaatagatccagtgagattgttgttgtgcaagtccaatatataaccgtaatctgagctggaccgcaggggtaagctacccgacaagaagtttccagaaaggtccaagagccagaggtaaggaatgttgaacaaagacggtggtattgcaccttgtagacggttgttggagatcctcagaacttccaaaaagaaattgcctaaccaccttggaattgtaccagtgaggaagttgtttgataagtcgatcacactcaacatccttaagttgagtagagtacgagggatcttccctgtaaacatgttattgtccatgatcagcgtaatcaaagaggtctcatcactcgatttccgaataatcgggccactgaatctgttgtgcgagagcttaagccaactcaatgagtagcaacctgtgaaaagattccttggcaatttccctgagaagttgttgtaagataggtccataaattcaatattttccatcctggccatagaggagggcatgttccctagaaactcattgtttgagagattcaaatgtctcaagctcgcaagtatcaaaccgacatccttagggagttgattgttgaaattattcaccgaaagatccaaaatctgcagcctgcgcatggttcttggaagtgtaagtgttttgaatgagttgttctgtaacaacagggcctgaagctctgtgttattttccagcagccaagtggggaacactccggataatatattgttggagagatcgatgacccgcaattcctgctgataccaaagaaaaccagggatttttccaaggttgcagtgtgacaacataatactacttagctgcgattgcagaccaccggaaacgttagtctctactatttgcagcataccagacctggaagagagtttaaaaaccttgagctctgttaattcagtgatcaaacccaacgagaacaagccttcaaagtcattatcgagaagtgataagtattccatggatttgaagtcactgatgaaatatggaatcttcccacttaggtgatttgatgatagatcaagaactcggagtttggagaatctcgaaaaacagagtgggatttcaccctcaaatctgtttcgactaagacgaagctcttgcaactgctctaatctacaaattcctgcagtgatggatgcacagagaaacgtcaaggcatatacaatcgaagctgagacgagttcctctactaaaaaagatatattagtcataacttgccttgtttttgcaatgagccagagaattta

SEQ ID NO: 31310 - DNA, 1543 bp, Arabidopsis thaliana landsberg
  unsure (1)..(1543): unsure at all n locations
ctatacatactacttgttaaaatttgggattcaactccgatgttccactaggatatgatcaggtacgggttatttattgtaactcttgacaatattgcacaaaaaatttcttgattgtaaacattcgggttgcaacgtcagaccatctcactttctatcctcaaaataaaacatttccaacatgccatttttaaaattctaatctcataagcatgatattatttggacatgaagtgtatacagttatagtgtacaagcaggagagtacaagtcacgcgtcttacagatgaacttagtgctagtttaccaaagaagctgacgtggcgttttcatgctttccgtctttgtgctaataatatatggtagaaaaaacttttgagacgcaaataaaaatgcgaaaaccccaaaatcgtaatcagcagcgatcgagattttcgccgctgaaatctggagactgattattacacacttgttcgtcgtgttcttcatcggagagacactagatcggaaaattttacctcgatttgattgccgttgccgtaacatttgactgttgttttgtggtggggaattctagggttcttgcttgatgaagaagaactgaagcgaaaatgaccattaaaatctcccatgagatgattgtgtccgttttctctcttatatcggacaacggaatcgaatgatcgtcatattctgtaagagagaaggttagatcttcaccgaatctggaactcgagatccatcgttttgttcgattttctattctttcgcacaaggattggtctgagaagaacaagttcaagttagaagctgttgtgttctgtccggtgaaacttatttgagctgctgcaaaaacttcaaaagttgttactttttctgaaataacttaagcttcttggtattttgagactaaatggtttcactactcttgtgaattcctggaaatcagaactgttattaggtttttttgtatatttagggacaaagatgcatgctaggcaacgcaatgttgggaatgggtacagatctggttctattgggatgggtatgtctggttctagaatttctcctgagcgtcctatgagaggacatgggttctatggttctgaacaccaacaccgtggctttaaccgtggatatggacgtggaaggggacgctctaaatcataccacaatcagctgcctccgcctctgcctcctccaccggtgcagcgtagaagcagtggcggtgacgnnnnnnnnnnnnnnnnnnnnnnnnnnnnnnagtacttggtttctcaaggtgttctaccacaaactgtgctttccagtaaatggcagaatggtaattttaggaagcaagctggagagtttcagagttccaggtctcaagaagaagcccgaatggatgtttcagctccagctgcagagaaaaggaggtatattgatggctatagctcagctggatccaggaatagcttgaaaggaaggagatcccaccgttatgactcggattttgggaggagcggatcttggtcagagagaagtaaagcttttgagactg

SEQ ID NO: 31311 - DNA, 4701 bp, Arabidopsis thaliana landsberg
ccatccggaacctcttttgttaacttttccattctcttttatggtagcttttatacaatttcctcaatgatctgaatggatttgtagttggtgtcgtggcaatagcttaatgtatgttttcttaaatattttgattctttattgttggttagttgtgtatcatgccagttcattaatggtcggacaatggttgttctgatttggtttgaccttatatgcaactgggtatttgatgttttactcgaggctttgcaactgttaacttcattaacgtggttgtattcctgtgaatgattcatgtaacttttgaaatgtcatatctgaaatagatatcaaacaagattcttccttttgccagttttcgtatttgactattgagtatcttcgattaaagcttgtccaattttttttttttttattcatcatatttacttttccacatgaaaaataattacgagagctttgactttttcctaaccaccaaagtaggtgaagaaaaatactgacttttacttggggtgtttcaacttggtcttgaagtaatggtaatttactaacttcgtttgagaaacaaatatgattaatcaaatcatttacgcgcctgacgacggcaacattgtctcgattttgtcatatttagttatttacatgagtcggttaatcggtttgtcgtaaacgagcttaataatgtaaatgtcaactatcacttttatatgatgtcaaatctcataatacatatagtgagaaaaaggttcgttttattttccaacgtcaaaaataaattttaactcttttactcagcgacaaaataaaaaacgagagataaatctccaaaatgctatgacatgcatgcaactaaaccgtaattggttgtcttaaaccggcacgggaaatcaaactcccaaccgccgccatatctctacaaaacactcctttaaccaccacatctaacttgtcgttactcttcctcacaaccgtcattgccaccgctttattaccatccatcggcgtttcaatccgtcgattatcgattgcaaccgctttgtccgcttctacggtttcaatgtcactcaatacggcgtaatatcccttctggatcaatctatagagtaacaatgttgacattctcgctcggttcttaaccgaaactaattcttgctcatcgattatatcgaaccggtctatagacgtcattgatctctccgatttatatcttagattcagtaacaagtaagccctgttcagctccgatctcgagcacccacgttcaattcccatcaatgagtaataatcctcattgccgttttctctgtttgtaattttctccttcatttgtttgatattagtggtcaatacacataattttcccgggatttctctgtaccgtacattatgccgtttccaaaccgggccggttaatgaccggtcacgtaaaattgaattgaagaggagtttcaagtgttcgagatcgtgaagcgagtcggggaaacaccgtatcgatcggaacaattcagctctggtttctaaagcttctatgcacgacggttctagggctagggttaagttgcaatcggcgatggaatccgcgattcgaccggcggatttgtaggcggaggcgcgacgaattaagcaatcgacgaggaaactctgcggtgcaccacgacggctgtctatgatcttagagaaatggcggattgattcggagtagagaccggcgttaagtgctgagagcgccgccgtccgtcgtcggaggaagagcttgatttgggagagcatttgcgatacgacctcggattcggtgattggttgtggctgagattcggaggtggaaaggttgaagctatcttcggaccagcaaatgctttcgcggcggagtccgccgtggctaggcgtttaccggtttggagtaggatgatcgcgtcatccattaaacccagatggtaacaagcttggcccaaaaccaagtatctgccacagagaagagaagatccgaatcagttacgctcgggtcaacaaaaactcgggtcataactaaaaagatgaaatacctccattgcccttgtacttcagatttattacttaaccctgccatgaccttgttcttcaagtaggaataagagaaacacttgaacgacgagtcatgactcggtgagccactcggaagaagaagcatgagagaggaaagctccgatgaagcggcgaagacactgctgacatcttcgttatcgattctaagactgggaatgtaattgtgaagcaaaacggccacgtctttgaaacgacgaaggtagagaagcgatctggctttgagttccagagcgagttcgtggtgaggagagatagaaagcgttgaattcaagagactgagagctgatacgatgtcgtttggatcttggctggttatcaaatccttcgcattcttcatgtacttgtccactttctgaatcagatacagttttgtacacattgaagatgatatatatttcgataaacctaagagcaaaactttgatttatgggttgaagtatttacctttctgttacgtttccaccaaggatgaatcgccattgcagtagttttctggttctcaaattctccggaaaagcaatgagaagacgaagtctctgttttttccttaatacacagtgaatttaaaggtgagagagataggtgggaaactggaaagatgatagagagttgaaaatcatgtgaagtcaatcatcttaaatacgagagggcttttgataacagaggtagataaaagaaagctagactgacggatttgcccttgaaagcttatagctaaattaatcttccttcaataggtcgaatgtggacaatgtattgacgaccattgagtgattacaaattctacttaaaagtaggattgacaatttgacattatcgtaacgtttatgcgagaaaaaacgaagtcttctctcgaaagcttaaaagactcatgttttctactatttgtttattgccacgtcgtagatagcgttacttgtttttgtttttgttaaaagttctgtttaaattaatgcactttgcttttggatttaccaaatgtctatcaatgaatgcacatgtgtatgttgacaaaaacacaaggctcatttgtattttttatagatttctttcatcatactctaagaagattaatgacaatctttagacataattagcaaaagtgtttgtattatcatatacttgtgtatatatttccgtagagtagtccacagaatctgcaatacatagatccaactaatacatttttcaaaaattaaatctaagtagattatatgtgtgtacaatatacataggaataggatccatgtaaattaaaggtttgaatggtgttaaaatagtaataagaggaacatatagaagtagatagaaaaaaaaagagaggagaatatgttacacatccataaactagttgaaaattttcgtctagttttgtatttgtgctttacattggtaatgaacaagaaaagaaatccgaaaacaacctttattttaaaaaatccgaggccatacaattcaattttaaatacatcttttgaattataagaaacagattttcttctagttttgtatttcttttttcaaattcgtttcgttagaaacattaaaatctcttaaaaatattttgggaacaacaagaaaagtgaaaagaaaaaaacagagtcaagacttgatgactccaagagtagaagcttgaagcgacaccgtatgactctcatctccaatatgaatcccatgatcaccgatcggaatccttcggttcccggctcggtccactacacttaagtacttacacacgtgtatattcacctgcacacgcttcttctccccaaccgccacgtgtactctctcaaaagcaaccagctgtttcttcggagcccattctccacccggcggagccgagaacacaagcattgtgtgcgtcccatctctcgagccaacgttagtaacttccacgtggactccgagagagagacgatcacacctagcgtgcgtcacacggattgatttccctgaaacggtgccgtttctaccacgaacagctataggaatcacttttggcgcgtcggctatgttgtgagtaaagcgcgtgtaactcaaaccatgcccgaacgggtaaacaactggaccgtcgtagaaccggtaagtccgacccgggatccgcttcgaatggagcggccgcatcgacatttctgtcattggtaaattggttaaataatcttgcggataccaagtcatcggaagctttcctccgggattagcactgccgaataagatatcggcgattgcggtaccaccttcctgacccggatacccggcccaaacaatcgctggaattttccgatccttctcagcaaaagatatatcgataggcccaccagacatcaatactaagataactgggcctttagcggccttagcaactctagagacaagctcttgttgtttccagcaaaagcaacgtttcgtcctgaatccgcttcaatagactgatccaaacccatccaagaaggtgcatcagctcccgaccgcttcacgcggcatagacaattatcatcatcagtgaggccaccaaccttttataatggttgagcatacggtaaaccttgaccgatggtatatccacaagccccccgcataattacaatcattgtgcgagaataaaaaaggtcc

SEQ ID NO: 31312 - DNA, 2147 bp, Arabidopsis thaliana landsberg
tatcttacatctaatgagcttattatacaagttagattgagcgtatggtatgggttgcagactcattagtctttttcttttctagtcgtctctttttttttcttggttcaaccataagtatgatctggaccttaagtcaagtcaagtcgtcttttgagttgaaatatctgcaagtcgcaaagagacatgtgggagacttattggctttttttttgctctatctctctcttttcataaatgaaaatttaataaaaatgtgagaaacagagtacatttcgacattactagtaatggattaagacaacattagatctaaaaagtaatgttaagatgctatcatattgtgtagtcactttcaaatattgtcaactacaaatgcctagttattttgttatttgtcaaatgtattttacatctcttaatattatgatttgggttctttgcacggaagatacataaggagtcaatttttaaatactcaagaaagtagtacacaatggagttagcaaaaaaacaagtactttatttcatttcattaatagtagaacatggttcatctatataatagataaggtgactgaaaaatcactgcaaagttgatatttatgcgaatcagaacagcaaaagacatatttatagcttagagacttcagggcaagacaaagtctgtgggagactgggcctgacttcagctcagttcttcatgctgcgtgttacagaaggaacaacaaaacaaacgtaagattttctctctttacataaacaagtgagaaaatcctgaggttactttgattttttaccttagaaacaggaaggactgtttacaccacaattggcaagaagaggcctgactctagatgggtctatcccgacagtggggagataaggcttgtacgggcagaggcattgtagattagcaactctggccactgcgcagcagtccggtcccggtggtggagggttgtttccagtgacggctggacggcatttcgccaagtcgtttgtgtcaatgttgcaaacgggaatgcttgtagcttctttcaccattattgcagctgttaaaaccatcgcgagagctgaaaattgcatgaggattctggtgttgtccttacccattctctctttttctaatcccttattctttctcactcaactctgttgtgatatgtgaaactcttacatgtaatgagcttattatataaggaaagattaatgagaagtgagagctagtacaaggtagactcacgggtatttttagccaagtcggtcgtcttttgagttaaattgtaacaaacagacaaatgtggtagacttttagtctccagttggtaaattacagagcttgttccttttgcgtgactaatggcttttggtcgttttatcttgttttgtccttgtcaagtcgtgtagttttctgtgtaagaatatcaagagactgtcttcttgtcacgtaagaacaagtcattgaaaatgaaacgatctaaggaatttatgagtcgttgaaacttaaaaagcacctctggattattccaggccttgtggcatacataataacgttcataaataaattattaaattcaaatcttcaaatcacacacaaacccaaacccaaaccctaacaagtacaaggatccagaaaagaacaacattagacacaaaagcacaaggcaggcccagatactagctagagctcagagaagatgtcgaatggatccagtaagggacaacaagcgagggtttaccaaagcgatcgaacgtgaaggaactgtttgtaccagaagctagatcgtaagaaccaaatctagggccaaggtaatagatggagttaggtttgagccctgggtacaaacttgccgtgacacagaaggcttcactcttgccaaggaagatgcagagatctccaatatcttcagtgtaaccaaagtctttgctcatcccatcttgcctaaagaccatgaaccgcttagttttgctgtggagaaattccaaatccccatcttcgtcctctttgtgaatacactgtgtgtacctagacagagaaacaagtagctcaatatctctctactctgctttgattgagtaaaagtagcgaacaatcttaaataaatacgtaccacttgatgaagaaaagttcaccagagggagaa

SEQ ID NO: 31313 - DNA, 819 bp, Arabidopsis thaliana landsberg
gagactggctcccctcacggggggatggtaacccctagattgagctgagctgagatttgcttcttcctttttgtgttcaaagattggaatttagtatctttgaaacatgccggttgatttagataattcctctacagtttccggcgatgcaagcgtctcatcgaccggaaaccaaaatctaactcctaaatccgtcgggaagaagaaacggaatcttcctggaatgcctggtacttctcaaaaatccaaacttttttttttctgttttttgagtttgaaattttctgtttttagttgttctcactgattgtctaaattcagatccagacgctgaagtgatagctttgtcacctaaaacacttatggcaacgaatcgattcgtttgcgaaatctgtaacaaaggttttcaacgtgaccagaatcttcagcttcatcgtcgaggtcacaatcttccatggaaacttcgacagagatcgactaaagaagtgaggaagaaggtttatgtttgtcctgtttctggctgtgttcatcatgacccttcacgtgctcttggagatcttactggaatcaagaaacacttttgtcggaaacacggcgagaagaaatggaagtgtgagaaatgttctaagaagtatgctgttcaatcagattggaaagctcattcgaagatttgtggcaccaaggagtataaatgcgattgtggaactctgttttctaggtggcgacaaattgttataaacatattcaaaggtttgatctttcttatggattttactaacttgtggattgggttttgttgcaggagagatagctttataa

SEQ ID NO: 31314 - DNA, 1250 bp, Arabidopsis thaliana landsberg
actaattataattgagatatgggtgagtttttatgttaattcatctttctttatgttattgaacttgttgattaggaaaccggtaagaacagccttcacattttgtggttgttaaacaaagacgaattgacaactttacgcaaggtaaaacacaaatatcaattagctaatatatatataatgataataataataatattagataattaattgcacttgcaatggagagtaatcatataagtaaagagttttagtcgaggaaaaagatgacccaataagtgaaaacgaagtttcatacaatgaatttgtagaagaagatgaaatagctaacaacgaggatgatgttgtaactgaagaggctactgcttcagaagcaaataatgataatgagaagaaatatgaaatatatattggaatggagtaatacagtcagatgaaattgcagtataacttataaaaagtatggcggaatcatggttcaatgtagaaaacaacggaggtgaaaacaaagagaaggtagtaaggcttctttatgtttgctcaaaacaaggatattggaaagaacctaaggtcaaaaaatcatatttacagctcataacactgaattttaagcgttttaagcccttatttttcatgcatttagcttagtttcatgcattttttcatgcattcatagtccatttttcttccttttcatgatttgcattgcattgcatagcatatttgcatttggagtatttttcaggtaaaataggtaattttgaaattgatttggacatttctagcacaaagagtggacttgctcgagttcgtgcatcaaaggaaagacaaggaactatgctcggggtacatgctcggtcggacgttgagtggaacacttggaagaagatttgaagctccctgctcgagaggaagtcgagtgcatgtcattcgggatttctactcgtcccaaagtcgagtggtgctgcgccgccttagctattttgtctttttcccgatcatggcttcctacgatttcctataaataaacctcttatgcttttacccaaaagatattgtctttgtcccctgtatattagggttttctgagtttgtaatccattttcctgctattctgttgtgaatttgagtttgatttcttctataaagtggttcatcttgcttagatctacatcctacttgcttagaatgatttctggttttgtcagatttctatgttttgtatgatgatggtcttcattggtcttgac

SEQ ID NO: 31315 - DNA, 1292 bp, Arabidopsis thaliana landsberg
  unsure (1)..(1292): unsure at all n locations
ccgcgaacctaaaagatgcgaagtgcctggcgagtctgtccctgatacattactaaattctatagtgcaacattcatgtcaaaactgaactctcgctgcgatcattcgttattgaccgatgttgacggtcgaagttatatagctatttgagtttctgaaactatatattgggatccatatacagtataccattatctatctgtatgcgtacgtaattaaactacagctgataaaccacataaattggttgagggtattgactttcttgataatacctccatttacttggcatggacgacataccaatcatcaaaatgtcccatgtcaaatgattcgactagagaagagtaactttctttttaatacacaccacgacatttggagagaaatcattgcgctgatgaatgaacatagctcaaaaaacggcacttgggaaggaaatcataagaatgggataattgtgatgtaagctgtataatttgatgtagaagtgaagaataaaatgaatatgacgaacactgcctggttcaaagtatgttacatgcatttagtctgcggtacatgaaccaaacttatatgctacttataataattatacaaatagtatatgtaccaacgaaggtcttgtcaaaggtttgacttatgttgtgataatgtataaattataagagaatatgaaatttctatctaatttatatgggaatttttaaatttatgtcacgcgtgagataaatcaaggccgcacaaagttgtggcatttcaaaggtcacccccacatccgattatgcgtggatgcacgcataaaatgcgaattttaaaaacttcatacatagcacaatatgattttatttattctcgacatacatatgtatataatgtatgtatatttcacgtctcttgacatgtaggtctactgtcatgttcaatttgtctataacttgtatattggtcttctaatttccttgacgagggatgttaaattcggatatgtaacaatagctgattcgatggatgaggtttaaacactatggccacaattggtggattgaactcctttaagatttctttagaaaaaatctacactaacaatgttgaggtgagtatatgtgtttactgtttttacatttctgtgatcttaaacggttgacgattttcttgatggtgagttggtgagcatagttaaaaaaatcaaaccttcataatgttaatttattatttattatacaaaaagggtgtgcgatgcggaatcatttttttctttgttttntctcntgntgnatcaagtcaaaaag

SEQ ID NO: 31316 - DNA, 3823 bp, Arabidopsis thaliana landsberg
ttctacaagagagaagaggaattagggttttattttctgctgaatttcagaaagaggagtgagcgagcgagataaagggagagaaggcaatgtctcttttcatcagccgattctcgattctctctgtaagacacgataccaaatttgcagattaaaaactgtttatgttgacaatgtgtttcattgtttctgataaaatgtcattccatggaaacttgacaggcacgcagattggccaatgctcgattcttctcatcatcaccttattgctttttgagcaacaagattcttggagagtcttcggatggtggcaaaatcgtaaactacagagttttcgaccctagtacagaacaagttgtgactagctgcgagaagaagattcccaagaagctgcttggtcaaacatgtgttggagcatcgcaaggatgggttgctactatggagtgtaaagatctgcccgtaaatctcactgacgtcttcaagccatgtgtctcacccacaagagtcacacctctgccttccctaggtttttatcctactccttattctactgaattgtcgctctcgtcttcgtctcttgaccaagactttagttacacggaagatattggagatctctgcatcttccttggcgcaagtgaagccttctgcctcacggcaagcatgtacccggggcttaaacctaactctatctattacattggccatggtcttggttcatacgatctaacctctggtacggtccattccttttaccctcctcatgcaccaatgctcaaccatgttccttactggatcccttctcatctctgagctctagcctctaggccatgggttcgctttacggtctttatgcatctactctctacttactactgttgagtgttcttttgttaactactactttctggatccctactctttatgttataaccaggtgacacaatattattagtccacatcgtatttgactcttccgtcaccattcacgcccatcttaatgggcttgtgttattttctatgagccgttattttggcccaataaaatgtgcagcttagtacctataaaagaacatttgattttatgatgatgaaaaatactattataacagatttatttcgtcgacatatcacaattaaatttaagatttatatattaaagaaaaaagttgtgacacgtcaaccaaaagttaaaataaaaatcaatttagtggcttaaaatggggataagaaaacaatattgaaaattgatgatttatccactcacaatccaaaaaaaatccaccacaagcgctgatcacgtcacgttcaaatatttttaccaaacatttctaaatatattgattagtttattaaatgaatttctaatggaggagagaaaagacatgtcaacatcagaaggcgatatttgtaggcactcagagatgaagtgtgttgcgttgctgatgccacctgtctcctcctcctccatcatttgcctccttcttcttcttcaaaccaatttcttcttgtctcttgtttgagtctgaggcatatcaacagataaagtcttgaactttgatcaagaattttaaacggagttcttactcttctcgtcggtgaaagaaaaatcgagatgggttcaactccgttttgctattcgatcaatccatctccatcaaagcttgatttcacaaggacccatgtgtttagtcccgttgctaaacagttttacttagatttatcatcgttttccggaagatccggaggaggattatccgtgtttaggagccggaaaactttgctcggagtaaaggcggcgacggcgttagttgagaaggaggagaagagagaggcggtgacggagaagaagaaatcgagggttttagttgccggaggtggaatcggaggattggtgtttgctttagcggctaagaagaaaggattcgatgtgttagtgtttgagaaagatttgagtgctataagaggagaaggaaaatacagaggcccgattcaaatacagagcaacgctttagctgctttggaagctattgatattgaagttgctgaacaagttatggaagctgggtgtatcactggtgatcggattaacggtctcgttgatggtatctctggtacttggtgagtttccctgagatctcttgattgagtaaccaatcagattattggaaacttgtggtgatatttttgtttgtgaatcaattaggtatgtaaagtttgatactttcactcctgcggcgtcacggggacttcctgtgactagagtaattagtagaatgactctgcagcagattctagcacgtgcggttggagaagatgtgattagaaacgagagtaatgttgttgattttgaagattctggagataaggtgatggatgattgatttttacttaaaagagactattgatataaggaaagattccaatgtagctgtatgggtttgttggtttaggttactgtggtactcgagaatggtcaacgctatgaaggtgatctgcttgtgggtgcagatggcatttggtctaaggtaggttttaactgaatagagtataacaaacaactttcgttgttgagtatagaactgaaagattgtgccttttgatttttgtttgtaggtgagaaataatttgtttggccgtagtgaagctacttattcaggctacacttgttacacggggattgcagattttataccagcggatatcgagtctgttgggtatgttgcagtcagtctaaatctcatgcatatcttctctgattatgaatcttttttctgatattgggtctgtttcattctctcttaaagctaccgggttttcttgggacacaaacagtactttgtttcttcggatgttggtggtggaaaaatgcaatggtatgcatttcacgaggaaccagctggtggggctgatgctccaaatggtaaatttctgcattgttttacttctttctatggatcgtatttagtattagttcacagaagcttcttttctaattgatttttcaggtatgaagaaaaggttgtttgaaatatttgacggttggtgcgacaatgtactcgacttgttgcatgcgactgaggaggaagccattctgagaagagatatttatgatagaagtcctggttttacttggggtaaagggcgtgttacgctgctcggggattctatccatgcgatgcagccaaatatgggtcaaggtggatgcatggccattgaggtatctatctaatatataaatccactcaaccttttgactgattttaaagtgttattgagggaaatttcttgatgtattttgcaggatagttttcaactagcattggagcttgatgaagcatggaaacagagtgttgaaacgactacacctgttgatgttgtttcctctttgaaaaggtaaaactaaaacacaatttgtttagtttgggcttctggtggatactaaacatgctcttgaattggttttagatatgaggaatctagaagactgagagtcgctattatccatgcaatggcgaggatggctgcaattatggcttccacttacaaagcatacttaggtgttgggcttggtcctctgtctgtgagtatctttatggttttcactatacatggaaatcattcttgtttgttcatttctaactcaattccaaatcttgtttctgcagttcttgacaaagtttagagtaccacatccaggaagagttggtggtagattcttcgttgacattgctatgccatcgatgcttgactgggtccttggaggtaacaggttagttctatctgtgagttttatctaaagagaacttgatttgacagacct

SEQ ID NO: 31317 - DNA, 1825 bp, Arabidopsis thaliana landsberg
ttagtgtgcatttcgatttggaatgtccggttagaacaaaaaaaatgatttgtcttcattatcttcgaccaaagtcctttaaatttttgaatttgaaccgagtattcattttggttatattggattttaataccatgcatgtagggtttgaatatatttacttttgcctataaatacgtacttataaaaagcatatgtgtacaagtgtgagtggaaaatgagatgctagtaatagtatccgcatgtatatgaattatcaattatgaagagagagggaccattcaaatttgaaggagacgagagagagagagagagtggtcacaattggagaaagaagaggtcgttacgttggattttacgttgcctccatgcacttccttctcctcttatctcgtggtcctctccctctctcctcattattattttatgccattgttctctcaatcccaacaatacgtttttatacggtaatatatgcatggtaaacacacaatttcattactcatttttcgccatatataaccggctggtatttttaagtaagttatgtttataaattataagtgtatatatactcgtgaggttgtcctctttataatcaattggtcgtcgtttgcgactttgctttgaacgcttccaatttccatatgatcatttgatatggaaatttgttgtgttatgttttataaaaaaactttatataagcaatcaagttctaaatcaccaatggttagagaaaatataggtaatttatttgcgttaatagagctagagtgtacttagcaccctagatacatatgaaaagggtctccttattagtcacatgggacgattaagtaaagagtaactcttaacacaacaagggtcaaaacaaaaacaacccttggaaaaataaaggtacaataattgaaagacatgtcgtcgaatttttgtttggttctcgcttgcctacggatcttgtgcgtttcaggcacaagacgcggtcggaggaacctcagagacaccgtgacggtgaagctctgtcataacaccgtcaacagccggcggatttaatcccaacggaagtggcagccatggcctcgtcaatacatctcctatggctgcatccacgctctcttttgactgttccatttataatatatatacacaaaaagtcaaaaatacataattacataatcaaatgcgaaaagtcaaaactcgacaacaatcaattcattatattagattcttaccggatgtaagtctaccggaggacgagcaccaccaaatccaagatttggtttgtacatcgtgtgatgcggcggcagagcatgcgggattccggcaactggcggtgctctaaatctctatacaattaccaatcaaaaatacgatttaaaacatatatatagaaacaaaaaggggtatacatacggaaacaatcttataaatgttggttcattaccgtagctacggtcggtaaatacggagtcgtcccgttatgcatctacatgcaaaaatgctggttagaaagacaagcatatgataaaaatactcggtgtcattcagctttcataatgttaaatactatgatgaaaacaaatatgataaagagctaaagtaaaggtttcataaatgtgggaacttactggatgccaatagggagaatcggagacccaaaacggcggattaggcatggcggtagaaggcggaggtaagtgtttgggccacacatgcggcataatggactgatcaaccgtgggatgtcccacacatgcaggggcgtaaaatgatggtggtggacaggtggcggtgcacagcacgggtggtggtggtggaacccgag

SEQ ID NO: 31318 - DNA, 568 bp, Arabidopsis thaliana landsberg
  unsure (1)..(568): unsure at all n locations
gaaatacgtaatcgaacggatacaaacaattcatttcaatgtccaagattagaggcgaatacccatgagtttgaaacnnnnnnnnnnnnnnnnngtgtttttttaagcgaagccgcgaaatcgaacggataaaaacaatttaattgaatggccaagattataacgtataacccaaaagttgtaaacccgggtcaaaaggatccgcttgttttttaagtgaaggcaagagatcgaacggacacaagcacttcaatcgaatggccaagattataacgtatgacccaaaaattgtaaaccttggtcaaaaggttccgcgtgttttttaagtgaaggcgacagatcgaacagacacaaacaattcaatcgaatggcaaaaattataacgtaagttaagtgattctcagttaaaggttattttttccatgacattaacattttaaacatatgattttaaggtaaatttttttttaactgagaatcacttaacatacgtctcanataatagagtagatataatgttttttgcatatatatcaggatttgaaatctaatcattggnttaataact

SEQ ID NO: 31319 - DNA, 2984 bp, Arabidopsis thaliana landsberg
  unsure (1)..(2984): unsure at all n locations
tcttaggaaacgccagacgagtttagcacatttcgctgtcatttgtgcaaatctcttatctgttatatatggttggggaggttgcatggattcggatagaggcaacggtacgaaaccgtgactagaagaaatatagcttgatggaattgaccaagaaaagaaacaatcaacacacgagctgagatattgcttagcttgatcgagaaacttaacttgttattgcaaagcccatttgtttcataattaagaagcccaaccaatnnnnnnnnnnnnnnnnnnnnnnnnnactctcaagtctagccgcatgtgactttatatggttatcacactatactccatgtgaagcttgcaaaatttatttataaattccaaaagtgggagagttgtttcaactaaaagagcaataagaggattaagataagatgaagtttcaaataagaggattaagttttaacaatagattttgaccccaattttagtactagattctttttgttgttgttgtagattgttactagattcattgtggataaaatcatgttttttgtatttgacagctaaaccattaatttgtatgccagacaacatgaccaaaccgtctggtctacaaaccgaaccaaaccgccaagtctacaaaatatcaaaaccaaacctatcaatcaaacaggaatattcttccaccaccataggccatagcccacatcccctactaactagtgagaatgtagatcataacaaaacccaaatctatcaagcaaaccggaatattccaccaccacatagcccacatcccctactagaatgtagatctttatgaggtcatgtttgaatggtataatgaaatctcatagtaggagaaacccggtttaacacatttgtagaaaaccaaggattcaatcaataaccggaatcttgagatagcacctgtctagcgttgacgacaccaaaattgaaaatttggcatcatttgcgaaacagagagagatccattcaattccaaaaggattctcttttgggaaaaccctaaatcgacccaccaaatttggagactgtgattgagcatgagcgtcagaagttgatgaacaaagtcgacgaaatcgaggatttcagattcgaggatctcgaaatggagacggagaaagataaggaaaggatgatgacgccgacgacgagaatgtcttattcatcttcgtcgtctccgtctccatcttcggcttcatcatctgctgcgtcctctctcgctgccaaggcaattcgagcatcttctgcgcatagagactcttctctttcttctgcttactcgtctccttcttctgctcctgttcccactcctcccaaggtttcatcttttgttcttctctctttctggtgtcgcttaattgttcataatgattcatgggtttactctgtttttgcttcaattgaaatgttccaaatgattcatgggtttactctgtttttgcctcaattgaatcgtttgaataggaggtgaataaggcttatgagtatacttctatgaagagtttgaatgaaccaaaacgaggcttttggggaagtttagctagtaaagctaaggcttttttggatgaggatgatcctaatcagttgcctcaaagtcctaagagaatggagcagagcataccttctgcgacaacttcaggaactaaggttaaagactaggtttttatagttgcatttgctcttccaattgttttgtggggttgcgttcttatggagtagaaatccatttccatgtttcaggaagctggtcagactggtaggaaaagcgagaatccttcattacagagaagattagatgcgatcacttcatcgttgaattacattggtggcaccattggtactgttgttgaggttagtttcttactctttatgcacccgtatatggcacactataggagacatatattagttatgtttttttctttaggttatgcgagttctcacattagttgtgtatacagaggcatatgcattcttgtgtgtatcggtgcatcttctgcactgtactaaatgagagtttgttgggttgagattgttgtttgtctgtgattattcttaggagggtattacagctgtggagaatcgtactgcaggcatcattcaagaaacccgtaaaaagattaaaaaaaagccaagtcttacaaggaaccagcagaatcctgagatacaagctgatttggagattcaactaaaggcatctcgcgacgtaaggtggctgctctgtatcatttattggttcacagcagcaaatttatatctgcttatttccgctgctgttatctcttcagtgaatgattatagaataatcgtttttagtattgatactgagcctcctttgaattaatctcaacaggttgcaatggccatggctgccaaggcaaagcttttacttcgggagctgaagatggtaaagtctgatctggcttttgcgaagcaacgatgcgcacagctggaagaagaaaataaggttctgagggagaaccgtagtggcgacagtcagacagatgacgatgatctggtattttactctttacaaagccattaatgttaacatttctttatgtacatttctgatctttggttgtgtgttttctctcatctataggtgcgacttcaactggaaacactgttagctgagaaagcacggttggctcatgaaaactcaatatacacccgcgaaaacctctatctgagaggagtcgtcgaatatcaccagctaacaatgcaagatgtggtctactttgatgagaagactgaagaagtaacggaggtatatcccattaatgtgtcttcaatgtcttcttcatcagataactcttacaatccaaatccaagtttgttggagctctaatgaaacaccacaacaactatcaggttctgctgttcttggtgtgaatcagacaagaagacancatcgtgcctgtaattgctctgtactttgagaaatatatatactctgtact

SEQ ID NO: 31320 - DNA, 1662 bp, Arabidopsis thaliana landsberg
gctttcttttaaaagctaagagtttatagaaatccgtctgaaaaatgtctccatacctgtgcagatcccttgagaaaaaacgttttggattggaccctgcggttcaggatcatggaagggataattcaagggcttttgtaccttcacaagtattcgagattgaaagtgatacacagagacatcaaagccagcaatattttgctggacgaggatatgaaccccaaaatatctgattttggtatggctcggatttttggagcccaagaatccaaagccaacacgaaaagagttgctggcacattgtaagttaagagtgaccagaaaaaacgattctctgatcagtcataggcatcaatgtctgattaaatctcttgtgttgatattatgtgtagtggatatatgtctccggagtatttcagagaaggactgttctccacgaaatcagatgtgttcagcttcggagttctaatgctcgaaatcatttgtggaaggaagaacaatagcttccaccatgactcagaaggacctctgaatctcatagttcatgtagaaaaagctaaacttcttcttctctcatttgttaacattttcggcttgctttgtccttggatctctgaaactttttttatcaggtgtggaatctgtttaaagagaaccacgttcgcgaggtgatagatccgtctttgggggattctgcagttgagaaccctcaagtgttgagatgcgttcaagttgctctgttgtgcgtacaacaaaatgcagacgatagaccaagtatgttagacgttgtgtcgatgatatacggtgatggcaacaacgctctttctttgcctaaagagccagctttctatgatggtccccggagaagcttacaggagatggaggttgagccaccggagctggaaaatgtatcggcaaatagagttaccatcacagtgatggaagcaaggtgaagcaagtgaattgaagaaaagtggtcgttttaaatcctacttgggttgttgaattctcccgacagatataagatgttggacaaaaacaaagaacaaaattgtgcaatgaatttgctcgagaacagaacatggcgtctggttctggttatgtttcttgttttgggaaattttggcatgaacgagtcaacttttcaatttatatggtcactgtcagcatcagttttgttggtaatttttgctgtagctcggaaactttcaacgggcaagaattcaaatttgtctgccagagtagacttggacttcttagacttgacccctgaacgagatgtctctttctagagaaatctattgccaaattatccaccttccaagttcgagattttctgaaactatgtgggcaaattgcatgtttctcaccatttttactttatctctcttgttaggacaatcatgttgtgcaacagatacgctacagcagggtcagtacttgaaagatggggaagagctaaattcgcctttcaatatcttcaagctcaagttttttaacttgaagaattcaagcaactggtggtatcttgggatttggtacaacagtttgtatctccataatagtaataattatgattctgaggacagagctgtctggattgcgaaccgtgacaatccaatttcgggacgctctggaagccttacagttgattgtcttgct

SEQ ID NO: 31321 - DNA, 3433 bp, Arabidopsis thaliana landsberg
atttttgcattttgcttttaatttctaacgttccaccaaatcacctaatggagtattttaattattcttgaattaaaaactcactcaaagatttgcttcttcccatccacccaggcggattgaagtttttagcgtctttttaattatcattttgtatttataatttattagatttttaaatttataatttgaaaattattatcatttatttattttatatcagacttaaatataaaaatattgtttttgagttgttatatttgttacctaaattcttgccaaaaaaaaaagaaaaagagagaaaatcttctagcttcgaaaacatctaatactgtaatagtaaaatcattaaaacttttaaattggtttatcaaaactatgtcgtatattcttctccttctccacggaacccacacatagtagagaaacaatatgagcagtttatcacactcttgagttaccaattttctctcatttctcattattccttcactttctttcgaggtacttcatacatagtcgtctttctcaagttgttgtggattgtagagaagacctaataagctagagaatggattcgaggaagtctttatcttccatcgatagcttcaacgattgttacgtttgcttgtaacccaagattcgaaggtcaacaattccacggatgatataccttacttgagtctttatttctaaccagttatatgttacaagctaagtctgattcttgtattcttttctaccattgaaaccaataaaatggtctccttaccaagtaaaacagggttattattatgtactctaacaacattttccgttcaatcaatacaagaagcttttggatttcttatttcttttttctttttgggtttttttctttcaacaaaatgattataaattatttatttttctttaccaataagatttggggttttatgaaccatgatgaaatacttttttgtctttttatgaagaaatgatataactctgtttctcctctcttggtagcaattggctttttatttctcaggtaagtagtctcccccttttaaatccttattgggtgttgtattctcccaacaggcgtgagatgttcgttaaaaacaaaaacaattgctcaagagcatggcgtctggttctgttatgtatgtgtcttgttttaggtaataagagtcaacttcaattttgtggtcactttcttgctaattagttgggataacagctgttgcttagaaacttcaacggccaagacttcaattttgtctcccagcgtagtagacttggaacttctgatatgactttgatcacaaacaagatatatctttaaaaaaccactttagaaagaaatctatttgccaaatcatccatctttctgaaactatgtgttcaaatggcatctttgtctctcttcttactttatctctcttgttaggaaaatcatgcagtgaaacagatacgctacatcagggtcagttcttgaaagatgggcaagagctcgtttctgcttttaaaatcttcaaactcaagtttttcaactttaagaattcagaaaacttgtatcttggaatttggttcaacaatctttatcttaatactgatagccaggacagacctgtctggattgctaaccgtaacaatccaatctcagaccgctctggaagccttacagtggactctcttggcagattgaggattttaagaggagcatcaagcctgcttgagctaagctctacggaaaccacaggaaacacaacccttaagctgttggattctggaaatcttcagctccaagagatggattctgatggatcgatgatgcggattctgtggcaaagttttgattatccaacggatacccttcttcctggtatgaaacttggtttcaatgttaagaatgggaagagatgggaactgacatcatggctaggtgatactttacctgctcctggatctcttgtctttgggatggatgctaatataacaaaccggttgaccatcttgtggcgtggaaacatgtattgggcaagtgggctttggtttaagggtggattttccttggaggaattaaatgattatggtttcctcttttcattcatttcaaccgagagtgaacactattttatgtattcaggtgatcagaaatatgctggaacattttttcccgcgataatgatagaccaacagggaattttgcgtatatacaggcttgacagagagcggttatatgttcattgttctcctttcactttggatgaagacagtaattttaattgttataggcgaaattctagggattgtttgcacgctggttgcatagtcccagaaagacagaatgagagtttctatgggttcaggtttttcagagagacagtatcggctttctcaagcaatggatttgtacttaatgagactggtggaaggtttagttcagctgattgccgtgctatatgtatgcaaaacgcttcttgtcttgcctatgcttctaccaatctggatggtacaggctgcgaaatctggaatattgatcctaccgacaaaaggtcgtctcctcaaagtcctagaactatatatattcgtgtaaaaggtacaagttgtggaaatattttctctgccttttatttaactgtcactataagtgcagcaaatctctgtgtatatactactaagttttctggattacaggatttgtagtaaaccatgagaacgaaaaggcggcaacttggctagttgttgtggcatcactattcctaatgatacctgtgacttggtttattatatatcttgttctcatgaaattcaaagtaaaaggtaaaaattttatcggaatcaatccaatgcttccttctcaattgtgctctcttactaataaattcaccactttttgtgtatttttgatccagtgactgttatatttcgcgggatgttctactttttatggggaaaagccattccacaaagtaaggttcagctgaataatttttgtgcaagtgtctatgaaaaatgtccatgttgaattaggaactgtgtttttgatttttgctagtgattggtttcatacggaggaggcttccaacactgagggttggttccacaatagaccaagaaatgctactacgtgaattaggaattgataggagacgccgaggcaaaagaagtgcaaggaagaataataatgagcttcagatttttagctttgaaagtgtagccttggcaacagattacttctctgatgcaaacaagctcggtgaaggaggtttcggtcctgtatataaggtagtccaaattcttcagattttgatattaacttaagtagtttttgatgtttccgttgctctattgaaggggagtttaatagatggggaagaggtggctatcataagactatcattagcatccgggcaaggattagtcgagttcaagaatgaagcgatgc

SEQ ID NO: 31322 - DNA, 5396 bp, Arabidopsis thaliana landsberg
taaaaaaaaggaaaaaatcttaaaagcaacgtaatttgtttttctgtggtaaaaaaaaaaaaagcaaattaaccatttgttggattctgtattttgcttgcatatatcttaagaaaaaatggtggctgatatcctaaccatgttcaaattggtaatgtaaatgaaattatcattggatcagagctgcttacgtctttttaaaatattcttactcatttacgccaaagtaattctgatatccaccatattgatgtctaagcattgggtcggtttagtcaaatttggacacctctggtttcaaattcatattaaaattgagtggcagtacgatgttgtgcggttcgagtcttagttcatataaaaacgaataatcttatgtgcagacgagggtccaggatcgttgcgagaggcttgcaagaggccagaacctttatggatcgtgttcgatgtatcgggaacgatcaatctgtcttcgtttgtcaacgtatcatcgcacacaacggtggacgggagaggacaaaaagtgaagataacgggaaaagggttaaggctaaaagagtgtgaaaacgttataatctgcaatcttgaatttgaaggcggtgtgggaccagacgcagacgctattcagatcaaaccaaaatcgcacaatatttggattgatcggtgtagtctcaagaattactatgatggtttgattgatatcacacgagaaagcactgacatcactgtctcaaggtttgtctcttaaatcttttgaggtttctttcttacttacgcagttagataataaatgcaccaaactgggaaaaaatacttcaaatactagctcaaaacatgaaaaaaaaacaaatggttaaacttttacaaatacatataatatggctctatctattgtgttaattttttgatgtttttaattaataattcaggtgccatttcatgaaccacaacaagaccattttgataggagcggacacaagtcacgttacggaccgatgcataagagttacgatacatcactgcttcttcgacggtacacgtcagcgacaccctcgcgttcgcttcgcaaaagtccatctcttcaacaactacactcgtcattgggccatttacgctgttggtgctggtgtcgaatctcaggtccgtaatcggaagataacatagatgaacctacatttacgattttgccatcatctttgttcataggttcatacatttgacgttgttttgatagatacattctcagtgtaacatatatgaagctggtgaaaagaaaactgtctttaagtacatcactgagaaggtacgtaatatcctttgtacgttcttgaggttcttaaatcattttctttataatgttatagttaacattacgtttttttgtgtttggtgtttaggccgctgataaagagaaacccggagctggattcgtaagatcagaaggggatttgttgttgaacggagccaaatcgtgtcttagtcagggcggagagcgctatgtgttctctccaatccaacactattctgaatggaccgtcgaatctccaaccgatatactcaagaactatctgaaacactcgaccggctggcagaaccttcccctcccactagaccggcctgcgaccaccgcataactattgcttagcgaagtgaattgattggatcacttttggcactaccaaaactatattgcagtagtttcttccatttccacttagacaaacaaaatgatatatcaaatttgataggattgtcgaatttttccaattcaaagttgagatattagtttcaactaataaatatagaaagagaaaaaaagatttgtgttattgcgtattttgagcttgtttgttgtatgtatgaattatctccattagatgaataacaagcctgtggtggttggctcggagactcggtccctctaaaaaggttgaaaatcgtatatcactagtaagtttgattcgtgtggaagggatgatttaatttagtccctctaagaagatcgagtatcatcaaaagcatttaggactcaaatccgaaacttcgtgtaaatatgaattaacatgtacactaattttatgtaacatatcaaatattctttttatgcaattgtaaggttttgagttatctattatttgtcatgattctacaaaatgtgtggctcttcggttctgtcaatgtcatcttccgttgaatattagttgtacaaaagtatttgtggtatttaattaggattctacaaatcttgtaatgtgacttgacttggattattcgctacctaacggtcctcacccaccaaaaaaggaccaaagattctctacatacacatatatgatgatgatcgtagttatatttcacatgatgattaaatgtttagtcacaatacctcataaatatgccatgttccttgttgtaagtcgtaacttacaccttccatgacatcaattaattaagttgttacaaaaaaatatcaaaatactgtaatagggaaaataaattttgaaaacattatttttttccctttcaaaatcttctgcatgacaaagatcgagtctttcgtacaggagttggagtaggtgttgtaacacaaaaatctggcgtacagacatatcctttctccgaaataccctttccgctaaacagctccgacaagtggtttccaatatcttcagggttatatcggaccttccactggccttccgttcccgctaacataacggcatttctatgagcgttgtaaaaatcgcggtaaaccggtaacagttttctcccgatcgaaattctcatctcgtccaacagcttcggatctagtacgatgcactcactctgtgcctcgcacgtgctctcgaaagtctcgttgaactttttgaattgcatcatcgcttcttcgggcgacatctccaccgcctccgaagtactaatcgccggacacatcgacgccaatggaccccatgccaaccgctcgtagcttcttgcgaactgtctaactttctctgagtttttcgctatccaatcgttgccgagaacatgcttcacgttcgtggatcgagcacgtgagacaacgtgttggagattgttggctaagaagagatactgcattgagaagtccttgtacatttcagctttgccgtcgattttacagaggaggacgagaatcatccacgcgaatcgtgcttttagctccgacactggagattcttcagattctgagacattgaagtaagatttaggaagcaatgctttagcggaagatgatgatgatgatcccttgagtatattaatgagagcgttactgtattccgcgagtcgagagatgtgattcatggcggagatagtcatcggatgaactcctccaccacgaaccactgtcttggacgagtctttacgtatttgagattcaaaatccatcaagtgagcaagaattgactcgcttagtcggctaagtgagctgtgagcttgagttcgaacattcgaaattgatggaaacgagaagattgcttcaatcgcaagcaagttatctgtgatcgtgcaatacatatctagcaacgggaaaatcttctccggatgtggatttttcttgtctcttaaggtgatagtttccgggaatccaaacagaagaagagctccttccttggagatgtctcggaaacaaaactctctaagagaaacagaggattcgaagatttcatcgcatagagtcttttcgccattgaagagagtcttcatcgagaccttaaccgcctcaaaccacctattcatcttcaactcaacaacctcacatggcatctttttcgccttggatgagcttattttctctactccgagacggtaaatcgattcatcaactatcgattttcgaatggatttataagtagtcgcacactctttcgcataacccgcagcgatcatgcaatctgctatggatttcagctctgtcctagagttctttgacacctcctcaacttcgatgatggagtcaccagctgaacgagactcgtgccaaacatcatcatcgttcgatacgacagatgtaggagatctagaggagatggattcaggatccaaatgcgcacggttcattgaaagaatctggagaaactctttctgaagtcgtttcatagcgatctgcatcagattctgagctctaaggagtttctccgaatttggatcttctctaatcaacaaatccatggcgttctgcagttccttcacgcgtttaacaaacttcttcgcgtctcgcttgctctcgcaaaacagagaataaaatttcttatcggaaacatactctgtgttccatttctcgataatctcggctgcattgtcgatggtcttgttaacatccgtggactcgtgactcttgctaggtagtgagagagaaggcctcttccttgaagaagtcactttagagaagaaactaaaaccgctcttgctcctcatctttgatcttacgtctctgttttttttttttcaaattaatgtcgttgcaggaattttgaaggagaaatcaaatggttttaagggtaaaatttacctttaatattgaaacgcctcggcttgtatgtggattcaagaactagtggtgaaaagggttcccttttaaagaacctaccacttaatccaaatgcagggaggcgtcgttacgttagaacagaaactgtagatatttttaatctgttacgcaaccataatgaaagatttaggtcgtttatcgttatggttacaaaacaacgtcagcgaaatatggggaagaatgtgccgttggcctttgactcatcttttccgtacacgtgtctcttacttacaaatacatttttgaaaaatgagaaacatgacgatctttttatagatatatcattaattaaacattacagacaaatgtgtgacataatgttcgaaatagaaacccgaagatttttaccttaaactgtaaggaaaaataaaaaataaaacatagctatcttcactttatatgtcgttgtccatttactctttatgaaatagtaataatgaaaaatagtttgttgcgtaacaattttggcatgaaaggttaactactaattaattagtgtttgcttttacatttaagacgattatagactctccttcactttaggacatggattgccttgaccgacaagaggaaggagaagaggctgacgaattccccgaactacccttctctctgaacaaatcagacaaatagttttcaatatcttcaggggtaaatcggacaactgagttcaggtttctcgcgccatcgccttctcccaagataacagaacctctcgtgttgtaaaactcgcgatagatcggcaccagctttctcgatatcgatactttgatctcgtctcgtatatttggatcagctacgacgcagacactgtgcgtactatacc

SEQ ID NO: 31323 - DNA, 4428 bp, Arabidopsis thaliana landsberg
  unsure (1)..(4428): unsure at all n locations
ctccctcaacaccaccagcctgaacaccaccaataacacctgtaccaccnnnnnnnnnnnnnnnnnncattttaccaatagtaactccacccctcactactatttcacattcaccagttgcttcaccgtccaccgtatctccacctgttgcaacaccaccaatagcaactccacctacctcaaaatcacctatctcaactcctcctatttcagaatcaccagttgcaacaccaccaaccgcaacatcaccaataaaaactccaccacccgcaaaaccacctgttgcaactccacccatcgcaaaatcgccaattgcaacaccgcctactgcgactcccctagttgcaactcctcctattgaaaaaccaccggttgcaacaccacccactacaacaccgcccaccgcaactccacctattgcaaaaccaccagttgaaacaccaccaatagcaactccacctaccgcaaagccaccaatctcaactcctcctatttcaaaaccaccagttgcaacaccaccagccgcaacaccacctataacaactccaacaccagtaaaaccgcctgttgcaactccaccgttagcaattccacccgtcgcaaaacccccagttgtaacaccgcccaccgcaacaccacctattgcaactcctcctattgcaaaatcaccggttgcaacaccgcccaccgcgacaccaccagttgcaactcctcctattgcaaaaccaccagttgcaacaccaccaactacaacgccgcccaccgcaactccacctgttgcaaaaccaccggttgcaacaccaccaatagcaactccacctaccgcaaagccaccaatctcaactcctcctatttcaaaatcaccagttgcaacaccaccagccgcaacaccacctatcacaactccaccacccgcaaaacctcctgttgcaactccaccaatagcaactccacccatcgcaaaaccgccagttgcaacaccgcccaccgcaacaccaccaattgcaacttctcctgttgcaaaaccaccagttgcaataccacctataaaaactccaccacccgcaaaaccgcctgttgcaattccaccaatagcaactccacccgtcgcaaaaccgccagttgcaacaccgcccaccgcaactccacctattgcaactcctcctattgcaacaccaccggttgtaacaccgcccaccgcaactccaccagttgcaactcctcctattgcaaaacctccaacgacaacaccgcccaccgcaactccacctgttgcaatgccaccaatagcaactccacctaccgcaaaaccgcctgttgcaactccacctatagcaaatccacctgtagaaaaaccgccggttgcaacaccgccaatcgcaaaaccgcccactgtactgccacctattgcaaaaccaccagttgaaacatcgcccaccgcaacacctccaaccgcaattccacctgttgcaactcctcctgttgtaaaaccaccggttgctacacctcccattacaaaaccaccggttgcaacaccaccagtgacaaattcacctaccgcaatgccaccaatcgtaacgccggctactgtagtaactcctcctattgtaaaatcaccgatcgcaactccacctgtttctactcctcctatcgcaaagccacctatcgcaacaccgcctgttgcaactacgcccattgcaaaaccaccaattgcaacaccacccaccgtaaatccacctgttgcaaatcctcctatcgcaaagtcacctattgcaaagccaccaattgcaacaccccccaccgcaatgccaccaatagcaactccacctatcggtaagccgcctgttgcaaccccgcccatggcaaagccaccagttgcaagtccaccaattgcaacacctccaatcataaaaccaccagtcgcaactcctccaatcacaaaaccgccggttgcaactccaccagtagcaactcctcctatcgcaaagccaccagtcgcaacgtcgcctattgaaactccgcccgtggcaaaaccaccagttacaactccacctgtagcaactcctcccatcgtaaaaccacctattgtgacaccgcctattgcaactccacccatcgcaaagtcaccaatcgcgccgccgcctattggtactcctcctattgcaaaaccaccagttgcgacaccaccaaccgcaactccacctgttgctacttctcctatagcaaaaccacctgttgcaacgccgccacctgcaactccgcctgttgcaaaaccaccggttgcaacaccacccaccgtaactccacctgttgcaactcctccaatcgcaaagccacccggcgcacggccacccgttgccacaccacccgtagcaactccacctatcgctaagtcgcctgttgcaaccccacctatgacaaagccacctgttgcaagttcaccaattgcaactcctccaatcgcaaagccacccatcgcaacgccacctacaactatgccgaaaacttgcccaattgacacgttgaagctaggctcgtgtgttgaccttcttggaggtttggttcacattggaattgggaaaagcgccaaggaaaagtgttgtccagttgttgaaggtttagttgatctagacgcagccgtttgtttatgtaccactattaaagctaaacttctcaacatagacgtcattctccccatagctcttgaagttctccttaattgtggaaaaaatccaccacctggcttcaaatgtcccgcctgataaatgtaaagtgatgagagtctctcgatagctttgaaggtttcatattttaagaatttgttggtttcatgatctcttttggaacaatttctttacttgcatgtgtgcgattaataataataacttgttttatttaatacaataaaaagttttttagggtttgagctcttagtttctctgggttttttctttttctttttacaagagttagtttttttgagttttcatattgtattcttaagaaagaaaaaaagctataaacgagatagcttttactttaaaaagaaactgtttatttacttgcgtatttcgtgtagtaaaaatcaaatacatgctaacgataaatgatgttataacaagggtcatacttcatatatgaatcaaatagttatgtaatttacaataatatttttatcgtgtcacatgttatataacacgttagttgtattgtttttgcttcacttttaaaagacattatcacacgctggttgtacgaaaagttaagtatctctaactgttgttttgtatatatgcatgcacaagtcagtcagtataagtcaagaatcggaacaaagggacaagcttgttgtacaaaattcaataaaacatatactatccaaagaagcaccattttacattctcatatggtttaagtaaatggatttgaattttcataatcagagatattcaagattaatggggattttcaaataaattcgctaatcaatcgaaagaattaaccgtatgtctttagcatgctcatatatttaagaatcgcttccagtttcatgccttaatgaagagctagctctgcttgttatagtattttgtgatcttttttttctttattaaaaaaaaattgtagacataaataatataaatattttttttatatagttttggtgtttacttttacaatcgattaattagcactactgtcatattagctagtcaatgatttattagataaataactggtctttgtttttggtgtcgttgccacatgcttttgcgacacaaaaaggagaagaaagcagttttgactgagtttcatagctttaacaatattatctcttccaaaaacccatcagatcttcagtccttctctaagatagttgcaagttgcaagcacatagtcagaggttaagtaacgaagaagaagaagaataaaaaattaatactaaggttccaatgctctcttcacatggtcttctttggaatgacatgtgggggtgaagatggaggtgtggaaacgtgtttcgtgagaatggaaaatgtcgtgatagagttcgatttgtgaataatatagttaggaaagtttctcaagcgtggattgtgagtagtggtgggttggggcagtattcaagggttgagagactaattgcttggacccctcctttggtcagatgggtaaagctaaacacggatggtgcatcacacgaaaatccaggtttagagacgacatgcggagttttgagagatggggagggacaatggattcatggatttgcttttgttcggttccagccccgactctaggcatgtgttaggagtgccatagctcaaggtctattcatgtttatttttttttctaaaaaaatagggtccaaaaatataaagaaaatatctcatttttcttttcagctcaggacttgagtttgtgagt

SEQ ID NO: 31324 - DNA, 1677 bp, Arabidopsis thaliana landsberg
gtgtgatggcgtgaaattgagcttatgtttctttcatcagagcttatataaaggagagactcccggctaagtggtcactgaaaatggggaaacatatgttcagcttgggaagaatcaacattatttatgatctaattcgactttgatttcttctcagtaatttttcttatcttcgttattgtggtttcttgatcacactttggtttctttgtttaggaccttctgaagttagaaagacttcaaacagagcttacagagcgtagtggacgtcagccaacctttgcgcagtgggcttctgctgctggagtcgatcagaaatcattaaggcaacgtatacatcatggcacactatgcaaagacaaaatgatcaaaagcaacattcgactcgtaatttcgattgcaaagaattatcaaggagctgggatgaacctccaagatcttgtccaggtttgtgcttttctctacttattgtttgtgataattacatctgttattaccgtcctgatgaaagtgatagatattgaaaacttgctaacaaaagttatagtgaaccatcaatttgtttaaaaaaagtctcaaaatggtcacaggaaggttgcagagggcttgtaaggggagcagagaagtttgatgctacaaagggttttaaattttcaacttacgcccattggtggatcaagcaagctgtgcggaagtctctctctgatcagtccagaatgataagattgcctgtaagtcatcccaaatgttttgttttttacttgtttaaacaaaaggtgtgggattatgcctcacattttaagggatgattggcagtttcacatggtggaagcaacatatagggtgaaagaggcacggaagcaactgtacagtgaaaccggtaagcacccgaagaacgaagaaattgcagaggcaacagggctatcaatgaagaggctcatggcggttctactctctcctaaacctccgaggtcgctagaccagaaaattggaatgaatcaaaacctcaaaccttcggttggtacctcctgacacaacacacaccatataagatattcttgttgtttgtctaaaaatagtaaataatatgagatgggtttgtaatgtaaaaatatgcaggaagtgatagcagatccagaagcagtaacgtcagaagatatactgataaaggaattcatgaggcaggacttggacaaagtgttggactcgttgggtacaagggagaaacaagtgatacgttggagatttgggatggaggatgggagaatgaagacgttgcaagagataggagagatgatgggagtgagcagggagagagtaagacagatagagtcatctgcattcaggaaactaaagaacaagaagagaaacaaccatttgcagcaatacttggttgcacaatcataattctttttctcttcaatatggaatgttttgtgcatagaacccacccacctgagcataacaagcagtaaattattactttttagcatttacgattcttgtgacaactactaaatcgaaaaaattattttaaaactaaaaagaaattgttgtctgaaaaacataagtgatatacaaccataaataaatatctcttataagaatttgggagaaaaaaaatcccaagattagagatttttgggtggagaaaacaaccggctaagacaaaaaaaa

SEQ ID NO: 31325 - DNA, 1739 bp, Arabidopsis thaliana landsberg
taatattgtatacatctgctgcaaactacacatttttatatctcaacatgtttgttatagaaattgggtaagggaaacgctccttcatcttcaagttaaaaatcaaatcttaattagtgaagacaaagaagaagaagacattattttaagtgagttctctctctgtcacactcacaaagctttatactttctggctactgcaagctcatcactgaaaagagcttaaaccagagagatctgataagagaaattttagagtctctctgcttcaacaagatctacatcgaccaggttcaatatttttctctactgttagttcgtgttctagctctgtttcaacgagatccgattctgtgttttcgatttcagtgctaaagttacggtctttgaatctttctatgttaggattagtcttttgaatccataaactcaagatttcaattgttaaaggctaggttttgattagtttgaattagctagatcctttttaacagatcttgatgtttaagctcaaagttgtgtcgttatactgagaatcaagtttgtgatttgttgggaatggtttcaggagattagaaagaatcatgggttctaagcataacccaccagggaataacagatcgagaagtacactatctctactcgttgtggttggtttatgttgtttcttctatcttcttggagcatggcaaaagagtgggtttggtaaaggagatagcatagctatggagattacaaagcaagcgcagtgtactgacattgtcactgatcttgattttgaacctcatcacaacacagtgaagatcccacataaagctgatcccaaacctgtttctttcaaaccgtgtgatgtgaagctcaaggattacacgccttgtcaagagcaagaccgagctatgaagttcccgagagagaacatgatttacagagagagacattgtcctcctgataatgagaagctgcgttgtcttgttccagctcctaaagggtatatgactcctttcccttggcctaaaagcagagattatgttcactatgctaatgctcctttcaagagcttgactgtcgaaaaagctggacagaattgggttcagtttcaagggaatgtgtttaaattccctggtggaggaactatgtttcctcaaggtgctgatgcgtatattgaagagctagcttctgttatccctatcaaagatggctctgttagaaccgcattggacactggatgtggggtaagtcgatttctgtttgatctagtaacatatcttattcatttcttagattcttattgatgctaatttaccatctctaggttgctagttggggtgcttatatgcttaagaggaatgttttgactatgtcgtttgcgccaagggataaccactaagcacaagtccagtttgcgcttgatagaggtgttccagcgattatcgctgttcttggatcaatccttcttccttaccctgcaagagcctttgacatggctcaatgctctcgatgcttgataccatggaccgcaaacggtaaatattaactatcaaattaggcgaaaatccatttcttgcttgtactcatattggtgtctttgcttcttgattgcttgtacagagggaacatacttaatggaagtagatagagtcttgagacctggaggttactgggtcttatcgggtcctccaatcaactggaagacatggcacaagacgtgtaaccgaactaaagcagagctaaatgccgag

SEQ ID NO: 31326 - DNA, 4357 bp, Arabidopsis thaliana landsberg
agctatagccagactgaaacgtaatcttgacacttatttctaaaataaaaactaaccagccgggggggatgttgcgggtccagctgatgacccggtagagaattcctcgatattccatggattcctagtccgtcccccgaaccagatatcatcataagccatagaacccgtaacaagctttgctactaaaactgcacctgaagcttttaatctaaacaaccaaaaaaaccaagtgtccaatggacgttgtaactccaatacagcaaaaaggaaaatcaatgaacatagtgaaattttattttcaggaccttttgtaaacccatgcttcaatgtcaagaaattggtctttgaaagaagttgaaccccaagttgttttatatccgggaactgcaactatatcctttaaaccatatggaatcccgtgaagaggtcctatcacgcacaaaaatttcatagtaagaaacttgaaacaccaatccatcaaacagatttgtatgtggcattagagattccatcaaacagactatacggcactagagaaagataccaagataagttccttgagagagtaaatcatcagcttctttggcttgtttgtatgccagttcttcagtataagtaactaccgcttcaagaacatgattgtacctttcaccattaacaaaatcagcatcatgtaaaattccctgcaaacgttcagtgaaaatggaagctcccttaccgttttaactgcttaagataaatccgaacgagttctttggaagtaatttgtctcgtctttataagttctccgagttcaagaacctgccataatgcattcctctagttagacgaatagaccagtctatcgaaataacaaccataaaaaagagtgatgacttacgctcatgaaggcgatatcttcttcatctctagggagttttactccggatgccgaagggtatttgaatctcttgtcttgcactcgttgaacttctctgttccaagacggattaaacaccaacggggatggattttccaacccaccattcttagtagctactagtttccgggtggctcgatatataggaacattcatttcagtagccccctttgcaatctcctgtagctatatagaccaatcacaaacatcaaaactccattatcataactgataagtaaaacatacactttcttactcaaagtatgatttagaaacccaaaatggctatctaaatgaacaaatctaaatcaattcaaaccaatcaggtaaaaacgtagaaaggtgattccttgaatcattacagaacattaacagactgttaagagaatcaaaagacttactttagtttcattgaagaatgcagaatcaatcaactcaaacatgccctgaagacacttagcttccatagtcttatctggtagttcagttagagtaactgtcctgatcataaacagtgtaaataacatcagctcactgtctaaaaccacaaagttgaaaaaatacaaaaaaatagattttcttttacctcgtcaaagttgtaatcttacggcaaggaacactcactttccggtccaagagtttccacagattcttacaatttctcaccatttcaatagaaggctcacatggaagaagacgggagcagagaagcttcgagtcagaaggatttgcgtccgcacaaaagaccgttaaacctaggaggaggcagaggaataaaagcggcgcgcatgtacggctacgaggaagtgagccacgcgtcgctaaacaaggtcgtgcgcttggatcacacgtggcgatcgatggtctcgccatcgtctcggctagtgtgattcgagcttgacaacggtgacagtgaaatcgttgtttttgggtttaggagataaacaagaatcagacggccgttgactttgacgctgctccgaggaggaactcaattcgaatgcaaaactggaaactggataaattgatcattaattagacgataatcgagtacttataatatattattacataattactcaatgataaactaattttgtttatgatttaaagatggttaaaaccggtttactctattgagttttcgtcctcagcagtctgcatctgacttttaagttttaattaaacataaattaaataaaagagagaataatataattatccagctagattgcttcgttgcctcaaaggaaaaagtaacaaaagacaaaaactttcaattatgtgaagaatcgtacacctttcttatcgtcttctccatcgtttctccctgaagatttgttctactactctttttgggtatatctgtttacttgaatctcttaccatgaaagttcttcaattatttccttacttaaatctaagttgctttatgttgcgtttgattaatgggatcgtacttttctaaagttctagccttttatacgaaaaagcaacttttcgtgattttcttcaattgaatagctaaaattaggaaattttccttttcagtgttgtttttctttttctattttctttcttttctcttcttcttcttcttcaagcgatgaaccagaaaagttttgattttgattttgattttggtgaaccaggaaagtggtactcgatctgtggtttgttgattctgaattagtatattcctggaaaattctgtaagtagatttatgataactaatctgaatttcatttagctctgattgttgtgaaaattgtgatagttttgcagatcaatagctattcctaagttgttgagttacacaacaggttcattgatgcagagttgttcttgtaacacttgatagctattccctaagttgttgtggcttgtctcaggatcttcttggcttttaggttaatttctatgacatttagatactagggcattgttggctgtgatggactcattgtgatcttttactggctcattgagtactgaaccacagatctcttaacatcttcatgtttttggttttctgcttgtgttctttggttttgtgagtggcttctatctgtatctaatttctcattcgtcaggttcagtttcataatttaaacaagatgcagctcaaagtccctgaacatcaggttgcaggacacattgctaaagacgggaagcctggtcctctcgtagatgacaagggtcggttcttcaagccacttcagggcgattctcgtggtgaaatcgaggtaaagttctacgaatctttctcctcaaacacagaggttccagaacacatccatagatatttcccggtgtatcacggcactcaagcagttgaaggttctgatggagcagccatgatggtgttggaaaatcttcttgcagaatacacaaaaccatcagtaatggatgttaagatgggttcgagaacatggtatcctgatgcatctgaagaatacatccaaaaatgtttgaagaaagacacgggtaccacaaccgtgtcatcgggtttcaggatctctggtttcgaagtgtatgatcacaaagaatcgagtttctggaagcccgagaggaagcttcttcgcgggctcgatgtagatggagcgagattgactctgaggaagtttgtatcatctaactcactttcggacactggctcgaaacctgactctgcttttgcctcgagtgtttacggcggttcccacgggatcttaacgcagttgctggaactcaagacctggttcgagaaccaaacgctctaccatttcaactcttgttcgattttaatggtctatgagaatgaatccatcttaaagggaaatgatgatgatgctagaccacaagtcaagctggtggattttgctcatgttcttgatggtaatggtgtcattgaccataacttcttgggtggtctttgctctttcataaacttcattcgtgagattcttcagagcccagatgagtctgcagattcttagatttaagttaatttgtttgttatggctttggctgattccaatttttggatataaacttatgtttccttcacatatgtacttgattacctaaagagcagaatacattcgtactcttttctcaaagagtattccatttctaggcatataaaaaaattccatatttgaactttactttgaatgttacttgtacagctaaaaaagtttagcgccaaaagaggaaataattcacactaatagtaaatttcgtaaataattaagagtttgtttgcagtgagatcccaaatattactaaaagtatagggactgaaatgaaaatcgcttctattaaaatcagtctgctctgcgttccccttttcaaattcccagtcttgcgcgcatcgttgaaaaaaaagaagaccaccaccattgactgagaatggtgctactttgtttccgcgtggatctgcggaatatctc

SEQ ID NO: 31327 - DNA, 727 bp, Arabidopsis thaliana landsberg
ttttagttcagattggattttgtgattttatagacaagtccacagttaaaaaaaaaaaaaaaccatgttgtttgccaattgcatgaataaaataatttacatgcatgttagaattacgttttagtgtccatatgtacttattagtttttttgttttttttttgcaactacaacatatactaatgttgatgttttttgtgcaactaaaacatatactactataaacatgtaaattttgattgttaagaaatgaggtgacgttaattaatcacttgttccacactgatcacacttttaacctcgacttttagtagccacaagttttatttaaaatcctaatatgattggtttcacgaagtcatataaacagaatatatatatgtagaacgtttcatccacttactttagagataatgaattcatgacacccaattcttatgccgaatcaaaccggactaattaacgctaacgtcaccgaagcaaatcaaataaaaataacaaaaatacaaaggaagaaatcatagaacactgaacatatccgaataatatgctatatatacaaagaacctctcaccacttggttctcaggaaaaagcacattctccaagggtttctctcctctctttgactaactcagttttcttatatacagaacactaatttgacaatgtttttgtcctcgaggatcctaaaagaactccaaaactttgattggtttttcttgctct

SEQ ID NO: 31328 - DNA, 2288 bp, Arabidopsis thaliana landsberg
  unsure (1)..(2288): unsure at all n locations
cctaccataataatgtttaaaacgataaacaaaaaaaaaaattgaacatatctatcataaattgggttaatgggtattgtggcgtcagtcagcttaattagtattgctcagtcatattaaacgttacaaagtccggatcgaattctgaccgaattcaaacggtaaataaatcgaagttacttattacatggatttaaaagcaacccactataaagcccagtgggtttttagaacccaaataggaaaacgacgtcatatcatatgtaaatctcacatcactcacgtcgacaaatcggcatgaccaaacaacggcagagttctcacttnnnnnnnnnnnnnnnnnnccaaaaggtttagggttttagcttcatccttctgcttcaaagcttcaatcttttctctcgattctcattttcaatttcataactgattcacaaatgcaaaacttcgtatacccataaagttgaatttgtcgtctgcaatgtctcagtcactggttcgagcaatctcagctcggaagaatcaattcagtcttggtttttactatagatgtctttattctaagctattgcattcccaagatcagattattgcttccaattgctccaatttttcatctttaggtatataaatctcatttctttcaatgtctgcttatatgaatccaaatttgttccttacgttttacttcttnnnnnnnnnnnnnnnnnnnnnnnnnttagacatagaagtcatcagaataggttttgtagtaatttgatctcagacttgaatctagttcgatccacaaatgggtttgccacggtttctgatgaatcaaatgttgacaatggtgagaaacttgtggataagaagccaaagattttttacaagaaaccaattgatttcaccaaaatagatgccaatttactacctacggtgatgcttatgggcaggccaaatgttgggaagtctgctttgtaccatcggtcagtttcttctgtgtacgtttaaaatatgaaacataaggtttgatattattgtggatttagtcagttgtgttgttgtttagattgatccggaggagggaggctcatgtttacaacactcctgatgatcatgtgacaagggatataatagaagggattgcaaagttaggtgatttaaggttcaatgtgttggactctgctggtatagagactgaggtttcttcgggtactattcttggtagaactacagcaatgacggctaatgtgcttgcaaggactcagtttgcggttcttattatcgacgtgaggtgagattttaatcccgagttgcagcaaactaatatgatgcgagtgttcttttttccttatagattgttgtcttgttcatgtttttgatagggctgggttgcatccactagatttagaggttgggaaatggttgaggaagcatgctccacagattaagcccattgtggttatgaataaatctgaatcaatcggctctcttgatgaagttgcttcagaggcccttgcactaggttttggcgagcctatagctatttcagccgagactggacttggtatgaccacactttatgaagttctgcgccctctactagaggattacacggtcgaaatgttaaacggtaatatacccgtatcaagataatcatacctcccttaaatttcttcttcactgaacctcgcagtcttataatagatataggcagtcaagatgatgttctgaccgatgagaatctctctgatgaaatcgacgagtccaagttgccattgcagttagctatcgtaggtaagcctaatgttgggaagtcaaccttgctcaatgcattgttggaagaagagcgtgtattagtgggtccagaagctggcctcacaagagatgctgtgagagttcagtttgagtttcagggcaggaccgtttacctggtaagattagaattcttatttttcttatactctgactccaactattattctcttgatgttagacagagaagtggaaccagcgttcattattattcactttgtttgatgtttagaccggatatctgttaaggttgatactgctgggtggttggagagaacagagcgagacaaaggaccagcatctttgagtatcatgcaatcaagaaagagtcttatgcgggcacatgttatcgcgttagttctcgatgctgaagaggtttgtatacacacatactctcgtgattcatgtttttttttttcctgcagaactgtgaaaacagaagaaagaaaatcaagagatgctcacgctatgttttgtatttgcaatatcca

SEQ ID NO: 31329 - DNA, 1426 bp, Arabidopsis thaliana landsberg
agtaacatattgatatcgtggaaaacaatttaaattatgttttaaaattattgatctgcgaaaaccttggtattttttcgttgtttattctaacaaaagttttactaaattatgttacaaaaacgaatgacttttggtcgtgaaagttctttgtttttgtagaggcacatatatcgttttcattcactatatattcgcgtaaaagatataaagcaaaatataaaatgagttatgtaaattttattcacctggccgatttttttttttttcaacatccctttgttgttgcttcgtcttcatagaaatttgtcagcatttttttttctttttttttgtcgctgtaatttattacctttttatcatgatgatggcttttgttgattccggaaattactcaatcaaagttaatcgtaatagtttaattcagtcatcttttttgttcaacgaaaatacctagaattgtctcgtttagttggaggcgccgcaaaaattatataaaaaatgtctacttttttttattaaaaaaaagtcgtgaaaaacactatcatttatcctttaacaaaaaaaaacacaataatttcgctatttgtcgtccgataatgttttagccactttaagcaatactatttaaaaccaaaatttgtatttcatttgaattttcattctggcgtgtagtaaaattccaagccgacagcgtaaggcagacgacgtgtacctagtacgtgccacgtgtatcacaccttacacagcaatctgaccgttaatttttcccgaccaatccacgtcatcgtcacaaccgccgttggatccacgtactataatggatatgattaattgtttagaggtctcacatataaatttaatactagctgaaacggtaaataataataaaaatagttgttggccatatgtccattacattttgtaacgtctgaccagaaatggaaatggttgtttttaaatttgaccagaaaattcaaactaattaatggaaagttatgtttttggtggattttagctgaccattaatgatagttttggtgtgtacttaagctacttgacaaatggaatatagtgccaaacaacaaaaatatttggcgaattaattagtgaacaaaaaaaaaaatattaatttatgaaatatttgaaaatgctcagtatttctgatgtaactttataagtaagggtatttaaggttttgcttttatagtttatgataaattctcaaaagtagtaatatttgtttacccatttatatttaatatttaaaaatgatgatatatttctgataagatacgtgaattaagattatataaatccttactttggatctagatatgtaataatatgtcaactcttaaatgtcataacatttcaagttatttgattaatgaccattttttaccctaacgttatattaaaatca

SEQ ID NO: 31330 - DNA, 302 bp, Arabidopsis thaliana landsberg
caaaaatgccttcacgtgtcttaaaggcagttttccactcatcatcggggcggatctgtacttaatggtagccactcgtcaaatcgatttttgaaaaaatataagctttaccaatttgatccaccagaccgtcgagtcggggaataggaaaacggtagcggactgtgatcttgttaaaggcgcggctatccacacacatacgccatgtcccatctttcttaggtatgaggagagccggaaaggcccaagggctgagactctcgcgaatgtgacccttactaagaagatctttaacttggcag

SEQ ID NO: 31331 - DNA, 4313 bp, Arabidopsis thaliana landsberg
  unsure (1)..(4313): unsure at all n locations
gatatctaagaagccttgaattattcagagagtcgtcttgaaagtaggtctgcgaaattcaggttataggctgaagcagacaccagaataggcgccaataataagaaataacgaagaagagtgaatcctatggtgcaaagtaagtgcattgcacaaaatgatgaaattttcaaatatttgtgtgttttgtattagtctttccttcattcttcatgttgtcgtaataaaaaaattattaatatgttatatgttatggtgccacctacctaaaaaaatatnnnnnnnnnnnnnnnnnnnnnnnnnnnnnnnnnnnnnnnnnnntataacggctaactcggataataaaaaaacaaaatttcaattttaaaacaacaaacaaaaggaccttagttgtatgaaatcaataacacaacacactaccgcttactcgaattaagcaaagtatattacataattggctcttcttattatattttgtttgtagttttaaaagtatgggtaagagagaactaatgagcgagatataaaaaaggaatcaatgcttgagggtttgatgcatttcatgtcaacatccatgattcatcaattattgttttagttttaataagtgaggatgttacattaattctaatacctacatatctatatgcaattactttcttttttattaaaaatgacaatgtttgagggtttgatgcattgcaaatagatgaataaatggggttcataactaaatatgttaaaaataaatattttatctgtaccggcaatccgcttgtactgttcaacacatattttatagtgtttgaacggtttgatcctcatttgtactgttagatttacttgatccgtttcttccgatatgctttacctatttagagtttatatttttgaaaatattggtttttgaaaacaattgtagattgtttacttgatatatgcatatatttttcttgatatataattttttgtatctcttctccattaatatggagttaatattataaaaacagctttacaattatgagagatatagtttttttagttttttttgtgcatgctgagatagatagttatattttattggtaacgtgtgtagttgataaaaatgttagtatatttagatgtgggttttattttataaattatagcttattaaatttaatttttcattagataaaattattgcttatgagattatgacgttgaaaaaaacaagatttaggaaatattttgatttccaccgtaaattgtagttttttactaattatatttttagtaatctttatttttcttatattaactaagatttaaattttaatatgacgcatattttagttcagataaaagttttggtagctcttataaatagtatggcttgagataaacaaataaagtttttcttaaaaatacataatagtttcttgttccatgcatgtattctttgtattattgaacattcatataaattaatattttggcttttatatatacaactaaaaaaatgaaaaaattgagaatgtaaaggtaaaacattattgttattatagtgagtgatgtcattcatctttgcgatgacattagcaagataatgtcatgattttctatatgacataatgattatgtcagccaatataacttactaactcatgttggcttttttttgtttcttatacatacgcatctcaaacatctttcacagtaacaaaacaagaactcgaaatctccatgaggtgacgaattcaagcttggatcttgcttaacacgacgtttgattgtcgagaaagcaataaggggtaagaatcctcttctcatggcttaaaagctcttgtattaaaactgaattcaaaagtcaaagatgattacaatggttgtcgaagacaactacttatagcatctaagagataacaacaaggagatttagatactcctaaatctaatctaaagaagattgaagttaatccttctaaaagaaaaacaaaagagaagagaaaacgtatgcgacaaagcccatgaacgtatgaacgtatgcgacgaagcccatgaacgtatgaacgtatatgtgaagcccatgatcgtatacgtgaagcccatgaagatgcgctgcatcaggtccctccggcggggagagggttcgaccacgaaccaggatcctcattgtcgccatgaaacggagacaaaaacttcacattgaaaacatccgaagtttgtaaatagggaggtagcttgatgggatatgcattggcattaatacgttccaccacctcaagaggtctaatctttcgcgacttaagcttgttgtactcatggataggaaaacggtctttggtcaagacaatccacactaaatcgcccgggttaaagattaactcccggcgcttagaatctgccgcctgtttgtacttctccatggaagcttctaaattggactttgcttctctatgaacttgttgaagatcctcaacaaggtccaacacttgaccatgtgtacgtgtatgatcaagcagtgttgttagatccaaaggacaacgaggtacaaaaccacagacaacccgaaatggcgcatatcccacacttcggttaaatgcatgattatgcgcaaactcagcttgacaaagcttgacgtcccaactcttaatattatcaccgaccaaacagcgaagaagatcgcctaatgctcggttagtgacctctgtttgagggtgatatgccaaactcatatccaaactcgtacgaagaagcttccacaaggacctctaaaaatgacttaagaatcgagtgtctctgtctgatacaattgacattggtagtccaagaaggcggtagatttcccggaagaagagagacgccacaataacagcatccgttgttttcttacacggaatgaaatgagcaattttcgagaaacgttcaaccaccacgaaaattgagtcattacctcgttgagtacactgcagtcccaaaacaaaatccacactaatatcagtccatggttgtgttggaattggtaatggtaggtagagaccggcgttagaggctttccctttccctagttggcaaacacggcatcgttccacaaaacgctcaacatctcttcgcaatgatggccaaaaataagacatagatactagctgcagagttcgatcacggccaatataaccctcattatggagttcacttatgatctgaagacgccaactgccggtgggaacacaaatccgcaagcctttaaaaaagaatctatcttgaagtgtaaagtcatctgtcatgttgttttccatgtcatggaggatacgagagaagaacacatcgtcgcggtaaagatctgcaaatgtagagaacccagggaccgaagtgtgaaacgaggacaagagagtatggcgacgactcaacgcatcagccacacggttagtcttccccgattgatgcttgatagagaaagtgaattgctgaagaaacgctatccacgatgcatgttgcgatgagacctttgcttgactatcaaggtggcgcaaagcatcgtggtcagtgaagagaacgaagtcacgatgaaccaagtaatggcgtcattgcttgattgcttgcacgattgcatagaactcccatcataagtaatatagcgtccacgagcaccggaattttttttctataataagctacaggtcgaccttgttgtctaaggactgctccgatcccagcttggaagcgtcacagtgcagctcaaatgttagggagaagtagggtaggaccaaaataggagctgttgtgagcttctgcttgatcaatgcgaatgctgttgaagtggtgcgaggatgctgttgaagtggtgcacaaagcggtggtaaaaagaagctaatccatggaagctacgtacttccgtcaccatacgtggtacagtccaagaacgaattgcctctatctttgactctccacagctaaacccttatcagaaatgatgtatcccaagaaaaggacttgtaaaactccaaacttgcagttatgtcgggccgcaaataatttctcattatgtaaaactgtcaaaacctcacgcatatgagtttcatgctcttcacgggatgagctgaacatcaatatgtcatcaaaacagaagaccacaatcttccctatgaatggacgtagcgcttggttcatgaccggcatacacgtacttggtgcgttagagagaccaaacggcatgactaaccactcaaaaatgccttcacgtgtctcaaaggcagttttccactcatcataagggcgaatctgtacttaatggtagccactagtcaaatcgatttttaagaaatatagct

SEQ ID NO: 31332 - DNA, 3737 bp, Arabidopsis thaliana landsberg
actggcggtacttccaacgaagtagcgagtacaaaaaccaacatcattgtactcgcgcgagtaggtcgacgaaataaaaatctcacctttttgaccccaaaaatttctaaatatttcaaaatcagcctcttcgttttctttctcctcctgtctgttgatttaaagacccaaatctgacgcttctctctctctttctggtatctgcgtttgattcggagaagaaaaaaaaaaaaaaggcaaagagagagcttcaatggagttagcttctttccttggtagagctctgtttgtttccgtatttcttctctccgcatggcaagagtaagcaatttcctcttctttactcggtttagatctgtaagtaggatctgctttttctttatatctgagaaaattcaaaatctgggggctctttgtctctgttgtcttagagaagtgcacaaattatgaatcatggatttaggttttagctcgattatagctgagtgagtgagttcttggaggagaaagagaaatagaatgttggacagtgaaggaaaagtatggatcttgcttgctttgctggggttgaatttgatagataagatatctctggttagattctgtttctgattggtcaataactgtcgaacattgctatgtgttcttctgttattacatcattctctacctttagccctttgttttttttaagttctttcttttattactcattaagtgggttgtcctgaagttgcgaagtttcttgttgagttggtctcgttggtagttggtagttggtggttggttatttaagcacatgattctaaagtcttgaaaccaagaaaatcttactaggtgctttgttatggttgttgtgaatcaatttgactcaaccaatgaactcatatattgaatgcctgtataaggagtttctcttctaatttcttgttttaagttacacaattcttctgacgttacaaatgtagtatctttatacgttgattgaagaaaactttctttgttccccttgactgtctgcttggtttagttgaaaagcattgctatttgagtctctacagagacagtttacctcacttttgttctttccctcactgattgaaagttccaatatttttaatgacttcattgttcaggttcaatgattttggtgaagatggtggccgatcagctaaatctttgaaaccaaaattcaatgcctttgtaaaccatgtgacaactcacactggccagcaattgccaccagtcgatgtatgtgcttcttcatgtccattctttgtccaaacacagtaaccaaatcgtttttttttttgttttcctgttttattcactttgctttggtttgcagatgaagattcttgttgctgctgctatagccttgaagggtattgggggactattgtttgtctttggcagctcattgggagcttatctcttggtatgcaccaactgttccttcgaatatattgtcgcttatcagaatgacgaaaacaaccctgtttaactctatgaaatctggtttcagcttctgcatcaagccgttgccaccccaattctgtatgatttctacaactacgatgttgacagaaaggaattcggccaactattttcaaaatttacacaggttagctaatgtcatattggttgtttaatgaaagtttaaacaactgttgacatagacctgagatctttttctattctgtgttaacttttcagagcttggctcttcttggaggactgctcttcttcattggaatgaaaaactcaaggaaacacggtaggcaactcaggaaaaaggctccaaaggcaaaagcaaactgaagaagccatatctttcatcggttttattcggtctgtattttattttcattttggaatccaggatgggtttaaagagtctatctgatgaggccattgaaaggcaaaatctctgcaaatcattttgcttacttcaagaagcttttatgacacttttttgtagaaatatttatggattattgtttcttagagacaccacttcaatgttattgttccaacttatttcacaacgcgactgatttattaacctacggaatagccatcagctcaaccttggtaaattcattgtcactttggtcctaattggctaatttgttgccactcagtgaatggtaaaaataattatttatatagcgaagaatacaacagcaagaagctctcgtagctcagttggttagagcacccgtttagtaagcgggaggtcttgagttcaactctcaacgagagcaacatttttggtctgagctaaagtttttgataactgaacttttcgaactcatagatcagagaagaatcacaagtttctggagttatatttattttataagaaaaatacaacccaagatcaagagtaaagcttttacacttgccaaacggaagaatcctaaaccaagtgattcagaaatctctatgagttccctatgggtaccaaaaaaaaacaattgagagtttaagcagcaggaggcctgagttcttgatcacgagatgtgtcacgaacggattgaggcatataatgccacattggcatgtaaccgtaacttggataaacagccattttgttgtggttaaatgcagctggaatatgaggtatgaaccctgaagatggagccgtcatagactttaactgttgttctgtcttctctttatccgccttcaacaccagcttttcctccctcagctcgttcttctccgcctataaagaaacatacaaacttagaaatctgttcacatcccattgaacaagattcttggtttaggtgaaagtgaatgaacaaccaaccttgagactcttgatctcctctaaaagcttctggttagtttcttcaagcttaagagcttcatctctaagttgattcaatatacggattgcatcatcgagtatagccggtttatcagtcttaggagtcctcccaggctccaaaaccgagctcaaatccataaacctaacagaacaacaacaatttttttccccttgagacaactcacttcacaaaacaaaaacatagactaagctctaaacatacctctcatttagcttctccctcctcaacctttcacgacacgctttagttcctcctcctctgctacacgatccagtccttgccctatcaacaaccatcacagattcaattaaaaacacaaccaactaccaccaaatcacaaaaagtttatattttttcaaaactcaccgctttctggagcaatcgtcatctaaatgttcctgttcttccttaacagctccaccagatgaaccagaattgatctctacttcttcttcctgcacaacttcacaatcttgttgccccacctgttctggctctagcgacaaaactccattatacgaggacaaatccaattgagaagctccaatactaaagacttcatctggctcctgctgcaaattcacaccatatgacacaaaatctggaaaggtatcctcttgatcagtctgcaaatttacaccaaactgtgtgtaatcatcaagttctgctccattgctacaagagtcatcatgaccaaaaagattcacatccatcaataggagtaaatataaacaacaacatccataaagctacttcttctcctattcaatttaacagctttcagatacattagggttcgtcaaattatcatcaaaagacacaacctttccccctgaaatgcgaaaaaaacaacaacacttttcacagaaatcgaat

SEQ ID NO: 31333 - DNA, 2161 bp, Arabidopsis thaliana landsberg
gtttctacgcagcacttgcctttggtaattactccgattttgaagttttacttgaatcgacgacttgggtttgggcagtgttagaatgagaacattagcatcaagcgttgaaaatgggaaatttttatcaattcttgggaacgattatgatctcagtctcttattgaagatagaattggtttcaggttttagaatttatcgctatttaggattgtagatttgagaaacagattcagttagtagaacaattgtgatgttgttgtggtcagtcatagtttctgtgtttttgcttcagacaagtagtaaggggtggagaactcgtgaaccagagtaccgtccctatttcttgctgaatgatttgtgggattcatttgaggaatggagcgcctacggtgtcggggttcctcttcttttaaatgggatcgattcggttgttcagtattatgttccttatctctctggtattcagctttatgaagacccatctagagcctgcacaactaggaggtgagttcttacattctgcttatatttttgattgtttcctatcaaccattagcagtagtgatcgggttctttgctcgttgattggttcttctgatagaaaaaaggatagcagttggcttttttgtcaatttatatattttgagatgaagccacttctttcttgggttgttcttaatcttcggatgcacgttctttaggagataggaaaaccaacttctaagcgttctctgctacaatatctagagatattcatttggatgactaatacacaacaacttttatgctctcaaatactagtcagtggttcaagtttatcatggtgttgaattccaaatttgtttcatctcgttggttttctctttaattcccaattcgtttctgctttctagagtaaaattcgttgttttgatgtttgttcttaaacaggagagttggtgaagaaagtgatggtgattcgcctagagacatgagtagcgatgggagcaatgactgtagagagctttctcaaaatttatacagagcctctttggaagagaaaccttgcattggttcatcgagtgatgagagtgaggccagcagtaactctcctggtgaacttgtctttgagtatcttgagggtgctatgccatttggccgtgaaccattgaccgacaaggtatgtttattatgtaattaaagtggctcaacttctcacatggtgttcaatttcatagccggcgaaattgttctgtcctgtgtcataataatgtttaaccttaatattgcagatctcaaacctgtcatcacaattcccagcactcagaacatacagaagctgtgatctatcaccttcgagttgggtctctgttgcttggtactgcatctaacatgtcccttccacattttcatgagtatattttttccaatcactctctataaatattgatttcttctcgcattcttgaaggtacccaatataccgaataccattaggtcaatcgttacaaaacctcgatgcttgctttttaacattccactcgttgtcaacaccctgtcgaggtaggcctgctctgcatatttaaaacatagtctatacatgggcttattagaaaacatcgcaaatcaactcttgtattactggtaaaaggtacaagcaatgaggaaggtcaaagctcaagcaaatcggttgcatcggcgacgttccattgcccactttcggtctcgcatcctacaagtttaaactgtcagaatggagcccagagagtgacgtagacgagaaccagagagtcgggacgctgctacgaacagctgaagagtggctcaggcggttgaaggtgattctaccggactttagacacttcatatcgcatagtggttcggcgtggagatgatgatatttagagtcattttctaaactctaaataaggagagtgatatatagcaaaagtgaaatatctttcagctacttttgtttgttttgttgaaggaaaatgagaatctgtatagacactgatcgtacatttgtttaattactgggaaaacttatgtaattgaaacagtttggaaaaaaagaaaaaaaaagttggtcgaagagagtttcttctgctttatgatcgttatagtttcgttattgtgtataatatatgaatgtgtagactgtgagcgatttgtattt

SEQ ID NO: 31334 - DNA, 2005 bp, Arabidopsis thaliana landsberg
attgcttgcactgcgttgtctgcaggcgttttatattaaaaaagatagcggattttttcaggggcatgggcttgatctctgttttagagcctggcaggactccaaagacggataaatcagctatactcgacgatgcaatccgggttgtgaatcagcttagaggtgaagctcatgagcttcaagaaaccaaccaaaagcttctagaagagatcaagagtctaaaggttggtttctcactttgtcataaagctcaaggtcataaaactttctcataaagttatgagaacctaatttaagtagtagtctgtgtatcttcttcttgaaaatgtttctagctcataatcattatgtttggtacttatctgatttctcatctaactgtctgtaataggcggataaaaacgagctacgagaggaaaagctggtgttgaaggcggagaaggagaagatggagcaacagttaaaatctatggtggttccatcaccaggtttcatgccctcccagcatccagcagctttccattcccataagatggcggtggcttacccttacggctactatcctccaaacatgccaatgtggtcacccttacctcctgctgaccgtgatacgtctcgtgatctcaaaaatcttcctcctgttgcttaatcttcttcatgttgattcatcattgatcattgttatcaatcccttaggaatttttgttccttcagatgattctttaatcagtagttttgcagtaaccatttggagattagagaattttatgatttgaataaaatgtcagtttcctggtggaaatagataattcgaaaatgtatgacaccagatgtagaagaaataaaaaaatgaaggagtattttgtaaattactcaaaagttagtggtcctaagtaggtaggtaccagtaaaagcatcttaaccactcatttataaaactcattaattcccagccgttggatctttgtcatattgcagcttcaaagcaaggcaaaaaaccaccactaaccgaattttacatgtttgtaatttgtaatcataaatagtttcgatccaaaaacgaaacgttagatattatctattttagtacaacaatccataattgaaaatgccccacaaaatttgataaaaatgagagtatttttcataatttcatcaacaagagtaatctttatacactgagagtttaaaaattgtgtaatggtatactattaacaagataaagaatcaaaaatctcaaatgagtattgtgtctatacatatatgggaattgtacagaagagttttttcggtttttacttacgctgaagcaagtaaccaaagtgtagtaagtgaagaaatggcgatagtgatccaacaaaggaaggctaaagctacagagagttggtacttccaacactctgcttcgaaactgcagctttctaaatctccaaagtataaaaccgttatgtccgcggaagacgatgctcccgctagtgacaatgtcgatgttacctaaaccggagaagacagaacaagatggttttaagattttgatgattcttgtgtcattatactagagagaaagagagagggtctagtcttacccaatctccaactacaaagaggctgactaaaactggactaagaagcgttttctttctcactaatgcgaatgtgtctagtattgcaagaccaatactccatatgacttgcaatcccattggtgctattagatagctgcaaccaaatcttccaggtgtaagaacatagacacgaaaagtccacattgtttaactctacatatgcttgagaatgaatgctaaaaaatgtcacagaatcaaagattttacatatcagatgttttcaagatctttgcacataacaaaggtaatggatccattcacaagctacactagtctaaaacaagatccttgacgcacctaacatatgactcaaacacactcaaaattgcttaaaatcctaaacactaaatccagaggtaataaaaagagttacagatgct

SEQ ID NO: 31335 - DNA, 1033 bp, Arabidopsis thaliana landsberg
cagcgagaacgatgtgcttgcctcttggcgaccagaagagagcatcagcttccttgtcgtcaaaggtagctagctttgaaacttttccagggttttggggtgtctccatagaatagaaactgacatttggctttgattgatctccgtgaatcacggcaaacctgtgaccgctcggctcccacgcgaaagcaaggattttctcatccacttcaagagcctcggtggtaatgccttgtaccttattgaagcggaaaagctcaaacagagagcacgtatgtcgagtaacttggacagcaagatactttcctttgctctgccagtacatcttacagtcgctaacgctgagaatatccttgtgcatcagctccacatagccaggtatttgcagaaaaacaacctttttaggctggttcttgacatcccctttcaacagtgaaaggattggttcagtaggagaccaagacatgcccacaacatcatcaaaattcacagccgcgccttcttgcgtagcagtctgaaagtcttagtctcataaacagatacagtgtttttgataagtgtggcaaagtatttatcatcttttcccccagcccatctaaggaaaaaaagagaggttatgtcaatgaatgtaataagaattctattcaaaggaaattcaagaaagtacctaatcataggccatgagttgtcaacaacatgaccatctactccagccattattctcccagttctcacatcaaagattcttaaccagggttcctgcaatttggatgcaaataagaatactttgcatcaaaatgagattggaagtagagaagcaacgatgatctatggaaatctctcgtctgtcaccagtttggcacttaaaagtttttccattctaacctcttgtaaaatttacatattaatcctacatctcttcttataaatcctggacttggttacttttttccctggaataagaaatcaggttggcctgtgcttctacgtttttgttatgtattttgcaaacaaattgctcaattggtttcat

SEQ ID NO: 31336 - DNA, 6527 bp, Arabidopsis thaliana landsberg
aaaccgcatccagagctagcgatccagcacatccttccttgtgtgaaggtaagactccttaaattctatataaacgagttgtttgatgtcccctgtctcgtaatattctgatacatactgatgtctggcaggaattatcatcggattcttctcaacatgtccgctctgctctagcttcagtaataatggggatggctcctatccttgggaaggtatgaactgaagatagccaacattttcgcatcttgtgacaatgttctgagatttaatttgttttatggttttcatcaacaaaatcagccataccttgtgttatggcgtggttataccagccccaactggtgttgcagaccttatcaaaaaattattaacatactaaaatctttcaatacaggactcaaccattgagcatctgttaccaatttttctttcccttttgaaagatgaatttcctgatgtgcgccttaacatcataagcaagttagatcaagtcaaccaggtttgttgcatctctcttgtgtgctttagatactacttttattgcttccttatttagttggtgactgaattatcttttacggcaggttattggaattgatctactatctcaatccttgttaccggccattgtagaacttgctgaggatcggcactggagagtccgacttgcaataatagagtatgttccactgttggccagccagttaggtataggatttttcgatgacaagctcggagccctttgcatgcaatggctgcaagacaaggtttaccttgaatctttgatgtttgcataaatttctcattcacttgtgattgtagatattgacactgttctcctccttcaggtctactctatccgcgaagctgcagcaaacaacctaaagcgcctcgcagaggagtttggtcctgaatgggcaatgcagcacttagttccccaggtattctttgagcattttatactaaaaccatctgtctgtttatcttattgttgatctatgtcaagtacctcacctataacatctaatctccagctttggtcctttttctttggatatcactaaagctgcaaatattgagatctccagattgacctttatcatataaacaggtattggacatggtcaacaatccgcactacctacacaggatgatggttctacgcgcaatatctctcatggcgcctgtaatgggatcagaaatcacatgctctaagtttcttcctgtggttgttgaagcatcaaaagacaggtacaatagatagattagagggtatgaataagccaaactagtttaagaacacttcttagtttttaatgtgttgttgttgcacacctcttatctctgcagagttccaaacatcaagttcaacgttgccaaacttctgcaatccctcatccccatagtcgaccaatcagtacgatcataacaaacataactcagttatatcgaaaactaatggaaattgttgaattttaatgtttttgccgtgtcaaaaatttgtaggtggtggacaaaacaatccgtcagtgtttggtggacctgagcgaagaccctgatgttgatgttcgttattttgcaaatcaagcacttaattccatcgatggttccacagcagcacaatcctgaattgtttttttttcatatgtatgatcgttaagttaagtttctattattcgtgttctctgcaatttatttggtttgtttgtgtaaaacgccattttggttgctggctatgaactgcaactatttttgttagtaaaattgtattaccttttttacactttctgttgttccaaaccttatacattcttcttagtttactaatgctaacactactcccttagtgaaactatttgagatagagtgaaatgcgtgtggctatgtttggtcttctgactagttcttgtttcaaactttatccaacccctctagatcaactttgttctattcaattgattttgtttttctaataaacacaaaaatcaatacattagattttgatacaaacgcccacagcctcctattcatgattcaacaaatagaaagcataaatcatttgacaaaataattttagccacacgggttagcccgcttttagcaccctctaatagcataatattctacagttatatctcctattttccaagaggaggcataggctaatcaagcggtcgtcaaaacttcacgggctcgcgagctacgatgttggagacgacggtgaagcacctcagacatctcagtgtagaaatcagcatcccatctctgaatcaacaaaggatcttcagcaaaacatatgtatatcgatgtcacagcgctttcgactaccaccattcctaaacccacctgaacaccacattggatcaatgaaacaaagtgaacaagttggtcatgtaattttttgggtgactaaaagagtgcacaaaagaaaactcacaagaaccattcccatcaacatagccgtagatgcaaccattataactcggtcactgtacttgatccaagcccatataccaatgcaagagcctgtgatgagtcctccaaagatggttcccatcagaagtacagcaccagagcagtcatatgcaacaagtgcctctacacctgtcgactgaaacaattcccatgcgtctcttgctgatttgttgaatccttttccatacactgcaatctgataattaaccaaacgtttttttcattctgagtctcattgctcataggagggagatgatgagcttgtttaaaaactgtctatatttatatatatacctggacgtatgcatacttgttaaaaaaacgaactagtgtttcaactagatgaaacaggaaatcaacgcagcaaagtaaacattcgtttccacaaatcttggaccggaatccccttatctgcaaaagaaagttgcagactaatgttattaacaagaggagcaatgataatgttttacgaacagcaaaggatgctggagactacctcccagcgaagtgttctaatggcagcagtgaagagtgaaccgtaacatatgctcccaaaagatgttgtcacggcatacctaagtgagtctaccaaagagctaggaggcaacgatgatgactcttcttgaccacagtgaaagagaacatgaaacaccatcccagaaactataacatggacagtgttacatagcacagcgcctgtccagaataagctaaccgaaagaacctgcatatatattatatgttccaatgattgagtgaattctaaacatgtttactttcagacacttaaagcagaaaacagaaaccgtgagtaaaaatgcaaaacttgccagctcaccacaagaagccaccatcgtccctcatcgcccatgctcgatgccacaacaccagctgctccaaaagaccatagagacatccacaaaagcatgactactgtgaaagcatgtgccaccattatcaccttaggaagtccccagactaatttcagcgctttccgtaggaccagcattgtgaaaggaagtctacacatgaacaactcaaatcatcagaactaaaaagttgttgccatttgaccataggggttcagtcatagttcaaccagttcaacctcggacgcacctgtctataactgaaataacatacaagaactgcaacagagatccaacagcgaatgcaccgccccaaaagaacagtctgcaccagaaacatagtacactaactacagctagataggttgttaagatgtgaaccgaaactttcatcatctcattggcgtaagagccaagcagcaatgaccaaacccaactgataaagactccaatgccaccagcaacagcatagagaggccagtaatcctctgttagacctttatgattctccaagaacccttgagtgtacctatcgatgtttaacctatctgatattctaaacctattgagtccaagcaccgcgagcacaaatcccaaacaaatcaagtggatcacaaagatggctgaccagaatacatcatgccaatggcgggactcacgcacaacggctcggtttccatctccactccttcgactccgctgaagactctgcaaatcaaaatgaaaacattgattcattcaaattacatcatggacgagtctgagacctacaaaaagctatgctttaacataagcaacgactctgaaacttcatatcagtacaatgcaaatacataaagtgatcaaactcacacaagacacattttctatcaaaaagaaaaaactttgcgactgacccgtgattaaagttacaaagccaaagtaaccaatcgctcttaacatgtaaggaacaaatccagatatgagttcatcaagatcacactcgtaaaggaaatgactttatgttctaaaaggcaaaacccagaaagggattctcataacaacttcgcttgtacagaaattataagagaaagagattcgtgcccagatcgaaattgagtaagggtggagaacctggtcgccggaggagatggaggcgtaatcagaggaaggagagacgctgttagtggagtcactcatgatggagtaagaagagaagattcactcactgaccaaaaccaaatttcatggaaccatctttgaatagatatcacaagagttgagagagagagaagtgagggagaatagtcaatgagaggaaaagaaaagaaacgtgaatcaaagaagaaatatgaaaaacgatgagagaagagagtgaggcaaagaagttttgtcagagcggttcttcttcttcttcgtcttcttcctttttattggataagcagtggtcgttttcagatcacactttctccctccgtaactattcacgtttttttctttttaattttcctatcacaaaattatttcttttcttttttggttcgttgctttatttctgtttgttatttggaaatggacctttaatgcatataacagaaaaattgcatatagttttctcaaactttatgtcaaagtttttataaattcacctacaagggaagtgtggtaaatgtttgatataaattgtattatataattatgtattcttcttttttttgcttggacgttgtttaatgtacgtatgaattgtatacctcattattcagatatttaaaagaaccggtcaaaatcatctattgaatctacgactctttgttttttctgtcaacaaatataccactattttaattgtgaaaatattaacaaaaacattgaattttatccaggttttttgctcttatggcataagttttatgtctagcatgaaactgtaaaagtaagagaatgtttttggatgaacaaaggagaaagtaaaaggttgacatataaaaaggagaaaggaaaataaagcttttttttaaggacaaaatgattgaacccatagctgccacttcatatgttgtgatggcaagtagtggcaccatgacttcgccacctctctttgtgccatgtttttttctttgtcttttgataatataaatctctgtgccatgttactcttttaaaaaatactgtttacatagaatgattagagttcattaaacatatccaatagaatatcaccagagttaatttagttttgtgtaaattcatcttccataaacatatcacttttttctttgtttcatatcagttagtactagggattacactttcatgatcataactcatataagagattgtattttcaatcattcgtttcttggtttacaaagattttgttattttgtatcacatcacacattgtatttgggcttaacttcttcgatcacacattgtatttgggctttaactctcaacactacgagtattcatgcgtcatagaaaagaaggagtcattcattcgtgtgtgatgtgacctgtaacaaggcccctcaagattcattgttctactctttaatcataaaattagcaaaaacaaattccatcttttttttactctttttcactctatgcattgcaacaacaagtacaagaaacaaacacaaccaaacagtagtacagtactctaacttaacattactatcttttaagtgacttttccttttcattgtaactcaaatatatttatagaaaaaacagcttagcatttttgttttttttgatgaaaacagcttagcatttattagacgagaatccaatgagagaatttgccaaatcgaaagtgacacgtgtcccttgttgctgcacgtttccgataatcgctagtgaactcgccgtcggtgcaaatgccaaacaaaatgtccccaccgagtcaaccggaatcatgtagttcttcgccggcaaagccaaaatcttcccgccggggaaatgaaaagccacggtcgggacttctaccgtcgtcttagccgaaaggttataacacgtgtcaaacatcgccaccccggctgctttttccaagtccgacgttcctttcacgaacgagtctctaagcgagttatagatttcggtctggagacgagtcacggcggttcctgagtcgatgatgatcccaccgctgcctgactcgtccatctcgaaagaagactgaggaatctgaagcaa

SEQ ID NO: 31337 - DNA, 3771 bp, Arabidopsis thaliana landsberg
  unsure (1)..(3771): unsure at all n locations
ctggggaagaaaaggatcgtctatggagggagacgtcggaaaaggtttggtatgccagaatactatggatgggaaggcgagtaatggaaatggtttagagaagactgtaccttcttgttgccttaaggctatggcatgtgtacctgaggatgatgctaagtgtcactccactgttgtttctgggtggttttcggaacctcaccctcgctctggttagactttgttttcttttcttgtcaagaagctaccctattttcttagatccgatctcttattttggatcttgttcttaattggatgcagggaaaaaaggcggcaaagcagtctatttcaacaaccctatgtggccaggtaggttacctcttgataggcttgttgttgttgctttccattatcttactaccttacgttttttgtctttgaatgagcgcctacttggtttagatgctgaatctgtatgttaaagtttgtgagttgtagtttttcagagtgcttgctcatgtgactgatgcagctggtttatgtttaattgtaggagaagcacactcactgaaagttgagaaagttctgttcaaagacaagtcggattttcaggaagtcctagtgttcgaggtttgagatagcatctatgcttttgtccgattgttcttatcatctgagtctttcttctattaattgaggctgttgttcttctttttgcagtcagccacgtacggaaaggtgcttgttctannnnnnnnnnnnnnnnngaccgaaaaagatgaatgtgcatatcaggagatgatagcccatctgcctttatgctctatatcttcccctaaaaatgtaatttctcaccttaaaaagtttagtctctctggtttcctatatcttgtagcctgttgcaataaatcagtcaatctaaaagtatgttcaatttgtgatgaatgtgcctctttttggagaatatgttggaacacaatgagattgtgttgttgtagctctcttcttcctatatgatctcatgagatagctcttatcgcaaatgatgactcattccagtacattgaaatgtagaatcagctcagattaaaatagggaattgtcaagcttacacattttacttgcgtattaatgctggccttcgctgtctaaatatttgcaggttcttgttgttggtggaggtgatggtggtgttcttcgagagatttctcgccatagttctgttgaggttattgatatctgtgagatagacaagatggttatagatgtaagtttttggttttgtgcttgccatatgtatgaacaatttttagttatgttctatctcagaaagtgggatttctgtggtcttgtaggtgtctaagaagttcttccccgagttagcggttgggtttgacgatcctcgtgttcaacttcacattggtgatggtaattaagcattcttctacttgttctctgttccaaaaacgtagtcaaaaatttgcttgttttgatatcactttcctctggcagctgctgagttcctccgtaaatcccctgaagggaagtatgatgccatcattgttgattcttcagatcccgtaggtatgattcatctgcaaaactctttggatatctgagtgattcttattttgttcttctaaatcaaaactcggttcagacttcagctacaaactctcacgtgtttcactctatataatcataggtcctgctcttgcgcttgttgagaagcctttcttcgagacactggctagagcgttgaagcctgggggagttctttgtaacatggcagaaagtatgtggctccatactcatcttattgaagatatgatatccatttgccgtcaaacattcaaaagtgttcactatgcgtggagcagcgtccccacatatccaaggttaactctacttttcttctgattacattgtgtgatctcactgaaatcagaaacatgaattgagcaacatatcttcattgcagcggcgtgattggtttcgtcttgtgctctactgaaggaccagctgttgacttcaagaacccaatcaaccctattgagaaactagacggtgcgatgacccataaaagagagttgaagttctataactctgatgtaagtttaacacaactatgacttcctcatttactgttttagattaacttaaagcaaaatcttgatctatctttttactaaaacagatgcacagagccgcatttgctttgcccacattcctgcggagagaagtagcttcacttctggcttcttgacttctgtttggctctaccatatccctcatatcaaactttgtagaactcttgaagaggaataataaatcattggaggctttgtatctctaagtttactcctttataaaaagacttctatttatatattggctctatggtttgcatgattcgtgctttgataaaatctttcatatacatatatgctaattaattaatcatcactgttgaaatctggttctgctggtttctgaagtagcataggtggcatacgttctggcatccttggtttccttacggagccgctcctacgtattgtgcgcaagatattcgcagcaaaccgtgatgcatatattgtagcaccgaggcttggggaacttccacaagcttctttagccaaagcgtcctgcagccgattctcttcttctttaagagactcttctagtttcttcttaatgtatcttctccaagcggcttgtatgaagcaagcggcccaagtcttccattgttgcgagtagtacctgaaagtatgtctaagctgtttgctgtgaagacgtctgaactgggaagccacaaatttgaggtcatcagctttaagtgcgaaagcttcaacttccatgagagctcgaacagttcttgttgagattgggaggtttgaggatgagtgtgggtctaaagcccaggttaaaagctcctcaccgcagaaatcaccggctccaagatactcggaatttaaaaaaccagttcttccgccgtttgttgtgattgttagaagctttccgcgcataataaagagcatttcgtctaccggatctccttctcttactatgtagctttcctctgtgtataagacaggttgcaaacggtcacagagcgcatcaagaagctgttcgtccatcttctcaaacatcggcacctagaaccgatagaaaacatgttgcggttaagagtgacactgacaatgacagtaaatgagaaaccgagtaaagaggagatggtttatttttttacccgcatgagaagggcgagacagagatgacgtttgatgtcacgtctaagatctttgggaagattactaagaagattttcttcgtcaacgcctcttgtctcttgccatttgtactgctcgtatcgccggattctttttctcaagttttcaggtagcaaacggtgagacatccattgttctgcgtctcttctctttaccctcatctcctccaatctcgtggtagtggattgcagatacgtctgccatttaaaagaaaaacagtaagtaatcgatttcgcaaacactatggcatatttgatgaaatgagactaacctgcatatttccaatcaagaaggagaacaaaaccagccccgcaatagaaatgaacaccgcgaaacagatttcccaaatatatgtacttgttttaaggttctgaccaagcgaactggatcaagaaaacagaacaaagatgcaagaacttagtgttgaaacttttcttcataagaaacggagaaaattttgctgataaattctcaatacctaggttttgcagacccc

SEQ ID NO: 31338 - DNA, 5514 bp, Arabidopsis thaliana landsberg
ttttggaaaaaaaaacttacataaattatgcatgttttgttgtcttttctacattaaaacatcttattatctaaataaaaaggaattcaactaattaaaagaataaaaacaatttgacaaaagggataatctgtaagtaatttgtgggaggaagtgaaacggaacgacgcgcacgcactggtaataaagcgaatatccgaacagaacgtgcgaagaaattggtgtcggagaagaagaaagtcgttcgctgcttgggttttatcatcttcgtctcaaatttaattttaatgtgtgagtgtgtgtataaatacacaacaagcctaaacgttcatctgtgagtttcagaatttcgacctccaaaaccctaattttggcggacttctcttatctcttttcgcaggcgcattcaaggtaaactcttaagcttacttcatcggttttctagaaatgcatcttagcgtcaaactccgatgttggcttctctcttatatccgcgtaagatctgatagggtttgttttgtaggttagagagatttgttgtatgtgtaattatggaaggcgtcaatgtgctgacaaaagaggttgatgctaatggagttccacatccttccaccaatgttgattaccatcttagcattcttttagcttctcatttgagtaatccagatctcacccctcaggagattgcagatgcttcgagatgtactgctgccgctgctgctattgctgctaaggccgccagagctactgcagatgagaaagctgctgctgcagcaaaagctgttgctgctgctaagaccgctttagatttgattgcctcctttcctcctaaccagggactcgtacaagacgcatgtctccacaaggacaagaagatgaagaagaagcatgttgctgctgacttgttgttttccaaggatgatgcattaccctccaagttgcaacttggaggcgtcgtcagtcagggcatagtttcaaactcttcttcgagttgtcaacataagaacgacgaccagtgtgcggttcccacatgctcaagggagaggctgaatacagagcatgccgtttccaagagggtggattttgatggccttggcatggagttagataccgatagactgaacgaatctgttaatggagaaggagcaaaagaagagattcaggtgactagaaaaagagggaggccaaagtccaaatgatttggcttctgcagttttgatttagtctctttgttgcgaatagccgcaaatggtgtttatcaaacttgattctaagagtatttttcttattggttttccatggtgcgtctttcttacaaatagagtaataagactcaaataaacaagtgaggagagtaacagaataacaataataatgccgtgttcgctggaggtaacaatgcttctcttttcatactgacaaaaataaacaatggaagaagctcaggccttggatgtcaggatctcatgtactgcagtccaggtcccggtaatggctatcataacaccaatgaggaaaacgagaacgtctaccactattcttgtgatgctcaactcgtttttgaaagcctgcaagtgaaatagtgatggcaagacaaagcccagcaccacgcagacgctgctccccaccagagataagaagtctgcaaaatttgggacgagcagggccacgagcgtgaccaccagcacagtggcccagcgcacccatacagagtaacgggagctgcaaaggcggcgttccacgacctcgtagacaggttgcatcataagggggaatgtgaagaagaggttgattgctaagcccagctgcaccagagtgctcaccactcctgtccccaggttggtggtgatgatgtctttcgtctcctctccgtaagccatgtaccctagcagcccgaatgcaccgtacatgatcgagattaagcccatggctagccccagcgctctaccgaacttgtctttgtatttggcctctagttccagtggcagaacctgttcacatccaaccacaaatcaggactattagttttaacaccagatacagagacagtagaggaattagttggtctgcttaccattccgatcccttcaaatgcgtacacagcaactcccaatccgtagaagaaaacagagacacctccaaagactctcaaaggaggtcttcgtttcaggaagatgaaaacatcctgcaccataaccactaaggtggcggctacgtccacgatatcggcgaatatactcaaaggggcgagatgggtgagcgatgggatggagttgagacccagctgaaaggggaaacatccccagaggtaaatggaagcagcatcgaggcctagaatatgttcggtgccgcggctgaggagattagccattgtggtggcgacgaaaataaggtaactgacgcagaagccagattgggaaaggacaagcataacatcgacgacgagacgaccggcagggccgcagacggattcgccgagatctccgaaagaagtgatgctgttgaagccggagagggactcgagtttccggcgggtgtggacgaggagcatcatacagaagaaggtgagggaggatacgaagaggagtgtgaggaggcccaagagccatccagtcttcttgaaggtgtacggaagtccgagcacgccggcgccgacgatggcgatgaagacatttgcaaaggtttttggctgcgacgacaatgttcgaggtcccaaaagaggagtgtcttccgtcggcggcagcgaatgggaggatgatcccgaaggcagcgaatgggaggacgatcccgcttcctgatcgtacctcatgccgatcgaaattgagagtgaagaagagccgagagtcacagtctacgttaatggcgatcgatctctgattgggtgtgttgtatatgtttgtgtggtcaaatgatatctgttttatctttttcccttttttaagtcattaagaaaaagatacaaaactttcattggctcttgtttggggtttctcaatttaagaaatagtagtatttgcttaagcaataaacaaaactctgacatttgactcgtgttacttatgtgcttaaccaaactaaattttctaatcaactaatgaatgagctgttgaattcggaaattaattaatcgatctttgatacagtatatcaaaaagcagaacaataaacaaaaaacggacaggtaaggaggagaggacaggtgtgaagaaatgtagaagtttcagaaatgattgaagaggttttaaccaatcgaagcaaagcaacgtggaggatgcatcgcacgtctccccttcttctgtggccaacttgaacacgcctctccaattttgggctctctctttctctatgagcccatacctcacttccttttttctgagtaaaagcccacaacactgtgaaacatacatacttttgtctttctctgttttatttggcaacatgtgaatgaacaaaaatactatgagagtatcaacaaatcaaaaaaatccatacaagagaccaaacaaactccattttcttttcaaatcagactcaggagaggatggagaggaagatggttgaccagacggtgagggctaaagatgcaaccaggtaggtccacaagaagatgaccgagcactcatcttgagccacgtcgaacagttgtgccattgtgcctgcaatccatatatatatagtgtatgattaatcatccgtatctagctaacaatgaagtgaagggggatggcttgagtaattactaatattcatggcaggcggtagtgcgaactgaagcatgagaacgtatcgaaagagagggtctggaggaagatagcctagatttcctgctaattgaaccaccccgactcccaccacgggaaggaggatatagcgcacaattatcactcccacaatcactgatttcttcacagctgatgaacgcagaccctgaatcaggtttccccccagtatgagtgtgatgcaaggaattgtgccctccctgccaagtcaactattaggcgcaaagtcgtgatgtaattgtaatttccatattcaaaaaaagatgagttcatacccaagtagctttactgagtcttggatcactcgcaacggggcattctccccgattataagattccttagccaattggttgctccgaagacgaagccaagaatctgaatggaacatataacaacgcatcagagcagtggatttattagttgttggttggaaacgtaatcatgtcttcttttttttaaaagacttacggcaccaatggtgggtggtgcgaagagttcctcaagaatctgatggagcaagtccttgatgtatgtcctggtagacactttttgtttgccttggatttcaaggtcttggttttggtgcggcttgaggagaagagcgtggggatcagagtcgatgtccttgttgggagacttgaccaacccggcggcttcaagagctctaaactgtgtagcagagcttcttaccagttggtaactgtacgtccatatgtagaaacccccgagctgcccttgacaaaaattaatcacacgatcaactcaacaattaagtctgagcagagatcagaagatcatatgtatgtatgtttgacttacggccatagagaaagatgcgtaggagagcccaatggatctgcagacactacgattcccaaaaggactgccttcctcgtcacagatggcagggaccagtataagcataaggttccccatattgcctacgtagacaggacagtaaatatgattcatgtgagaattcagggatatatctctcctccttgagattaaattttgaggttttaatgttacctgaggcacaagtagcaattatgaggccatgaagttgaggtttggggttcagtagcttgaccaccaaccatccaagaatgcctcctactagaaaggtgattccaacatttatgggcataaaccacctacaaaactaattttggtcaaatcaaagccacacgtatgtattctcagagggatgataggagactggtagtgcataccatgaaataatgtcctgcaatgtgacagtctcggcaaggttggcaaacatgatgcagggggtgaataccacgaagacgagctgcgagggaaaatgtttgttagtgatgatatatgaatgcatgcatagttgacaccaaacagaaaaaagaaaagcagagacggaggttgaccttgttcacggatcttcgggtgtcagcagagagaagagagcagtaatcggttgccaagaaagcgccaaggacgctgataagaagaacttgaacgattggcattgaagccacctccaacaactctaagaaacccatccctaatctcttcgttttcttttcttttctttttttctggtttcttgtagaagaagagaagcagtcaaggttaaagatatagagatgaaaggtttgatatttgggctgtttgtgtagatggagaggattggtgggtatatatatttagattaaatacggataggagtgggggacattaagtgttaaagaggag

SEQ ID NO: 31339 - DNA, 3522 bp, Arabidopsis thaliana landsberg
  unsure (1)..(3522): unsure at all n locations
attgcatttgtgacagttccagcacgatatcgaaaatacaagatagtataatatacagctacatacctacattatggaaatagaacaaaaaaaagaatgttttcttctgtaaattattgattatcttgtaatagatcaattctctagcctatctaaaagttatgttaagcacacaggtaatgtgatcctatagtcttgagaaatttaagcattttgttaattaccccaaaaaaaaaaaaaaaaaatagttgatccaagaatatgatgcaaggcaatcagctaatgaaacttgactagcagacagcaaacacatggaaaagggactccaaaagaataggtaggtgtgaacattttggtttacaatggattccatttagcttggtttgagaaaaacacaccatatttctctgtccggtaaacttttggttttagaatatgtgacaactttgttttggaatggtttgaatcagcttggttcgttattccaaccctcacaaagttagcactaaataagaatggttttaatcaagtcctctaagccacagtggacccataagaatattactaattagaggctcctaagggacggataatgatatggacggactttattcaatttggttccaccaccttcttttattttgataatgtggttccaccaacttacatcgtcgtgttttttttttgtttcccctctaccatattcaatgatttctttttgtattaatgactatagtttgtgaattttattttattttatagcatatatctttttgtcaataaaatagcattttgcaaatgatttttaaataaaagtagtttgtgaagattgaatatataaatacaaacttcgatcactcatatgattattccaaaaataaatgtgaattaatgtatgtacattcattgcatgtagagaaatgatataatgcgcctacaataatgtcccaattgtagaagaagaagtatccaagtcgaaagagactagaagccaactctgacccgttaaacaagtttctaatttattcgtatctgccctttgcattttcataatgtataacatcacacctctaattttctcatgattgaatttttttaaaaaaacactcctaactatgtatctttttctaattcacagtaaaatatctaaggtggtgtgtgtgtgtgaattactaaacgtgttaaccaacaaataaatctagacttatgaagtattacacattactaacctctaattcatgcatagcacaaaattctctaaagagaaacacgtaggttttagtaaaaacattaagtagatttcaataggtagattaagagatataatactatgatctagtataaaaaaaaattaatgcattttgagagtaagcaaaacagaagttgatcaagactcaagatgctagagatggtactttacccgaaggtggagagttgcgcaaggaagaaaggatactccttgagtggaactaacgcgagcttatacatcactctgtttccgacgccaaacgccgccgtaaccgccgcccatatcactatctccgccgtcttaacatgctctccgtcgatcacatggacagtactactactgctcccttnnnnnnnnnnnnnnnnnnnnnnnnnnccatacgcgcctggcttcttaatctccgcctcagctccgtcgtcaaatccatcccaggatctcgccgcttggataatccaccgcctggaacttggaacgatcaacggtagacgatgatcgatgtggtttcgacggattagggagatggattgaggtcggtttgcggaatgggatttgaccgaggtgatcgaggcgaataaaccggtggtaaaccggcgagaagtcgttgccatggtggattaaggatcgagtgagactggttctgctggttttgagggggagagagacggaagtgagttgctgacttggactttgcctttttatctctctcttttgtttttaaaaacaatttgcattaacacacgctgcccaacttgttttgcaaaatacgacaaatgtttttttttcttttggtaaatcatcgaaaagacaattttaacccttatcaggaaatttcagaaaaagtgattataccttaaattagcccgttatcggtattttagacattcctacttttaatagaaaacataaccaataagtaatgatttaatttgtgctagtgttgtttacacatcactttctacaattatgttgttgaaaatgtaaataaaaatagatatataagtagattaatctctatgtaatgtggtagtagttcctttattgaatatattcgttttttttatgaggggaagatacttcaactataattttagaatttattattaatctttgaaatggtatatttgatcaaccatatctagtgtatatttacgttaatacaaggtgtagggtgtagtgatgtttttaggctcttttgttatgtgaactcttatgtacactacatctaacttgtgatgcatggttgaaaaaaacgtaaacatttatactaaaaaactgttggacgatacgatagtgaccaagttaagtagttagccatgcgcagaatttaggattttggcttgctaagttcatgttcatgtgatgttttatggtgattgatgaggaatggctcaaagttgtgtgttgacaagttatgataaaatatctgaaatacttattatatgtgtttatatatataggatcacataatacaacattatatacatactgcattcttatatgaatatttgaacttaacatctagcttttcgaattaaaccaattttgatgaacttttggaacaaattcttttaaagaaaaaacatatacgaaaaccgaagtgagctctaatatcgatacaatttgaaccgaattgaaccaaaaagttcaaaacttatttccctttttttgttttgtttcttttcaaatacgatttcaatccaaaatcaaaatcataccagaccgaataaccctaaatggaaaccaaaccaacacgggaccgaaattagtaccatcaccgctagatgcgaaaagtataataataatgtgaaagtatgacaaaaaaaggggaaaagacatgtctttgtcgtggcgtcttttgattggcccaatgcatagaactagactacacgttgctgtgcctgaactttcccttccctgccttcccctccttcactcatcttctcttgtagctgtgcagtaggtcagactcttgtagtgaattcactgcaaagtaagggaaagcttggcttggaaatgggagttgaacaagccatcgattcgggctaatgtgtatagtttgattcgtctggggagcttttgagagatagcaatttagttttccgcttacgaatgatctttttctgatgcgtcattttgattaagtgtgtacttctgcaatggaggcttctctagctgttatacagaggcctcaagctggagcttcgaatacggtaattacagtctctggtttggttcctgcttgctttgttaggaaagttaatactggatagata

SEQ ID NO: 31340 - DNA, 4912 bp, Arabidopsis thaliana landsberg
cgttctccatacaacacttgtaatagcttgaacatggaataatggttacaaatatgtctttttggttccaacaccatgtccattgctgaaatctcatttctttgttcagtatcttggaactcgtggatgctgctataccagctcagcaattagagccaataagacaaaccatattacaggttgaaggagtgaaggtacagattgtagtatatttcactattcgaccttgctaattgctatataacattatggtgttcttttctataatcagttatctgtaatgagaaagcatgctttcatgttttttcttattaattttgcgaatgagtatcaagactttcatgataatcttaatccatagggatgtcatcggctaaggggtaggagagctggttcatcgttgtatcttgatgtacacattgtggtgagtgctgcttccttctgcctcagagtagaaagaattatctcaataaaataaatcattatcaccttttccttacaggtagatcctttttccagtgtgagtgtcgcacatgaggtaggagaatatgtacggagacagattaatttgaaccatcctgaagtgtccgaagtttttattcatataggtattgagcatgctgcatggaggtctaatcaacttattcactgcttctcggtcttagctatcatctcaaactttccttgcagatccagcctttttacagttttcttgtagcaccaaggatcatgacagtataacgaaggaaagtaacatctgccaagagattaaacatgttgaagccactgtctcagacattttttcgtcgcagttgtctgaggtactcaactttctataatccagacctaacccaacctctagttattcctgtttattagtttcaagaacaatggaatctttcgcatatgtgcagaaattgacgatcaaacgaattacaccccacttgttacatagcaagatcttgctccaaatcgtagtcgccatgccatcaaccatgtccatacagtaaagctcttacatgtctgtacctttaggccattttggccacttttttgtaaccatctgacaagtatttggctgctctgtagggacgtcatgatagccgctgaacatgcagagaaagagattctgaaggcagccccaaatgtggctcgtgtcagcattcagcttagtcttaactccgaataactttgaaggaaataacaagagaagacccctctgcaatggctgcaacaactataatttttaaaaaaagaaatacagtgcgctaactatgttcatactgattgtcaatattttgttgatatttctggctttctttacactgctcatcgaagttgtttctttctgatgagcaatttaatctcgaaaatttgcaacttgatgattccaaagctgagaaaagttttgggaatgtaaaattgttgagcactgattctgctgcattggatacgatgaaagcaaaataacatcacaactttccatagctcctttcaaccttgacagtgctacgatgagatgagggtaacagaaacaaaaggcaaaacatttactataactatgttgctatattgactctagctgctaaagtcctcccaatttttgcgcttggtcagtatttgcagaaatgtcaatttcagatcgaagctagtctattcagtctcgtcagtgtttgaaccatcctctacagttccgtttctgaacttggaggacacaggtaagtgacgatggatgcgctttgtagactttgttcttgattcctctgaagcctttctcttcttattagactttgttctcgactcctctgaagcctttctctccttattcgagttaccaaggtacccaaaagcaaaagcttccagtgcctttgtagtcaagggtcgggtccttgtactctgcctccgttcaggaaggagatccgcggttacttgcaactcctgaggcttacactgcttttccacatccacttgaacagaggactgctcggcacaagagctctcactgttctgtacaacgtctgccatgacagtatcagtaccatcagcttcacgttctagggagatttgtgaaacgttcaaatcaaaatcttctctgctttcagatcgttctggtgatatttctcggtctttgtttcttcgacaagagctatctcttgcaaaggaactggttgaggacagtttcagagttttatcttcgttgatgcgctcctctctcgtcaatactacatttagatcagcttttaatgggtttggtctcatatgtttccctttcttcaatggtttcttcttcctggactgggtttcaccaaaacaacctgcttctcgcaaggtacaatctgccaaactactccttttggtgcagacaggtaacaattttggatttcttggtctcccgcctttccggttcttctgctgtctctcattgagagaaatggtgcttggactcgtggcattgtccatgtttacagagctgctcttaccagaactaatgctgcccccaccacacactctcgaagccattgatttagctgtcgtctctgccttgttttcagattcttctgacatgttatcttcagattcactcaagtaacttgaggagttagctattgaactgccggtcccaacaggcagagatctgagctctttcaatgtacatccttctatactattcgtctcactggtatcgataattgtaaacaacatgacctcctgaatttttcttgttttgctgcgtggctgtaggtactttttcttcttcttgctgtttggtgaagaatcatcaaactcctctaaatttgtgggagggtcattcttgataacctcttctttgctccccttcctctctagatcctcatcaagctcaagaagagtgggatctaaagcaactttgttcaagacatcagttagagagtcaaagtagtgattcccctttgacatcttcctcctggaaaacttattggcttccggaacgagaaaaaccagagaattctttggaccatctttcggctgctcagagtgccaccctcttgccagcaaacgtggccaaacagcttcccagaagaggtcactggaccgtgttttgctcatcctatattctcctgttaggaatttgactatatccgcaatcggaagatcattgcgtattcgtacttgagagttaccagaggctccatgattcaacttggttggctctaacgcgcagttggtcagatctcttttccctttacctataccaataacttgtgtaagcatatcaatgcctacagtattctttaaagtgaagacgtaatcctccagtgcaatcttatcttccctaaatgctttagatacctacaaaaacaacacatggaaatctcaagaatctgcattttgattcagaatacaccgcaaccactaactaacgagaagcatattatgtaccttaagcaacgtaatcttgcattcctcggatacatgagacgagatccgagagagcaactcttgttgcctccagcctgataataatttctggccttgaacagaccgtctgcttctggacttgcgtccatctacccatctccggtattcagtagacctgtaaaagctgccgtaatagtaagagagcatatctcccatgtgcttgctcccaacaaatctctgcaccaagacaaggtttttgccaagacagtagaggccaagaagaaacctctcttgctcagcatcttcccaaggttgacccaaagtcccagggaatggatagagggtcttatcgagccagtcaaacttgaacttggcgtttttttggcaaggcaatgcaagcacaatactcctcggtttcatgcaagcagcattctgcaaggattgatcatcgactggtggactggctttatcaatatcggcttcacggaaacctctgaatttctcacttcttgtccacataagagggataggcaagccaaaagtaaggagtttctgcaggggaggctctgaatgaaagcaagtaatgagctttagacgatcagactcagtgagtagcacaggtagatcagcctggtactgatctccaacgcgaggaagtacatcagggtctccgtgaataccattaagataaggggaattcaatagcatagaggattcatcgacaaaagcttcctccatgtcatctgaatgaataggctccatctgagtaagtcaccaccaataaatctagagcattggaaaaacgggaagcttgttaagtgtttctgagccaaacacacatccaaaagcaacattctctaacgacacacaagttggggttgaaggagtcaaaagacatccccaaatacagaaaaaccctaagattgaaagagaatgcagatgaaattccaaagtcacaagacacgaagaagaagagagccaacattgaatgaaacgattccgaaacccaagttaaagctgccgtttttctttctttattagaaaccataatgaaaccagctttaaaagctagggaagacagaaactgacccaattcataagaaaacaacaaaaacccagggaaggcacgccaattcatgaaaaatacatgattcgtatggctacgaaaacaaagaaaggagtaattgttgaacataagagccgaggctagtagtagtatgcatacaagacaagacatagtcacataggaagactttggcaacaaacctccacagaagaagaagaaagaagaagtcggaacattcaacgtggagcaataaaatcaaaaagcagagccaatctatgtattgaatctagatgtcaacttcgcgtgtgaaggaagaggtaacgatacgaacaacaagaagaagaagaagaaacgccgagaccgatagcgcaaaacaaattacaacttataaagtaatattatataaaaagaaagaaagaaaacagaaagacaagtcgcgatgagcgg

SEQ ID NO: 31341 - DNA, 1430 bp, Arabidopsis thaliana landsberg
gaacaaaaaacttgaacattttcatcaagatctctatatgaaagactccccttaaaataagtcatgtgagattcaaacactccgtttaatttctcatccagtttcgtggatcttccataatacagtatccaatttagtagtattggtgggaagagtgatgatccaaacctcgttcaagacacaaccgatcgtaaaactcgaagacgcaaatggagtccacctgaagatgtcgttctcattaatgcttggttaaatactagtaaggatcgtaaagttgttgtttatgatgaacaaaaagcacatgctttttggaagagaattggtgcatatgtttcaaatagcgcttcacttgcaaatctaccaaagcgagagtggaataactgcaagcaaagatggaggaaaattaacaaccacgtctgcaaatttgttggatgttatgatcaagctttgaatcaaagaagtagtggtcaatctgaagatgatgttttccaagttgcataccaattgtactacaacaactacatgagtaatttcaaacttgagcatgcatggagggagctccgacacaatcaaaaatggtgtagtacatacacctctgaaaattctaaggggggtggaagctcaaagagaacaaagttgaatggaggtggtgtatattcgtcaagctctaatccggagagtgtgccaatagctctagatggagaagagcaagttatggatcgtcctcttggtgtgaagtcatcaaagcaaaaagagaacaaagagaagaaagttgctactaaaacaacgattgaagtttgggtttctcgattctggatcaagacttgagaacttgtgggtactagatgaagaggagcaagttatggattgtcctcttggtgtgaagtcattaaagcaaaaagagaagaaagttgctactaaaacaatgattgaagaaagggaggccgattctggatcaagacttgagaacttgtgggtactagatgaagatgagcaagttatggatcgtcctcttggtgtgaagtcatcgaagcaaaaagagaaggaagttgctacgaaaacaacgattgaagaaagggaggctgattatccatcaagacttgagaacttgtgggcactaaaggagaaagatgaatgggaggccgattctcgatcaagacttgggagcttgtgggcacaaaaggagaaagaagaaagggaggcagccgattctcgatcaagacttgagaacttgtgggcactaaaggagaaagaagaaagggaggcagattcccgatcaagacttgagaacttgtgggcactaaaggagaaagacatagaagagcaaaagaaactaacagggatggaagtccttaaaagtcttcttggaagaagaacaggtgaaacttctgaaaaggaagaaactttgaagaacaagctcattgatgaga

SEQ ID NO: 31342 - DNA, 2213 bp, Arabidopsis thaliana landsberg
catcgctttctggagaaatttctaggcaagtgaagataactggttttccattattatggcagaggatgctctaggttcaactacgtattgtgtaaaccaatttcttttttaaagaaaaaaaaaactacttatttcctttgtccctttgaacaaattatccgttatatacaataagaatcaaaaacttaaatgggcttttcgttatccaaactaatttgggcttcttcttggattgaattgggtttggttgcccagacttgcaagactgtgaaccggacaattttaaaccggaaaaaaccgtcaaccggccaggcattcaatacaaatttaacaatgacaaaccaaagtactagcagtgttcatgagattgtcttgcattcaaacttagaaaacaaaaaagcaagaaccaatggggattagtaacgcaatgaatgagtaatagctcaatggacaagaagctatagaaatacttccgcctggaccattagctggattacccgggattgaattgcttgaagaaaccgtagctcctccaggtgaagccgcggggactgcggctatagatgatcctccaccagcaatatcatcaaactctggtgatggcgaaggtgaaggtgaaggtgaaggtagatacattagttcctttggaacattatcaggcggggctataagcggtgctaattgttgcggtcctgcaaattgtttttaccaattgcatttcagttggagatcaagatttcactcattgtgttttatcataacgcatgagacagtatacttaccagggcatcgaggttgaagagacatggacaacctgaaaaacaaacaaagagagacggagggagattggttatataggttgttaaattcattagcaggggaaatgtgataaggaaagactcattacgtggtcaagatagtgccgctagcgaaaccgttgtaactacaagtagtaagtttacaaccggagctactctgctgcgaagtaatgttaccaagcatgaagttgctgtttctacatctcatactggaacaagagactgatatagaagcaggctcacaatacatactgcatcacaccaatgctaaatatcagcaaatcatccaaaattcgactaacaaaactcaatcgcttaataccttcggcttccgagaacacagctgcattgtacacagtggcctgcagtgagagcatagcttccatttggaatgattaatccgtaatccgtagcgtatttggggaaatttgaactacaagctgagaagttttgatacaaatagacagaacattcaataatctgttataatctgtgcttaattggcaaatttctattcaaagattgaaactttagaactcttctaactaaataaagaagagagactttggatcttacctagcaatgggacagcgaggatatcaccaggattgatatcaggagctcccatagcattcacgtttgttaaatcagtaacagaggtcgagaatctctttgcgattccagccatagtgtcgattcctctcacaacgtaagatagataaagcgccggaagagattcatcggtaccattgaagcaagcgcaaggcaatggaatcacaagctttgtacctacatcgagaaccgaaaggtcagtctctgaattcgcgacctgaatctgctccggagagaccagaccaccgtaaacagagtcagcaatcgatcctagtgtatcagaagtacgagtcttgtaatgagtcgagagggattttctgattccgtcgacacaggagcaagtgattgggatcttgaggaagagcttagcgggaaggacatggttctcgacgtctgggtaagagatatcaatggagttagacagaagcattgaaactgggtctacttggaagagagaagcgacttctgtgactttgaggtcggtgtagagagtgtagcctagcaatgagttacaagtgtctttactggagcaaggctctattgtggattttgcagtcgccattgatactaagcttgaagctaaaattagaaacagaagtaagggtttttctgggttcttcatttcgattcgtgggttctgatgagttcccctcacgcaatagaggaacttggctagggttttacgaatttggaaatttctagggttttaaaaagttcaaatttttgtagggtattaacaaaatttctggaaaaatgttagtattagtggagagtatagaaaca

SEQ ID NO: 31343 - DNA, 7004 bp, Arabidopsis thaliana landsberg
caaagcaaccccgaagcaaatactccgataacccaccggtattttcctcgttagcgtctctttacccatggtggaagccctttgttttcttctccggtagtcgagctcgcatcgactggaccgattacaacgcaacccgagagctcactcgtgtcctccttctacatgaccatggcgtcaactggtatgatttcaattgtacaaaggaactagcttttttgctctcaagaacagttagttatttaccaaagtcttatatatataggtggattcctgatggacagctttgcccaactgttcctaatagatcgaattacattcattggatcaatgatcttttgtcctctgggatcattcaaagtttgggtggtgatggaagtaaagtaaagggctttgacattggtactggggctaattgcatttatcctctccttggtgcatctctttttggttggagttttgttggctcaggtttttcttcttcttttattatacttcatctgcattatactagcttctttagcagttggtgctatgttctcaatttggtgacaatgttgttttgtatacagattttactgttgtagctctagaatgggcagagaagaatgttcaaagtaatccccatttttcaggccttatcgagatcagagactctaaagttcctccacagtgttcctctgtccctgaggttggaaatacagggagtgagaaaaccatacaggaggaagctgaaatttccaccacggttcagtctgattatcatgacaacaagagttttattgaaccagctgtactactcggtgttgtcaaggaaaacgaaacattcgacttctgtatgtccaatcctccattttttgagacctttgaagaagcggggctgaatcctaaaacttcatgcggtggaactcctgaggagatggtttgcaatggtggggagcaagcttttgtgtcacgtattatcaaagatagcgctgtactgaggcaaaggttcaggtaaattgtacccaaataaacctttggatcttccacattctggttttccatccatcaggacttatcgttttgtgaacatgtttaatattaggtggtacacttcaatgcttggaaagaaggctaacctcaaactcttgatatctaagctttgggaagtgggagtgaccattgtgaagaccactgaatttgtccaaggtcaaacatcccgttggggcctcgcttggtcgtttatgcccatagctaggaagattatagcacctcctgtagtcaaaaagagcgttctttcttttatgcttgaggtattctatctataactttcgtcatcctttacttatatttgctctgtaactatataaaagtctcgggctttacaaaagccttacattctttatggtggatttgtgtgtttatagtgcattaaacggcagtacagtgccgtagatgtgctgcaatcagttgaagaattcttcaagagctgtggcgcctcgtgcaagttaaactcttctacattttctgttgacgtaagtgcactacctgtattgttttgtcttgccatccaatcttgtttctactgtatctcaagctcaatggagtttctttctattgttgtgcagattgttgcatctaatgaccagtgcaaaacaatctcaaagaatgacattgcagatgtagatagtgtaagaagccatggatatgaaaaacagtcactggatggctccagtttgcaagtccctaaatataacctatctttccgcatcttggtatgtttggatttcatttgagaaatcccttgcaattgccttcaccttttcgaattgtttatgatggagaaacttctattacaggtgttccaacagatgccaggaacgttgcttataaaaggatcattgcagcagaaagatagtcctctctcaggttagtcattttgctcggtttccctaagttgctcgaaaatttttcacttctttattcatgaatctgcaaaagctttggttctattcatctgatctcaccaaagtcgcgaagtaccaaaactttcgctggtagttaccaacgtcaagacaactgaattgtcggtttaattttgcatatgcaggattgttctccggggtctttggttcgttggaagaaagtttgaagtccaaattttgccggtaacgagtcccagggtactgttctgacttgaagaatggcatctgtcaaaaactaaatgaaaatgaatatgaatcttcaaatcttagtaaaatttgggtactttttgacacatgacatgttcttacacacaaaaacaagccgtcttttgaattgattcctacataaattgagacaattactctcaacagaggcaagcaaacttttgtcagctaagattgttgtggatgaaaagtgttgcatagcagaccactcgtgtttctcaactgcagatataactagaatcaagacttgaaaagacttaccttacggggaaagatacaccagagccaagttggattacccaaaagtagtaaaggagagagagagagagagagagagggttcttcacttcacgtgacaaagcaagttacttttgcctttctctccagtttctctttttgatcaaccatcgtttgtgatgaaaaatgtaagacctctaccacctataaatatcttgcattgcatgtgggtgtagttattttgaattgtcactttctcttttcgcagtgaccttctatatataactttggtgatccctcaaccctttgattcatttggaaagatatgaatcctggtgaagatgaatactttctccttcacctcccaaacctctctaacacccccttacaaccttcaaaatccttgccttctgatgatttgcgcaactttcgtcttctcctcaagtggtgcgctttggatcactcctcctcttgtggtaaagctgtgtcatatatgatgtttgtagtcttcaccttagtagtccctctcataagttgtctgtttatcaaaactcctagaaaccggccttcaacagttatggatgcaaactctttcaatgtgctcgtccagtttccagagtctggacttgccgtcattggtttcttgactctaatatgtttcttcagaatatatagtctcacaaagcttctgtttcttgatgattctaccttggtgaggcttggatattcgagagaacttgacaaggccttacgttacctagcctacatacttgtaccgtcttttcttgtggaacttgtgcataagagcatatttttctactccgccgaagtatcatttcctttcataaagtcatcttgtgctgcattgaactttgtgatgttcttcctcgtcttattttcatgggtttaccggacaggagtgttcttgattgtttgtatcttgttccggttgacctgtgagctgcagatactgaggtttcgagggcttcacaagctgttcgatagatgtggatcagacaccatagaagatgtatgcaaggaacatgtgaggattaagaaacaattgtcggctacaagtcacagatacaggttcttcatcatcaccgcctttgttgtgataagtaccagtcagtttgtggccttattgttggttcttgcctcaaagtctgaaaagagtttcctcagctctggtgatttggtggtaattctataaagctttgttgtaataatttttctagtttccccgttctgcatttaatgcagcattcattttcttttctatctcaaggtatgttctgcagtacagctaagtggattcttcttgtgcttgttgggtgctgcaagaatcacacacagagctcaaggagtagtgtgtattgcaacaaggtggcacatggctttgacatgcgcttctgaagccgtatcacccgaaagtgacactgactcatccgacaacatatacatcaatgtatcaccgtcactggatctatcttccttcttccaggctaggcaagctctaggtgcgttacaattatgatagcatgctcttcttttttcaaattacttgcgagcaattgataagagttacattgcagtggaatacctacgacataacaacaaggggattacactctatggttatgcactcgataggggactgcttcatacgctctttgcatttgagttctctctggtgatgtggatcctgagcaaagtcgtggttctatcttagaactcattaaggtatttatgagacaaccaaagacgctgcaaaagcttcaattaaagcttctcttgaagcctgacttttcgaaagatggatgctttgattgatgcacaacacttggtcaccggtgtttgaccaaacaaaaaaaatcttgatcattggtttaacagacagaaccgggttattgtcctgtggcgttgttggatttgaatgtttgatgaacatcataaatgttggttgctccaactgtatcgctttttctttattttagtatttgctcatttctctgccatctccatcgctttctaataacttagccaatacgaaacaaacctgaaaaatccatcatttatctgtaaattggtttgattttgcttctttattaaccaataaatcttgaagaagacaaaaaggaaaaagaattagaagtctgtagtttctagctctgttacactgacaaaacttctaaagctacatcaaaatcatcacaaactccgtgaacgtataaatccctgcttttgcaggctttaacagtggacaatcctgtgaagaaaaattgcaggtgttcgctgatgcttcttcttgtatgagagatcatgttcttgaagcttcttcttccataagtgcagccagattatgcagaatgaagtatatctcttctttacgagcatgagcatgtgacccgtctgagacagtgaaagcttcgacttttttctcgatttcaatccaactcacagctttttctttattcactcttctcttcttcataacccctctcagcttctctactaattcccacttcccatgatctgcgtaaatgcttgacagcaatatgtatggtgcagacgactcagggtccagtttgatcagctcttccgctgctttctttcccagttcttcgtttccatggattctggttactcctaggattgcgttccagatatgcttgtcgggttcaaaaggcatttcctcgatcttcctcatcagttctttgaaacaaccagcacgacctaggagatctatcagacatgcgtaatgctcatggtcaggaacaatcctgtgctgaacagtcattgactcaaaccacctcaatccttcctctaccagacctgaatgactgcaggcattaagaatcacaaccagagtcgttcggtttggctggactctgaatttgatcatgtcatcaagcattcgcaaggccttgtggccaagcccatgctgtgccaatgcagaaatcatcgtgttccacaaaacgcagtcgtgcttgtcatcgcaaattctgaacacccgctcgctagcttctaacctacctgatttggagtacatatctatcaaagaactgatgacaatcgcgttcggtctaacattggtacggatcatacagccatgaatttgcttcccatgtctaagagaagcaatgctcgcagaggcacatagacagctactgaaagtaaattgctctggtttaaccctcaaagcaatcatttttctaaacaagtcaagcgcttgattccctgagccttgtctaacatatccagcaattaatgcagtccaagagactggatttttctctggcatctcacagaataacttttcagcagcttccatatctcccagtttggcatacccagagatcagagtagtccaaatatgaatatccttcactgtcatctcatcaaaacatcttttagcactctccatctgaccacatttcgcataagcatcgatgatagaacacgaaagtaccacatttgacaaaaacccagcaaccaaaacctgcccgtgagcttgccgattgagctggagctgcctagatttcacacatgccgtcaaaagcccagcgaagctgaactcgttgaacttgattccagatctcctaaactctttataaaaccacaacgcctcgtgtagattcccatcctgagcatacccaataaccatcgtgttccaagaaacaacgtctctctcaggcatactatcgaacattacgcgtgcacgcaccaacatccctgatttgacatacccagagaccatattgttccacgaatacaagttcctgagatgcatttgatcaaacactttacaagcatcaataggtttaccgcatttcatgtacattccgattaaatgattggacaaaagcgtgttgggtctcttgaatccagtaatcttcaagtgacgatgaatccatttgccttgtttcaaagactttgtatctccacactgctggagcagagatgctaggaggtcaaagggtaatcgaatcccttgttgagtcaaggactcgagatgagatacggcctgagagagctctgctttcgttgcgtgtttgctgagaaacgattgggcgacacagattggccgtttcctagggttactgatgggcattggagggagaaaccaccatgggatgcgaatttaacgatttgcgagtggatcccggcgaacacaagtcagaaagggtttgcgccggcgagattcgccggtaagaaatcatatgccgtcggatgggtttagaaaccggatctggttttgattttggtttggatcatactaacaaagacaaatcctttttcacttttgggcttaggtctaaagcccatgggccttcttaaatcaacgtatttacgatttttgccatgtcttaaaataaaataactggattataaaatatttttggatagaaaatatttcttgttttttttttcttttttttggatagaaaatattcatctcgtagcaatgctagatctccaaatatgaaaaaagagtagtgaaatgttacgtgtagacattgcaaaacgtcgccgtattatatgatacaaagactttctagtgcataatggtaa

SEQ ID NO: 31344 - DNA, 3242 bp, Arabidopsis thaliana landsberg
cattcattttttaatattttactaaagagacgtctcgtgttcgtgcgtagctctatattttctggtttatcgtaaaatagttcatgattttgtattgaacgatttgtacactcgttcaacgaaaccaagcattcttcaatctttcaaatccattagtttactttagcttaccttttgaaaaaaataagcgaatctttcttcctttacttttcttccactcattaaaatgttctctctatatataaatgataaatctagtcttctaatcatatactctctataccacacatatctagaacaacaactagatattcaatattagctctaatggcttcttgtgacacacctgatgcgtttgcttggcttcaaactcttcctcctctttctcaatggaaaggaaatttaatgtccatgtgtatttgctctccaaattcatcacacccatctttgaacttcactcttactcgtacccctcaatctccaaactttttcaccttctcgatagtagccaatttcaagactcctattactctctttatttcaaaaactttcagaaccattagtactaattcaactactttcctcaatgaaaacgtcatatctactctattgatgggttttgtcgacgttgttctcaactataacgtcaagagaaccacttgttcaatccaactccaaaacctaggctccacttctaacctcaaagacgttttcaacctcgctttcttcactttcgtgttcctcatctgcatctacgaggcgccaacgagcctgagaacaacttgtctcaaaacggtgaaagatcagctggtaacttgtaggtcaaggcagggctctaagttgctcatggtgcaactaggctctaaccttgaagaacaatggatgagatcgctgaaccttgcaataaccaactggatcatcgagatcaaagcgtttcagcatctcaagtctccttctcctttgttttcatatgctttctcgactcaaggtctatggaaagttcatatgtattgtcctgtggtagcaatggaaatggagagcgtaaatagttctctaaacgacgagagattgttcttctcgctaaactatcatcaacttgaaggtgtaatccaattgaaccacaggatttacgttcgtgaaaagtggtttaacgtcgcagtaaatattgacaacgtcaggtatcgtaaaattgtgtgtaatcaagcatacataagtaatttgttcatattaatttctcttaactatagatattgtttataactaggtgcgacataataaggcttgtgaacgagaaactattatcggaacgtggcatgggaacagaggaaaaacatttcccctcaagaatatcattgcaactaacaccaacgaatcaatcaaacatcttaatggtatccgtacaaaaatcttcagaaaacccattgacagaattcgaagtagagaaaggcatagaagcaacaatagatccaccaaacacattctttggactaaaagtctcagccaacgagaccacaacaaaaagcatgaagccatggaagttcgaggaatgggttcatggttatagcgccaatctcacttggtttctccatgatcttgacgatggaagagaagtttcgtcctctaaaccatcgaaagtctcgatgatgaaccctcgagcttggttcaagaaccggtactcgagcgcgtttagaccgttcacgaagcaaggaggagttgtgtttgcaggagatagttatgggcaaagcgttttgtggaaagttgataaaacggctattgggaaagtaatggagtttgaggttaaaggttgcgtttggttgacttattggcctaacaagcatcatactttttatagtgatactagaaagttggaatttaaggagatgctttacctcaatcttccttagatatttcttttcttactttcaccctaagcaaaatattcccctagtttgttgcttttttcagtaaagtttgtaaaataatacttatgatggaattattgaatttagaaaatacagtattgtgcttttctaatgacttcaccgacataaagaaaaaaagtttggtatatatgaatatcaaagtcgtatatagtccatagtttttttccgttgttgttatccataaatttatttttcaacattattatacgtataatttggtggatctaacataaataaaatcatgtagtagaagttttttttttatttttgaaaattggagaaccacacaagagatggcaataaaataaaatgaaaagtctttatttgttgctctagagcaatgcaaaaagctgacgtgtaccaatgaagcccacgaccaatggtgggctcttggcttctcaatcatcttcctccttctcgtttccgagattccgcggccaacttccgattatcttctcagccaataataatcagaagaagaagaatcttccaaatccaaacgtcgtcactctttgtctccactctcattccaatgtctcctcctctcaaatcgccgtcactcgccgcgcaattctcgtcgcaccaccgctcctcgccgccgccgcttcgttgtttctctctatttcctcagctgcctctgctgagacttctgcggaatcagtagctcttcctcctgttgctactgctcctcctcctccgcctgtggagaaggaagaggcgataacttctagaatctatgacgcgtctgtgcttggtgagccgatggctgttgggaaagataagaagagagtgtgggagaagctattgaatgcgaggattgtctatctcggagaagcagaacaagtgcctacaagagacgacaaggttctcgagctcgaaatcgtgaggaatttgaggaagcgatgtattgagagcgatcgtcagttatctttagcattggaagcatttcctcttgatttgcaggaacagttaaaccaatacatggacaagaggtttgcttctactcgcttctctgcatattcgttaattgcaatgtgtttttgattccaattgttcttggattggttgcaggatggatggagaggtattgaagtcgtatgtatcacattggccagtccaacgttggcaagagtatgagcctctcttaagttactgccgcgataacggagttaaactcattgcttgtggcactccgctcaaggtagagtcttatactactatattgtcatgaaatcttgagccttttgatcctgcagcttgatctgaaacctttctgattgaagattatgcattttttta

SEQ ID NO: 31345 - DNA, 1785 bp, Arabidopsis thaliana landsberg
attaatgcaaacatatatactatgtcaagagataccatatatatgcgtattattgatatataaaccatgtacactaatcaatgtgtctctttaatatacattgagagacattccggtgcactctctctcaaccgaaccattagaatgtcccaaacaataccaagaaaatcacaatttaagcacaataaaaatatacatagatgaatgaaattaaccttgtaacaccgcggtatatagacgtcctttgtccaaaactctcaatagttttcttcggtgtagtttctacgacatcaacaatagtcttctcttggacgacatcatcattgttgttgtagttgttgctatcactagtagatgaattcatagagagggacaagcctcgtgcaccgttaccattgtcttgatgattagcattagcaaccgaatgattactcagccatgtttttatcatcgaaaggcctagtgagccgccaccaccaccgtctcctcctccacaatcgccatttccatctacaacggtctcgttggtattgtaaatcgtggtggtgcggccgaggaaattctcaagctttggtccattttgttcgttattgttaatgttattgcatgcaccaccattgatgtcccaatctatagacaaaaaacaaagcgatccccaacgttgggtttgattcatcaccgatctataatatacgaaatggaattttcattttataaggataaaagggtacaaaataaatgtctagtttcatgttttactaagtttaaattcatgagatgtgatcatgtgaacaaacactaaaccccactcatggaaattctcaaaagagatgaaatcgataaacaatgaaaaacaaaaatagggctacgtgcgtgagtcttggtctttgttctatgcattggaagaaggggaaaaaataacaaaaacaaagataaaataaatatttttaaaacacaaacctcgggagtgactattattgtctctggtgaaagcttcgagggtgacaccgaaaggagaaagaaaagatgtttgaacggcagaagattcatcggagggagcggccagatcaaaacagtaccctccggcaacatctacggcggttctggtggtggaggagtcaacatccgtacggtgatgattttgatcatgaggagagagagagaagcctaaccagttattcatcgagttcatataatattctaactactccttgtgatagatgagagaagaagaataggaaaaagaacttagttagggttcatgcatgaagaggagaaagacaaaggttttggtgttaaatgaagagagaagaggaagaagaagaagaaaagtcaaaaatataatgttcatttcttccgaggcgacatattatgcgcatttagagaattttgcaattaaattcagaaagaaaaatatttacttgaaaaatgtgaagatgtattggtcggtttgaaggttagggtagtaatgtcgtttcaactggataatctcgtaatcccaatttgttttgatgacactttaattaatcagtcaaaaaccatttcaaatctctgctttctgtctctctctcttcatgcgtataaaatgttaaatgtaaatgacaaaaatgggtaaacatgtcgaggaccaatagtaaaatccaaaaactcactcgttgtcgatttaagaccaatgatgctgtgtctcttagagacatgtgtatgtgcgaacccatgacacgagccagcgatttagtttggcaaattttccaaacgcgaactcgtcacttttagtattttttaaca

SEQ ID NO: 31346 - DNA, 649 bp, Arabidopsis thaliana landsberg
actagcatgcccgttctgttgtccaacagtactatccgtagcagatgaccggctagtcagtccatgtgaatggtttatagagtcctttcagtaacaggcactcttgtcatcatagcccgtacctcctcccccgtgccagccttagagtctttccacttcttgttggcagatggtgcaaaccgtcgcaaatgcaggggcagtggggttgtggagatgatagagaatcatcatggaagaatgtttcgcccgcctgagagtgtcgtactgatagttatttccttggcaaagattcaggaaagcttgtctattatggaagaattcgctctcgaggttgttatctttgtcttcaatcttggtgggaacgtctttgatggccacctgcaaagatccacaccttgtcagtttctaagataccaaaggagagaatgaaactcttaaatctctaaccaccattagaaacttacaggaaatagcgcgtgtttctctttctgattaatcagatgtctcttctatatttatgccggtctggtccacttcataacacctatggttgaaagacaaggtgttagtccaatgatttgaagtattatatagcctgagtatgatcatatatgtagcagagatcttacttgtcacagatctgaaaatt

SEQ ID NO: 31347 - DNA, 1010 bp, Arabidopsis thaliana landsberg
tttgtaattctattttcagagtaaaaccaaggcagaaaaaaacaaagcaatggggtgctccatgtctgtgaattcttgtcagttatgtgctgttgagtggcttgtatttgagccagtacctatttactgctcaccttgtggtatacgcatcaagaaaaatgccttgcactatagtattgcggttggtgagtcaaggcactatgtctgtgcaccttgctacaatgaagcgcgtgaaaaattggtttttcttgatggaacttctataccgaaaacaaggcttcagaaaaagaaaaatgatgaacaagttccggaaggggtatgtatgcctcatgatatctgaaatttgtttcttcctttgttttttttttctttgttttctttttttgagtgtgtctgaaccaaaccaatggttttctgcagtgggtgcaatgtgataagtgtgaagcatggcagcatataatttgtgctttgttcaacagccgaagaaatcatggagaatccaccaagtacacttgccctagttgctatattcaagaggtggaacaaagagaaagaagaccattgccactaagtgctgttccgggggcaacaaatttaccagttacttctcttagcaagcatctagaggagcggttattcaaaaagttgaaggaggaaagacaagagagggctagacttcaaggaaaaacttatgaggaggtgatctctaactctttaaggctgtcaactgttttatgcttttgttcttttacgatacatgagctttaggttcacttgaacagcctggagcaaattttgttataataaccatctaccttcattattgatgtatcaggtcccaggagctgaatcacttactgtcagggttgtgggatcggttgataaagtattagaagtaaaggaacgtttccttgagcttttccgtgaagattataatccccctgaattcccttataagtccaaggtagcattagtacatgggatttgaaacttattcatgtaaatgatgc

SEQ ID NO: 31348 - DNA, 783 bp, Arabidopsis thaliana landsberg
ttgcaggtcgactctagaggatccccttttccgccaaatatatatgtaaaatacataaaataaatacaatttaaaatatatctatattaaatttgggtacccatagttctggaacacatggttttttttgggtttctctacccacaagtaccaaaacccattcagatttattatgggcatgcttgttttgggtttgggctggactgggtgtttttacccaccacaacatccctacccccgagtgctcaacagtggggcggactaccaagtaatcaacaatggggaacacacaaccaaatattttccaatggaacacaccaccatgtggttaacagtgggaacaccacctaatgctcaacaatggaacacacaaccaaatattttccaatggaacacaccaccaaatgcttctcaatgtagttcacaccaaatgatccacaatcgggttcatcaccaaatgcttcacattaggggctacaaccaaattttcaatcttggggtacgacatgtaacgttcacgaagagcgcaatacaccagattttcaacaagtaggctcattaggaacgactccaacaaatattcaatatggattttcattaaaaatcaagaagatacaataaggaatactcagcaaaaagtttcacgaacacataggccagggtctatttaatatgtgagaaactttgcagaaaacaaatgctagtgattcaaaagatgaaaattagattactatcttttatgttttaaagtatgttatatttttcgtagtttatttatgtaat

SEQ ID NO: 31349 - DNA, 474 bp, Arabidopsis thaliana landsberg
tttatttgataaaaaacgaaataatcaaacctaaaacccagtaacaccaccaaatctaaggaacccacgattacagtgaaacccatacaagagaacacacgaatcagactaagaaagcacaaaaacacacaaaaatcgaagaatgtactaatcaatcaaacacacaaatccaaacgagaaaacaaaaaccaagaaacacatcaaaatcaaaaataaaccaaatcgagatgaaataagcagcgataaaggagaaatctaccgatcgtcgtctccgtaatccatcgatcttcttctgtcgtctacaacttgtgggaataactagccgttgcccagaaaatgaaaacacacacaaatcaacaataagaacaaaaaacatgcacgctccaaagacccacaaagcaatatatatatatgaatcagaaaaagaagcagtttttgactgaccttgtgtgtgtgctcgagatatgtgcttag

SEQ ID NO: 31350 - DNA, 1137 bp, Arabidopsis thaliana landsberg
aaattcgacgtagatcaaccagaagctgaaaatggcagtacctgagatccacgactatcttgatccttctaagacccgtaaccatcctatacctagaaggagtcgacctccaagatcacatacaagcaagtacaaaggcaacggttggtcttttatgagttgtgctccttccagagttcagtggggtgatctcccatagcgtgtggggagttcccttatctttgtatatgaaacattcttttagttttgttcatgtaaaattctacactttaaagaagacttgtttattgatgtaaagaccctcattcgaatgaagaaatcagacgaaatgtcattttgcaggtacatgatcttctgaaacaaaacaaaaattctaagcaagctgcaaaactgaaagtttaaggctttaataaaaagattagaggacactatttgttcttcatttagagcagctgataaggtctagagacggtaagagtttagagaaggtttgctacacaatatgcctgagacttgagaaccaaaaaccacaaaaccaaaagtgactgatccatcatcataagcttgtgaaatcttggagacaaaattaatagctaagagcagagaacagtccagagaaatagaaccagggggatataataggtaacaaaataacaccatcaaatatcaggttagtactcaatgagataaacagaggtatacaattatgtgaacacactacaccatcccaattaacaaaatgataagaaaaaacttgagagaagagcttcattttcaaatgtaatacaacacatcagtttctcaacgaatcaagaaagagttaacattgattaaaaacagaaacataaaacactaactagaacaaacacactcatgacaaattaaattaccaatcggcaaaacatttaatcagtatgaatataagaaaaaggtttgcaggttattcttcaaagtgaaactgcattatgacttgacatacagacttgttgtacctctagaaaccaaataaagttttcatttttatgattccaagacataccaaacctatcaattctcaccatttcccctatcaaaaatttcaacaacgacaagaaaaagagtctgccaattagactcttgcagtcttcaaatgggcac

SEQ ID NO: 31351 - DNA, 3262 bp, Arabidopsis thaliana landsberg
  unsure (1)..(3262): unsure at all n locations
gaacattgtcactgcttcagttattaattcagtggattctaaaccatgcttcattggtctatacagatatggaccagatagttttaaacaccaattgatgaagatggttttttttgggaattttaaaagaaaatgggaacttattaaaaaacacaagaaaagtgagattcaagacttacagatttgaaggtgctaaccttttaagtttgctctgagctgcaagcctcctcagtcttgtactaaggattcttctaaaatttggcggtacttcatgcctgggctgctctttccacagtaaaccattgttagcactcagtcgtaaggtccaatacaaaagctattatatagccaaatgtgataaaagaataacagaaagtgaccaaatttaagtaaaatcaagagttctaacattttttcagatatgcatagtggacagcttcacgacaagtattatcatactataaaacgtcaaagtacaaataattagtagtataagactttacatttagaactcggtgttctcatttgagaaggacgaatcatctaagattgctgatagtagtaataagccatttgcacaagtcaatgtaagatagagtttacacgtgccaataacataactatccctcccacatatatagatgatgtctctaataatctgttaagtagtttacaaagcgagcacatataattttctgatctgtgcataataaatagcagagagaaatttgtcaaacctcaatgaaatgataaatggaactgacatcagatccattaccatcggctaaagcagagagagcttcaaatatcaccccgtcatacctgaaaatagggacatatcagaagtttagcaatacatgatgaagattattactcagagttgatagactagcatttatggaactagtctctcatcatactttctggcctcaagtatgagaaatagagaacaaagaaagacaaacctaggagcattctttgtattttcatcagggatcaactcagaaggtaaagtacgccgaccgggaggaggtggaatagtagggataggccgtggaatagtgacagcatcatttgcatctgcagccggagtgtcgccttcctctttgacttttgctggccgtgccttattagttaaactttgagtaccagggggaacactcaagttacgccacttatcctattaagtattgaaacacacaaaattttcaaactcttcttcataagactaccaccaagtaaaagaaatccatagcaaaatgaaggacagtactactctttccacctcaaatctccaactcaaccaagctagctttaggtattgcacacttgaatcaataaaaaaaaaaacttataatctatccaaggaatctctaatcctataaccaatgatcagaggcaacactaataaaacctattgccaaaagttttgattttttagggatcttaaactaagcagatacgacagagtacataatgcactccgggttggtctcaaattcgatgtctaggtttaatatatggttcaacgagagtgattttaaagaggtgagtgaagaaaagagaaacctttaggtcaatgttggagcgatggatgagctgatcagcgaattctggatcccggagaatattcttccactttccaggaccgtgctttctgattccggcgagtaacgcctcctcttcctccgccgtccactttagtttctggtttcccatctaacccttgcgtgatttacctcgtgctctctctctctctccaagacaatcggcgtgtaaacggagttagacgcagtctcttcgccgtagctttcgccggaggtttcgtttatttttggctctgcgcagttgtgtgactgcgggaggaggtttccagtttgcaaaactttttcgattatttacttccgaatttatgctttttattttgtcttctatttacgctctcgaaattaaatcgatttttttttttggccttttgacttaaattaaaaacaaataagctttgtatttgaatccttaattattttatttgaagtttagttctctaaataaaaaactgatgacaaaaaaaaatcatannnnnnnnnnnnnnnnnnnnnnnaatatttctgacattataagagaaacacatgaaaattcgaggatgtttggttgtcacgatggattgcaattttgcaaagtaatcaagtatgactttgaaaagtccaatgttgaagaggttaattttgtaaaaattaaacttatggggtcacattcgaaatatcagcaaatacagtgtgtggtggcaagagaaaaccaacttgggtttaaatagagaaaataaaataaatggggttaagttcgaaataaacgtaaacgcgagtattaagcgaatctggtactgcgcgtatctggaaacaactggactgagtctttccctaaaaaccctaaacatagatttttagtttagtttggtttcatttctcatttcggcaaccaaaccaaacattcagagagacacaacacaaccacatcatcacacgtttctctctctctctttcctctccgncgnctctctctctctagccaccaccaaaatccttaaaacctagacttttctcttccatcgatggcggctaataacagatccgatcatgggtcagacgaaaacacaagactttacaatccttaccaaaacgacgaagtcccaatcaacaaatctcagtacctttacaagcttcctacctcccctgagtttctcttcacggaggaggctttaaggcaacgtagatcttggggtgagaatctcactttctacaccggaacagcttacctcggtggctccgttgccggagcttctgttggagtcatcactggagtcaaaagcttcgaatctggcgacactactaagctcaaaatcaacaggatcttgaactcttctggtcaaactggtcgaacttggggtaatcggattggtatcattggattggttnnnnnnnnnnnnnnnnnnnnnnnnnnnnnnnnnnnnnnnnnnnatgatgtttggaccagtgtggtggctggtcttggaaccggagctgtttgtagagcggcgagaggagtgagatctgcagctgtagctggtgctcttggtggacttgcggctggagctgttgtagctgggaagcaaattgtgaagcggtatgtgccatttgaagactgcaagagtctaattggcagactctttttcgggtcgttgttgaaatttttgataggggacatggtgagaattgataggtttggt

SEQ ID NO: 31352 - DNA, 1782 bp, Arabidopsis thaliana landsberg
taattttgttctagagttttttaaccacacaacactatcaacttagaacaagattatattttaatgaaatgtatatagaattcatattctggtttatgtgaaagcatgattaatccattgaacatcctgctcttactttttgtaatatacgtgtatattgcatagtaattagcttagtttgtaactagcttagtttgtcaactagcttagtaattagctcatatacacgtgtatgtagcatacgtgttaaatatacatgtgtaactcgtttaatttgtcaaataaaaccagtgatctatatcgtattttatataaaagtgttgttgtaatatgtataaaattaaaaaaatatatatataaatagatgcaagagtaaaagtacgagacatacatatataataatttattttctaatttagaaattgttggattttattgaatgtagaatggcgtccaatcgtcgacggaacacataccctttcagacgaacagattcaactcatcccattgaaattttaactcctcctacagaaacaacaatatgggtaaatttagtattttatatatatatatatatatatattaaaaatttactttaatttgatagaataaataacattgtattcacgaaatttgtagaacaaagacaagtacaaatggacgtacatacatgaaaaaacattaattcaattgttcgacgaagcaattgccatgaataattatactctcaagaatcctactgctatcggtagagagtatatggttgaaaagttcaatatagcattcaacatgaatataacttatagttttttcaaaaacaagcttgataaattcaaaaaaagttacaagaggtggaaagctcttacgcacaaaaacaggcatcacggttgatcctgatacatctttcataaatgcatctgacgcatggtggactgaacaagagtttgtaagtacatcaaatatttgtattaatcaattataattcaaaattttggtatcacgtatctaaattattttaaaattacagggatgcaaattaacaaaaagcatgaaccgaaaaccgtctgtattttgggacgtgatgcaacgatgtctcgtattacatgatgttcaatcacaatctcaacattctgcttgtcaaagaagagaacaattgatccacgagcatggagttgatgaagaaggtgaagattactcagatagtgacagtggtaacatgccacaaaccgaggttcctgaaacgcaagaagaagaagaagtgtatcgtgttaccattgatgatggtgaaatattctaaaattctgctgctagaaggcaacaacgaggtaggccaaattttcagtcaaccgctagacgtggaagtagtgcacaaagatctggaggaacctcacgagtttctattggaagtggttcaggaggaagtcggagacgacaatcctttgaaacaacaatacaagacagcatcactagcttcggagaattccaacaacaaagttttcaacaacttcgtcctggtgcttttgaccaagatgattacgatgaatttaaaaaggcggaagcgatatttatcgccctagatcttcccaagcacactagatttcattgggcatgcattaatgcacttaaggagctagtattttggcctaagtatttcattgatatagcggcaagcccagacaaggataaggtacaactgttagaagctatgactggagtttcaaacaacaaccaagatgtgccaaaatagttaggttcatgccattcatttggagtccacatctg

SEQ ID NO: 31353 - DNA, 2279 bp, Arabidopsis thaliana landsberg
catgttagttgtgtggtttaaaatttaccttactcgattataaataaatcaattcattgttttatgtaattcaacaacattgtgataagctcatgattaaagtttggattaacttcaactgaacaagatctaaagagtattcatatgaaaaaggaatatgaagaaaataaaaagatagcaaaaactgaatgtcatttaagtcaacacttttaaatcttctgtcattgcatatatctatattagagaaatgatcgtgtcttgaatgaattgaaaattgtctaacttgattataaataaactctttctggttttatgtattcttctgatataatactccaacaacattgttataggctcatgattaaatatatataattgatataaactcaacaagatttcaagagtattcatatgaaaaactaaaaataaaagcaaaaatgaaagtatcatttaagtaaatacttttaaatcttctgtcattgcatatatccatataagagaaatgatctttgttgggtattaaaaataattaacaattaacagaacataattaactaaaaaacagaaatccacaaaaatatttagaaaccaaacattgttaaaaatattattttttatatatgcggtaatctcttaagttaattttacatcatgcaaattaatattaaatgagttaaaattaataaatgaaaatattctcattaaaaataattgaaaagttaaatcctataagctaagctatttttttctcaaaatgttctattttcacttatgattacatgagtgaaaattcttaaaataaaacataagtatagtatcacatcaaaagatgcaagacgctccatcatacgatgagttaaaattcttagaataaaacataagtattcaaaattttattcttataagttcattaatattttgtgttttgatttaacgaataaaaacattgtattacattgacaaatataattttatccaactaaaataatgattagaaaattatattactattttaaacttcaatggtctttttaattagtattgttatccatactaaattatattcttaagaaaataatatatgctacatttaaatgaccaataacacatgtaaaaacaaatttgataattttccttttgttgaataaatgttaattgtttataaatatatagacatataaattagtagatgtaaattaatatgtgttacatttaaagaaaataatatgtgctatatttaaatgaccaataacacatgaaaaaacaaatttgataattttcttttgttgaataaatgttaattgtttatatatatatagacatataaattagtatatgtaaatttgtttaattttttagattttctattttttttaaagaataaaaacgttaaatctttaatgacacatgtaaacatctgatcatttgatttgacatgtggcacaatcatgtgagttagtaactttgaaaaccatattttatataataaaataagagtttctatactcgatgaccaaagaagactcgttatttaactaactgaaatctacactatttggatcgtctatgtagcaaaataatgacctattaacccctatccgcctatcaaaattaaagtgcgatatatgctaaacagtaagcgtgtcagaaccgagagacatcatatctctcccaaagatttaattttcgagaattctttgggagtaagtgtcttaagactggtagaaggggaactcggtgttccaaacgaagagtctaatgatgacattattaagattgtggtttgtggtgttgccatggatgcgccagcaagtgtcagctaggttttcgtcttcaacgggagtttgttgtgacatagttaccccacaattcaatgttctagttgtctttgttccctcgtttgccagaactgtctccatttgctgtccttctagagtcctctctgtagtacatacatctcgccacatttccgcgacgtaggttcttttaaaagcctcaaattccgcttctgtagaagcttgttccacctcaaacatgttgttacatggtaaaacattcttgaatgcaggttgagacaatattgactcggtaacttggcatttgcctttctcgctggttgttgccttttatttctctgtgtaaaggactgcttgggtaccaatgctctaagaggtgttgcgtttaacggttcctctatccttatcccttcatttaggttcactcttttcgggcattcaacagtttctttcctcttggttggagatcgctgagctacattc

SEQ ID NO: 31354 - DNA, 1111 bp, Arabidopsis thaliana landsberg
aaaacaagatcagtggcatcgagaaagttgtggagaatcaggaagtaaagatcatgtgtgaacaaaaacatggcacaaaacaagatgaagatgtaacaaaagagtttgattgtggaatcgaggtcacacaccaagacaagagggtctttgaagaagtagatgaagatacaccataagaaaatgaagttgatcatgtaaacagtggtgaggagagacacgaaacaaaccacacttatattgcaatcaaacctttattttttctgttagcacgaaactacttttaaaactttatatttccaacttttaccatagttagtgccaaattaatagcattatggagtctggagaggttatatatatatgctccgtattaatatatatggaagctagttaactaattataatgtagttctcttcatttaacaaatatatgatatattttttaattttattttttcaattggtaaagatcttacgcgaaacttagagatcgtcggtcgagtgacgtttgagatgaaaataatattatatgctatagaaaaatgatatattttctataggtagttgagtggtttcccttccttagagaagtaatgatggcctgggcacacattaaaagtaggagtttcttgtacgttgatgtactttgggatttggttcttgttccttgacttgagctaggaccagcttaggtatcaatctaagccaacgcatacatttggcgaggaatcgaaagtagctatattagtagaatatatcaaagttatctattactctacactgtacgtattgtctaaaattagatcatatgattatttcatgctgagaattttatacaatggctgctattacgtaccccaatatcatgcttgtgcttgggttggtaataccaacttggtatggtatctcatgaactagttcaactatctgattttagatagttttgtggttacatgcactggatgcacacatgcatgacatgtaaacaaaagatgcaacattctgacgaaatttaattcatctctaagattatagtcttatatatagacctaacatggatagatctatttttggacagaagaattcggacctgaaattgtttttattgaaa

SEQ ID NO: 31355 - DNA, 1539 bp, Arabidopsis thaliana landsberg
ggggggggatatatgtatggattcacatttaaactttgtttatatcatcaactcattgaattaaagatagataatttgttcagatccatataaaaggagatcggtcaatttattggaagaaactattgcatacaaccactaatttgattatttccgagaaagatacaaaagggacgtccacgtctgtccgagtcattcaatctatttttattagttacataaactcaacatataacgtgatattttcactttcttaagcctaaaattcagactagtatttaaaactagtgattaggccataagatctataattaggtgaagataatatattaatggacattaacatattgataggaactaggtatccgtttcattacaatcttcacactatcaatattatagcgtgttggatttaactaggaagttctcggaaagtaaagtaatataactaatcaacttaatcgatgatgcatttgtattattaatagaccatgcccgacaataacgacgatgttcgagtagtggaccattcttgtattctatgcaatttgattaactagtgagttttatattatagtctttttttttttttgtttgggcacacgaaacttgaatattaaaacgaaaccagggttttacattccaacagagaggggagcagataaagccactaaggctgattttgcaagagaatcggctaaaacattcgccgctcttagaagagtaagcagagctatatcatggagaattcctttaagctccgtagtactctccttcgagttgatcatagtgatgaggacctgggagtcagacatcacagtgagagaggctatatccggatcatcggtagccattgtaagcgcacatcgcatagctagtgcttccgccacaagagcagaggccacaaactctctattcgctgtgaaagaggagattgtggtgctgtcgggtcctgtgaacgtccaacccattccacaccgtcttgaagaagctagccaagctgcgtcaacatgaacacaatgttgcacaaggtttcgccgaggcgctgtggcgggaaatttgggttttggtatctttataaccaaagtttgagctttaaaccattctcgtgcatcggtgattgctttcaagatggtttcatgttctgtgtagtgcttatcctcaaacagtagcttatttcgcgctttccagagattccagaaaatccaaggagccaaaggagttgagccaattcccgttgggggaagattccgcattaaacaagctccatacaatagatgtgtaacagaatccggggcagcatgagagggtttgtgtaacccaggtgcaagatcccaaacttttgctgcaaaaggacaggaagcgaagacatgaatctcatcctcccacaaaccgcatcttctgcaactcgctgtttcacaaagcccacgcttcgccagattggaacctaaggctaacgcctggtgagagaccttccacagaaagttttgaagcttaggagcagttttgatctgccaaataatcttattccaatctgta

SEQ ID NO: 31356 - DNA, 1666 bp, Arabidopsis thaliana landsberg
gaataaacagcggcaaatgaataaacaaaaaggtatttgataagtggcaagatgatgggttacggctgctatcaatttctgaaagaagtcaggctgaaacatttgaaagacaagaacaccaggaaacggttcagaaatgatacgtctgaagctttcctttgtgttttcgctgatcgcctttcggaaagagggaagcagaaacaattcgggatcaaaattatacaactccctagaaagtggctgcagaaaaggaaacatttcaaactttggcatgaagaaatttaagaaaaacaaaacaaaacacgagcaaaggcatctcatctcacctgataattagattttatcttctgccaatagttcttgcaccatttagcctgtaacattataaaaacgtgaaactattctgagaacctaaccagattctacgatttcacaagaaaaagctaaagaccattctatgatcgtatcagagtgcctgcaatttctagaagctaacaagaatcactatcccaagaacttcagaagcaattccaatttcgcagatatgttcacaagacgaagctaaagatcgttctctaattcgtatcaatttgaggacagaaagaaactaacatgaatcaaatccgaattcgattaaacaaaattgggatcaaaacgaattgaaagagcaattactttggaacattcgtcgcgggaaatgtacttgcgcaaaatgtcagacatgaatttggccttctcttctctagtcgccgtgagcatttccgtcggcaagtacttctctagcgagcttaacatggcagagctatattccagttccagatctccgtagttatcagaaatgtgctccatgttaggaaacggactcagcctcgcgatagccttctcctctgtagtcgccgctgcagtagtcaccggtggttgagaatctccacctacgactgtttcgtcaccgtccaacgccatctcttgccgatcccttcaagaaaagagatcaaagtcgaagtttctttaaccgctctctcgatttggggattttgtggtgtccgttgaagtttagggatttgtcactaatttccctccgagaatttattggctttttgtgtcatcggcgcgtttcgaacacgtcgtatggtggtatggattctcggcccattataaaggcccaaaaatgctttgaaccggttacttaaaattatcggtactttccggttgagattcctttttatatttcccggttattagcgaccaagatttttttttttttgttaaagaactagcgaccaagagtccaagatcatgaaactatagagaactaaaatgatatagaattctttttatggctggtttacgctaaagatgtgcccatgaatgaaatctataatttatcaacaatccataatgcgttgtgttaaaaaaaatatatatgtgattcaggcttctccaatgtgtattatgctatgcatgttcacgacaccgcaaaaacactctacttgagtgatatggaaataagtatttatctatattatatatgatatttcttaaagagtacttaattatgtgtttttgtatatatttcaaatgtctagctagggatgcgtataatggtatataatacatgctaatgcccaaatataacatgaactgatgaacctatgcaaacccgaga

SEQ ID NO: 31357 - DNA, 4886 bp, Arabidopsis thaliana landsberg
gctttgattacttttgattctatggttagggtttatgatttgggtttctctgaatgctctaaagttgttgtctttcatggtgaacgtgacctttctccagaccaggtaaaaacccttgacgttttagcttctttcttgcacaaatggtgaaatttaattagttagatgcaaatgcttaagaattagttagatgcaaatccgtgtgttcattttgaggattgtgttcttatcttcttagtagtgttgaatcatatagtttgatgactataagtgtgttgaattcttcatgtgtagttagttgattgctgtgatttgaaacaagtactctttttaggcttcgtcattttttagtgtcctgcatcatgattgttggtgtcaatagattgttcttcttagctgtattgaatttgactaagtttctttctttttcatgggaaaatttcatcagatacaacaattcctcggacttggatattctaagcagtttcatcatggaaagatgtcagcgattcgaaagcaaagtttcttgcttccgttggtggaatgtgagtttaacttaacatctgcgtttgaagaaatcattcccttggttgatgtcaaaccaggtcatcggcctcataggtcaaccggtgctgcgatctcaacagcattaggactgctcgagggatgttctgtaaccactggttctcggattatggttttcacatctgggcctgctacaagaggccctgggatcatcgtggactctgatttaagttattcgatcagaactcacagagatattatcactggtcacgtgtcttattacgataaatcttgcgggttttacaagaaactagcgaagaggctctgtgattcgtccgttgttctcgatgtgttcgcttgctctcttgaccaagttggagcagcggaactgagatacgcagtggaaatgtctggtggatttctcttactgggagagacatttgaatccgagcaattcaaaaaatgtctgagacatatattcatccgcgatgcagatgggaacctgagtatgtactttgatgtgtctttagaagttgtgacgactaaggatatgagaatctgcggtgcacttggtccggttgtgtcgctaagacagaagagcgatatagtgagcgaaaccgagatcggtgaaggcggaacatatatgtggaaaacgagcactgtcacgaataagacttgtgtttcattcttctttcatgtgagcaacgaacagaatctaaaaccgcagccaggttctgcgttcttcattcagttcattactcggtatcggtatggaaatggagcaatgaggaaacgggttacaccggttgctagaagatgggttgctggtaaatcgccagaaatctcgtcaagttttgatcaagaaacagctgcgtcagttatggcgcggcttgcaattaaccgagcagaggagtgtcacgctagagacgttattacgtggttagataacggtttaatccggtttgcttcacggtttggagattatattcaagaagatccatcttctttcaggttgactccaaacttctccctttatcctcagttcatgttctatctacgaagatcacagtttcttgacgtcttcaacaattccccggatgaaaccggtttcttccggttaatgttaaaccgggaaggagtggtaaactcaatcatcatgattcaaccaacgcttctccggtattcattcgacggaccacccgttccagtcctcctcgatatccggtcagtaactccagacgtaattttgctattcgattcatacttctacgtggttatccaccatggatcaaaaatcgcccaatggaggaaactcgagtatcataaagatccatcccacgagactttccggaaccttctggaagcaccggaaatcgatgcggcgcagttagtgactgatcggattccaatgcctcggattgttcggtgtgaccagcacggtagtcaagctcggtttcttcttgccaagctcaatccttcagtaactcagaaaacagatcataccggtggttcagatattgttctcactgatgatatgagtcttcaagatttcctagaagatttgcaatctctggcagtgaaaggctaagaaatgtggcagcaaacctgtaaaattggtttggattttaatcggtacaggtaatggttttgactaattgggttatacaaacaattaatattggtatttagtcattatctacaccttttattgtcaggttttctgaatcttatagattgatatggaaattctaaatgtatgatttggtttggacctgatttgttatacagaaaggttttgatctttgtgaacactactgtaattgtccaatgggataaaagaaagtttccaaactcaggcaaaacccgttgatacgtgaactataagtgaaagcattaggaaactatacacacctatgagactgagacatctccttatacaattcttgtaacttttatattcacttttctgaaattgttttagcgcaaaccagccacaaaaatacagtaattctccatcatgttcttggttgctagtaaccgggaaatattgaaagggatcttaaccggaaagtaccgaaattttttaagtaaccgattcgaagcatttttgcttttttgggccgttataatgggccgataatccacaacgccatatcgcgtgttcgaaaacgcgccgataacagaaaaagccaataaattctctgtgggaaataaattggtgaaatttaacggaaaccccaaattccagaatccccaaatcgagaggttaaagaaacttcgattttgatctttcgaagtgatcggcaagaggtgacggtggacggtgacagaactgtcggaggtagagatcatcaaccaccggtgactactactgcagcggcgacaacaaagatggctatcccgaggctgagtcttcttcctaacaacgagcacaattctgataactacgaagatctggaacttgaatttagctcttccgtattaagatccctagagaggtacttaccgccggaaatactcacggcgaatagagaagagaaggccaaattcatgtcagacatcttgcacaagtacatttcccgcgaagaatgttcccaagtactggctctttcaacttctgatttttctttcgttttttttgttaccctaattctgtttttttattggccctatcaacatatctgtgaaattgacttgcttctcaagttcttgcgatagtgatacttgaaattacgaaattcaccaaactgatacgaatcagagaattgtctttatctttttttcttgtgaacacataagaatctgatgtttaaacccacagtttctcagaatagttcatgtgtatataatgttccaggctaaacggcgcaagacctataggcaagagataatatccaattatcaggtgaggagcctttgctcgtctttgctttcttagactttctttatgcaatgtttccttttcttgcagccacgtttcaaggggttgtataaacttgatcccaaattgtttttgcttccctcgttccgcaaggcgatcagcgaaaacacagaggaaagcttcagacgtatcatttctgaaccgtttcctggtgtttttgtctttaaaatgtttcagcctgacttctctgagaaactgctattagaggtaacaataacccatcatcttgccacttattatctgccgtgctcttacctctttggtttacttttgttcattttctgctgtttgattaaccaggtagagaatttcagaaagtgggctaatgagacaaacttcacgatcaggagaccagacaacacgagtaaatacggtgttgtacttgacgactttggcctggatattatgcttaagcaactcatggatgattttatctttcctatttgcaaaggcaagacatatattttacttaaatgcattcgaaagacttttattggttaaagcttattttaagaaaatacagtaacacgaaacttaactctgttgttttgcagtattctttcctgaagtgtgtggaacaatgtttgactctcactatggattttttattgaaaatggtgaagatagggatgctgacgtaggtgagtcttgtgatattactttcctgaagtgcaaacatgaattgtgatacctagagaaaaaccagagtgaattctttaatagcaaaacattaatctggtttagtataagattaagcagtgatcttttaaatctgcaggctttcatgtggaagattcagacataacattgaatgtttgtttgagtaaacaaggtgagggaggagaaatacttttcgcaggcgcacgatgcaataaacatatggatatagatccaaagccagaggtatttgagtccttttgagtagctttctttgtactgttacattcctatattcagtaaatggcaaaagggttcaagtaataaaggaaccaactatttctcacttacgcaggaatattttgattactgccatataccgggtcaagctatacttcaccgtggctgccacgtccatggtgctagagccacagcatctggtcgtcgggccaatatgattctttggtgccagaagtaagaaactttgaagcttgcctcaagatttcagatcacagttgaatcatattttttttctgcttttccattgcagctctttgtttagagagatgcaaacttatgaaccggaattctcagactggtgcggtcaatgtgtccatgaagagaaagaaaacaaaagccagattcttgctgtcaaaagaaaggtaaaaaaatgacatgattttgcataagtttataagttgttttgtttaagcatcgtaatcaacctttgcgtgtccttattgcaggagatgcttaggataga

SEQ ID NO: 31358 - DNA, 3619 bp, Arabidopsis thaliana landsberg
  unsure (1)..(3619): unsure at all n locations
ctgacccttcagctccatcaccaaacctttcacaacctttcctccataaagcaaccaattcagaaccatcaataactcagaaactgcagaatggttctagcacaatggatcaaagtgaatctacttctgggactagtaatagaaaacgggttagagaagattagacatctcatgagtatgacccaaagatgttgcaaacatatgtaattgtgtatataaaattgaaaatatcacagcagcaagaaaatgaaaatttcttcttaatggagatgacgtggacaaatcactgtcgagttggaatgttgtcggctgatgagtcagcaatttagatgacgtggctaaagaacatccttatttatgacgtaattaataatgatctctcgaaatgcgtcttttcttcgtctgttctatcttctttaccaatttctgcaattctggagaagctaaaggtctcaatctctcagtcaaaaacaaaaggtctctcctttattaaactatctatcactaactagaagaagagattagaggaggaggaagaagatgttgtttcaggtgggaggtgaaggcacacgccccaccttctttgagatggctgctgctcagcaacttcctgctagccttcgcgccgctctcacctattccctcggcgtataatgcccttctctacctacgtctcttttcgattttgaaatttggtacttatctgtatgattcttatatttgtttgctgtttcgtgattttttaggtttttgctttgagacgatcgtttctccataagattttagactatgaggatgaattctttgctgctctgatgcttattcttgaaggacacagcttacgaaccacaggtagcttctggattctgttttaggttttgtgtgagagtgtactggaacttttttgcttataacagttagaggtttgtgaattgtttcagatggttcctttgctgaatcattgtatggtttaaggaggaaatcagcgagattgagattgaggaaagacagtgccaggaaggattctagcgaagaagttcaacattctggtttagagaagcgtcagagaatcctttctgttgtgtttctggtactgactctttcctaaatgctataactttgtaaatgcgtatatgttgaaagcataaagcttatgcctttaagcttggttactgcctttttctaggttgtgttaccgtatttcaagtcaaaattgcatgctatatataataaagaaagagaggctaggctccgggaaagtttatgggatgcagaggatcaaggatttgatgaagctgacttcttcacaggggatgattcaattgtttcaagagagcctagtgggaatgaagagctttctgttcgagtacaattagctaccaaaattaaaaagtttatagctgtctgctatccttggatacatgcatcaagtgaaggtaattgtggatttatgtgagcatcgacatttcgactgcatagtagctgatgattctttaacataattacgagcacttcttagtttacactgattagcttcgtgcgtagacttctatctctgagtttcattggcatggagaattttatttgatctgtatcatttataatgagcttatatgggatcctctgtgtaggattatcgttcacttaccagctcttatatctgctggacgctactggattttattctcttgggctacaagctcttgggattcaagtatgtagagctacagggcaagaactggtattaacttcctcctttctggttgaaatttcgtgtcaccattatcttactatgcaccccatagaattagggcgctttggctttgttggatggtattatttaaaattctacatacatcttgctgcaagatgttataccatcattgactgacccataaaaacctttcaaagtggtaaatttacatgtgttatgtcttaacacactttttttcttcgtctttaccttttttgatgccaagatagatggatacatcctcaaggatttcaaagattcggaatcatgagcgtgagagacttcgtggtcctccatggttaaaagtatgatttcacttttcttaaacttcatgtaacctaaggaatgagataggctgattcctactactgcttacactttagtgatccaacgtctgacagtattgttttgaatattgaattagacggtgcaagcggcacttcttagctgctcatatgctgtgcttgactatgcccaaaccggtctaattgcagcagtttttatcttcaaagtaagtatccataaatgtcccagtttatgttacttctcttatttcactgtcttaaaagcttccagcagaagtaggttcctttaggaaatgaaggtcctaagcttaaattacattagattagattttgtatgctacagccaccgctaaatccataaagcttattgctatacttatggcgtttttgactctcggtagatttttcatcgcataatcatttagttgaacctaaacatctagctcattttcgtgtgtttttggttttgtagatgatggaatggtggtatcaatccgctgaagagagattatcagctccaacagtgtaccctccacctccacctcctccagccccaaaggtaatcaatcaggtagcattatctgaaacttatgtaaacatcactcagtcgactttgtcaaagtttttgtttttctgtaacagatggccaaagaaggaatccctctacctccagacagatccctctgtgctttatgcttgcaaaaacgtgcaaatccatcagttgtcactgtctctggatttgttttctgctattcttgcgtatttaagtatgtttcaaaggtgagttctccaaatcattactctctattcccaaaccccaaccttggtattagcttatatccgtcttctatggtaatcacacagtacaagcgatgtccggtgacattgattccannnnnnnnnnnnnnnnnnnggaggttgtttcaggacacttaggaccagtctatttaatggttttaagccaacagtgagagttccatcatcgttctcccatgcaagttagagtctgaaccagaagagctaaaagactgccaagtgagacactaataccccaattgattttttatatatatatggataagctttcatttagagctcaccaagtctgggatcaagtgcttcttggattgaaagaaagctgtgttaatcctaatcaaagctgattctgattaaaacagagaaggcagacaaatggttacttttttctttcttagtttcagcttcgaaattgttgtctattgcacaatgggggatgatattattgttcaggatggaaaaataaaatttatatactgatcaaatttataaagaaaaggatggaagagatgattggagttcaaactttcatagctcattattgaattagctttgcacttttgctcctgaaccgaaaaagttttctgattaatgtcaaaaatttcaaagtcgattcagaaatggtttaggaatgctgggggagtaagaggagtcaaaatcgaaccgaatagaaaaaaaggattaatcattaagagagaacaaagatgtttgttaaaggaatttcagaaataacatgacatacaag

SEQ ID NO: 31359 - DNA, 1366 bp, Arabidopsis thaliana landsberg
atttttacatgtacaatatatggctgaatagataaattgcacttggttaaggtccattatagatgccactgttgtaccattagcctagcattgaacttttttgtatttgcatgcccaatctcaggattaatagataaatggaacttggctgacggtccattataggccaatataaggcttaatcgataaactggaattacatgagagtagtggtatcataccaaacctcatgattttgcatcattattttctggcggggatgatgatgaatatataaatatttcgcttatgaaatagaaagccttgctcaaataatgaagcacatgagttggacttaaagccaaaaataaggcgagatgtttttttttttgttaaagggtttaataaggcgagatgttaccagtgtatttgaagcaaatcaatgtaatcagttatacacaggcaggagatatatagcgatcagatacataaaatatatgtataaatacgtactttttgctagtgctctctaccagcgttttcattatgaagtctaattatttttttttattttttaactgaattgttctgatttataaatcttcggatgatcgtatctaaagagaacatgctcccgtgagtcgttgacgttaagtatgtgtgggagacattaccggaacgaaaattagtgaaacaggcggccagacataagggtaaaattgtcattacgctaaggagattatcttaaaccctaacttttttccgcttcaccactataaatacaaacttgtttacccttccaatttatttctctacttgtccacttttctacagccgcatcatccttctcccttgtgcgatatcgtttgcgtgaggttagcttttcatacgattcttcgatttgaattcttattcttccgatcgatttggtagattcaatttcgtcccgttgtcgtttgcttcttcttaatcacttctatgcttctttacatgtaactctctgatttgttgataggatcgtttagattctttgcttccatggctttgaacttatcgattgaggaaattaacgttctgtagtgcaatcgaactggctttccttttattatttcaaattcagatcatgtaatctgtcgatctagttctttgaattttctgttgtgcgattgattgtttgttagatccatatgtgtcaggttaaattgatctattggtataatacatacgtttctagttatcaaattgatttgtgattgggtaatttttgagcagcataaaaaatccattgtttctttcctttttgaatctaaagtcgcggaaaccctaggatttgttgctgtttatctctttgaattgcttgtttgattgaatataactcgcttagctt

SEQ ID NO: 31360 - DNA, 2204 bp, Arabidopsis thaliana landsberg
gaagtccaggctttgaaaaatcaagctccttcacctaacaaaaacaaattacatttcatataaattagcacagccttggtacacagaagaaacacaagaagagagtgagaaaaaaaaaaaaaaaacaagagacaaccttaatgcttttgacaaagatggaacttggtttaacaagaatggacgagttaggtccaagccagacagtttcactaccgtaaacaccaaaaatcagacaaaccgacgctgattcaatccacgaaataagtcagattctcatataatcaaaaaagacaaaaactttaaattggaactgaagttgagaaaccaaccaaagaaccacaatcccataatgatacccaagcaggacaagctcaacaacccccatgaagattcgtcagaattgaagatatcatcacaatcttcatcgaggggaggtggtggcatgacaaagagcggctgaaggtcaccacgaattgaccccatttcggtgattcttagagaaagagataacaaaaaaaaaattatgaggtaagaaatgaattggatagaagaaaccctagagatttataggataagtaaagataaaataaaacacctgagaatctgtgaggaagtgaatccatgaaagataagatgatagggcaagtttattagtgtaacggttatcgttcgattttggttctccggctagtcttcttcttttctctccgtcgtttgaacggtaacgacgaccagagtcttgagagtatttttataactttattatataaaataataacattatttttcagacttttgtttgtgtctgtgaggattttgtttttttattatattatttgaagagattctttcgtgaaattccaattttatccttcggttaacgttaattaaactgttaagtttaacaagtatagtaagttaaaattaatcaactgttaagttttagtgtttaattagtattctaaaataaaatatattgattgaacttagcaatttcaatatacttatgtgaaattgtttattcatatgtgttatcttaacaattattgaatgtattattgcacaattaattacataatgtttattttaacaaaaaaaaaaatacagtgcctaaaaacattatgtaatggtttctcctaattaagtatgaccatgtcaactaacaaaaatgttatgatacatgcttgaatttctttgagcttgaacaataaccacaataaaaaaggaagaagaagataagaaccgtgggagaaatcaataaagaacaaaaataataagttggatcaccaacaaagatacagaaatttgtgcattggagatggttgtgtgttggaggtggagatagatttggactttgcaatcccacctttacgcatattccaaagtcatcaagaagtaccaactcatttagtccacgcaccaacactggacttaccggttcagggtttcgatcccatttcggaatgtgagtcgacaaacaatgagtgttatcacaaagatggtcagggacgaaatgaaatagttatgcaaagaaagaaatgagccttggcaataccaatataacttttattaatgctctatagattcaacattatgtcagagatttatatttgattcatcttacactgtatagattcgcttcactttcttcattttccttcgacatattggacaactcccatcagcttcttgcatccttcacatattgcagattcataacgtttcaaagtttagatcaatcaagtgattttgatatgtctagttgtatattatcaattcttaaagaccttcgtggacaaaataacttacgttgttccgcattcataacaggagacggaatgaccacaagggaggaaaaagcaatctcttggagcatcaaaacaaatggcacagagacgtctacttcggttacttgcttcaccatcatttcccataaactcttctaagtcagcatcatcgtttgcataagaatcgtcacacgaacccatgcttgaaccatcgtcatctttgtctgcaagtagacgtgttctcgctgaatcatcctcggttagatgtccctctccaccactgcactgaaacctgttgcagaactgtatagctaccaacatgaagcaaatcaccacacctgcatatgcaataatactacatgttatagagaaactaaccaatgctatgaatttgactttgaaagattgaaatattta

SEQ ID NO: 31361 - DNA, 2709 bp, Arabidopsis thaliana landsberg
tctatgaggtccagttacatttctttgtgtcagaagatttttttccaaatttttttccctaaaatctatttaaaataagaaaaaataaattgtgaaaacgttttaaaacatcaatgcatttaacacttttataatccaattccggacgactcattttttcttgtcaaaacctctagtttagttggctaaaatcttaaaatgcagtccactaaacatgtgttaatcgaaaaatcgaaattgtgttttaatcttgacagtccgatcacaacaaaatcctacactttcccaaataaaaattaaaaattcaataattaaggagtttctatttaattaataaaaatagagaaaaacatctattttattattttagcttttattcacaccgccacaaactctcactataaagccgatccatagataaacgaggaccggccagaaatcgcttcaccattcccaaatctctcttccattttctccacacaaatttctcttcaatctccgataatggaaggaaccggcgttgtggcggtgtacggtaacggtgcgataacggaggcgaagaaatctcccttctccgtgaaggtcggtttggctcagatgctccgtggtggtgttatcatggatgtcgtcaacgccgagcaagctcgtatcgccgaggaggctggtgcttgcgccgtcatggctttggagcgtgttcctgctgatatccgcgctcaaggaggcgtcgctcgtatgagcgatccacaaatgattaaagaaatcaaacaagccgttacgattccggtgatggctaaggctaggattggtcatttcgttgaagctcagatccttgaagcaattggaatcgattacatcgatgagagcgaggttttgactcttgctgatgaagatcatcacatcaacaagcataatttccggatcccgttcgtttgcggttgccggaatctcggcgaggctctgaggaggatccgtgaaggtgcggcgatgattaggaccaaaggtgaagctggaaccggtaacattattgaagctgtgaggcatgtgaggtctgttaatggtgacattagggttttgcgaaacatggatgatgatgaggttttcactttcgctaagaaattagccgctccgtacgatctcgtgatgcagactaagcagcttggtcgtcttcctgtagtccaattcgccgccggtggagtggctactccggctgatgcagctctcatgatgcagcttggatgtgatggtgtctttgttggttctggtatcttcaagagcggtgacccagctcgtcgtgcacgtgccattgttcaggctgtgactcattacagtgaccctgagatgcttgtggaggtgagctgtgggcttggagaagccatggttgggatcaatctcaacgatgagaaggttgagaggttcgctaatcgctccgagtgatcaaagaaataaaaggtaaaatttctcagacgaaatggtttcagaattttctcagaccattttgcagtaatctctttgaaaagaagaagatgatgatattgttggtagtttgtatcctttgtgttttccttataatctttgatagtcttttgttattgtaatctcgtaatccctttgcaagaacaagtttgtcagttataataatgtactactctcttgatcgatcagttggttttgaatctgatatattcttcgatccattggtattgaccattgagcttgttgttcaattacatttcagacaggcctattagtacttagtagtatcaggttgataaacaaaggatgaacttgtttaatttggtaattcgtacactggtactgagctctgtagatgtttgagactttgagtattggatttggttttgaagaactgtcctggattagattcacatagcctctagttcttattttaaatttgtgatttcaggcatagctgtcaacctaacaaaggaagataatatgatttgagttttctttgttgttaacgagtactaatcatcgatttcatgatgtgtggattatggtttatggggggttctttgcagctatgtttgcattgtaaattggtttttatgaaatgctatgttaatgtgtgattagtaaaggagaagagttcatgggactcttctagcttttaaaatccataagagtcctctagctttgaaaatccatgggactcactcttctagctttgaaaatccatggggctcttctagctatgggatttcagatctcatgcgcggtattagcatacgatcatcggaatccatagagctctttagttcaaaatcgagttcttgaaggtcttacacgacaccatgacttagggatacgagtatatatcccttgacttcagcctctaagctcttggctctgccggatccaatttctcaaagagcattactttaaagttcaaaaggttctcactactaacaggttaattttgttaacggagatcaaccaaaatcaaacaaaacttaaccaaattgtaaatgtaatttgattgcacatcactcgcattttgtccaaaaagactccggtaagaccagaaacacggatacaatttaaatatcaatcgaaataggcccacatcggcccattattactgcacattggcctatttaatcaattccctaaccatatgagacttataatatactatcaaatataaaggaccataacacaatttctttctttatccaaacgacggag

SEQ ID NO: 31362 - DNA, 2172 bp, Arabidopsis thaliana landsberg
  unsure (1)..(2172): unsure at all n locations
tgtaaaatttaaatttattgcctgttatatttatttgagttaattaaaggactgatttttagtttaatccttctcaatctatcaattatttcctatttcaagactttgcaaacatttgctaatgaacgaaacaaatgattaattacaaaactgtcaggtatatctctaagccgttggattgagtttaatcgaatcgggcagtccaaattacatagaaaaagtaggtgtaccaaatgagtaaatgtacctgaacacaaactaggagatggagctttcacaccacagatagttgaaagttgctcagctctctgtttatcaagcttaactccaaaccgcggcgatgcgccgccgccgtaaagattacagacacactccggcgaactttgaaccatcccagcaagctccgggcaacaagcagcttcaggcttgatctcattacttcccacttgaacgtacgagaagcagtctgatacgtttagcatagatactagacagttaaccggagatgaaggtccatcggcggcgatgggttccggtgccggaggtgactgcccggagcagagactgaggaagaggaggaggaggacggcgagagtgttggtggtgagcatctggtggaatgtgattagatctgatctgagattgcactcaatgttttttggaatggggaattaattttatttggacaagttaactttaaagtgaagttttttttttttttttttttttggctcaacttcaaacttaaacattaactaatgaaagattacatnnnnnnnnnnnnnnnnnnnnnnntaacccaaagaggcattgtagaatacaatttagagtcataattcaaaaacgaaagggactcttttgcaattctatcagccacacagtttccttcccgatgaataaacaccactttaactttaaagtgaagttagaagaaatgtctttattatatattctgtctttggctatttgtaaaatggatttttctcgatattattaacttcaatagcattttagttaaagttgtcttaatgagaaaagatgaattactgaatatggctagaatgaactaatcctcctctttttattttattcatctgtttagagtaattgattctactcatggattagtttggaacataatataatataatcatgtttaattccataaaaatttatagaatatataattatgtttattcatcgattttacgtatcaagtttttaaaactagcaacacaaaaaatcacatttcttttagattttgaagtaattagttttaaatgctataaccaagaattcaaagctcgacggtagatgtttatttctcctaatatactttggaatatgatgattgtttccaactgacaacatataatagaaactgttgaagactgaatttatgctgaaatgaagttttcattggcttttcttttttgctctttcattaagattatcagtccttatgttatagcttatgctgaaatgaagttttcattggctttgttttctatgttcaaaagtcttgttcataatattttttggctttgttaattatgtcagaagttttccattttaaatattactgatacacgaatgctgtcttccgtgtattgttttgtcaacagctggtggcaaataaaatccaggagatgcattcttctagcagtctaaacttctggcgctttgctatatccaagaaaatctcaatcctcttgtggaaatctgaaccactctccttgcatctaaaggatccagaacactcacactgctctgtcaaatgagcggctttcacctgattgcacctattgcacactagatcctgcaactggtacattctttccctctgtctcaccatctggataaggctactctctatctgctctttgtcatatatcttcacacattgtggatccgcacatgaccattctttctctgttaagagagctgtgtctctgcagaaatctaggtctctgtaggcaccgcagttgctgcaacgagacaagaaaaaaaatttaacaataggcattcacaggctgtcttactggttactcctgcaagagagtcaagtctttgaaacacaataggtatgcctttgatagaataaaaaaaaaaagtacaagtacattattgtctgggattcagtggttacaccgcgatcacagaaaaaggtgt

SEQ ID NO: 31363 - DNA, 770 bp, Arabidopsis thaliana landsberg
ttacgctgcagcgtggttgtcatatctgttttcatgctgtcacaaccacataattggattctttttaatgtggtccaatattaattgtatttcttttattgaagagataagacattggatgaacggtaacacctttgtccagtatttcttgtagccatcgtagaagatcaaaacaatagcttttgagaagttattatctttgtcagaaaggagtgaagcaacgttgagaacaagaagaagaaaaagtagaaaaagaaattttattgcaatcttttgtttgcaaacaatatattgacttattgcaacaatttttcgtgttctaatatcactgttttcttgtagtttacattggtccatactatttttactctctctttttttttgcgtaaaagtaatcattaatcaatctctctcactcttttttaccacaaagaaacaattctatgttgtatccatcattatatatttaacatcagattttaattttcttttctatctttgatatagattatttttactatatctttttcttaagagcaattggcaatatatataattttggctgattaaaagagacatataatttttattttgtaaaatgtacatctctttcatactttcatagtatttttaaaataaaatttatactcctttgaaacaatataatgacgattttaaaaaggaaaactcttttggccaattcatatctttgtgttcgacaacattccatggctttgattgcagattaatttggcccttcagccactgac

SEQ ID NO: 31364 - DNA, 1823 bp, Arabidopsis thaliana landsberg
  unsure (1)..(1823): unsure at all n locations
ctgaacaatacgcgaggagtcacagttgagttggaacctaccttggatcgagaaatcaaagaagcgcagaagaatgatgagaagatcagtgagatccggctactgattctagatggcagaggcaaagattttcgggaagacgcagaaggtgtgatatggttcaaagaccgcttgtgcgttcccaatgtccagtctattcgggagttgatccttaaggaagctcatgagacagcttattcaattcaccccggaagtgagaagatgtatcaggatctgaagaagaaattctggtggtacggattgaagagggaaatcgcagaacatgtggctatgtgtgatagttgtcgaaggatcaaggcagagcaccagaggccagctggattgttgcaaccgttgcaaattcctcagtggaaatgggatgaaatcggtatggatttcatagttggattgcctcgcactcgagctggctacgactccacttgggtagtggtggaccgcttgaccaagtcagcccacttcatactagtcaagaccaactacaacagtgtagtattggcagagttgtatatgtctcggatcgtttgtcttcatggtgtgataaagaagatagtgttagacagaggaacgcagttcacctctcatttctggcagcagttgcatgaagccttgggtacacatctgaatttcagttcagcttatcatccgcagacagatggtcagaccgaaagaaccaatcaaattctcgaagacatgttaagagcctgtgcgttgcaagatcagtccggatgggacaagagattgccttatgcggagttttcctataacaacagttaccaggccagtttgaagatgtcaccgtttcaagcgctgtatggaannnnnnnnnnnnnnnnnnnnnnnnnnnnnnnnnnnnnngaaaagcaagtgtttgggccagatattttgcttgaagccgaagagaacatcaagatggtccgagagaatctgaagatagcgcaatcaaggcagcgacgtatgcagacacaagaagaagagagctgagtttcgaagtcggagactttgtctatctgaaagtgtcaccgatcagaggagtcaaaagattcggagtgaaaggcaagctagcaccccgctacattggtccgtatcagattcttgcaagacgtggagaagtggcctatcagctcagtttgcccgagaatttgtctgctgtgcatgatgtctttcatgtgtctcagttgaagaagtgcttgcgtgtaccagaagagcagttgccagtggaaggtcttgaagtccaggaggacttgacctacgttgagaaaccagtgcaaatccttgaggttgcagacagagtcacccgaaggaagaccatcagaatgtgcaaagtcagatggaatcatcactctgaggaagaagcaacctgggagcgtgaagatgatctgatggctaaataccctgagctctttgctagccaaccctgaatctcgagggcgagattcttttaagggggataggtttgtaacgccctgaatttgggggtagaattttttcttcttttccctcaccaaattcaggcgttactctttcctttttcccttttcttctcgctaaaccttgatcttttccaaagtatagcgggattcggcttgagatcccatgtaaagcaaaaccctaaaacactttattttgtatgatgcaccatgccgaaccatgcataccttttgattgtttaaaaatgtgaatgcattcatctagaggaaaatagattttagaaaaaaaaggaaaacctttttcttctcgggccctccttccccatttttggccca

SEQ ID NO: 31365 - DNA, 524 bp, Arabidopsis thaliana landsberg
gattttaatattttatcaattaagattatatttttgagtttttatgtttttttattaattaatagctttacttgtgttattttgaaaactagtaaacgagctttgcaaagatttttgatattttttcagtagaattagcaagatctcaacgagtttaaggaagtttggtttatttcggaattctaagattaacaaataaccatgcaatggtcatattttttatattccaaaagtgaacaaatcactagctagtagatattcgttcctactacgtggttatgcataatggtaatggacaattaaatcctcaaatgtctttgtttataagaccagactttaaacttgaaatgcacattgaaacaaccaatcgagtgagagcaaacaatgcaggagaatatacagaaagttgccgtagcgaatgattttggagaaatagaaactataaactctttctttggattaaatttcattgctactattaccaagcatgaaaagaattacctccggatatatcaaacttttaa

SEQ ID NO: 31366 - DNA, 3858 bp, Arabidopsis thaliana landsberg
gataaattaagacgagatgtgttgaatgttgatagagctagctgcctatctctccatacatgccttctaaggcttcctcacaaaccataagtaatttggtcgttttgacgctagatgtttgtttgttgtcccatatatcaaagtcaggtgctcacatttttatttgttgtatctcaatatgaaaatgattgtatagaaaatgaagaaacgaaggctaagtgtgcctttttttttatttaaatagtttgtatatgacttcaaaatatatccaaacacagatactttggaatttataatgacagttgacatctaaaaaacctgtaaattggaaggtttaagcatatgtctaattattatttatccttttcgttttttatattgtacattcattttttaccactctcaaatatgaactttgtatttagttctaataaaattatgaagttttaaaatctcaaccgactggactggtacaaccaaccatccaataatgatgtcgaatccgatattttgtccccatttacaacacacttgcatggttacgtgtgatattataatatgtataaacggtctataatttttcctataccgagttacaaataagaatctccatgaatagatatctgctctgtggctgataaccaaaaatggcaaagagaggggaaagcttgagagacaaacctaaatggagtcttgaaggcatgactgctcttgttaccggtggatctaaaggcctcgggtcagtcccaatttttctaccttaattatatcttactagctactagctagttcaatgttttttttttttcattttaatgatatattttgtggatcttttgatggtatttggatgtttaattaatcagcacaaccctgacaagaaaaaagcttaaatgatggtattgcatgtctactttgcatagagaagctgtagtggaggaactagccatgttgggagcaagagttcacacatgtgccagagacgaaactcagcttcaagaacgcttacgtgaatggcaagccaaaggatttcaggtcaccacttctgtctgcgacgtctcttctcgtgagcaacgagagaaactcatggaaaccgtttcctctgtcttccaaggaaaactcaacatcctcgtaagttgatgtgtatatatatatatatataatagcatagaaaaaaatctagtgattttgttgtgtctggtttaagtatatatatacataatgtatataggtaaataatgcgggaacgggtataataaagccgagtacagagtatacagcagaagattactcgtttctgatggctacaaatctcgagtccgcttttcatctctcacagatcgcgcaccctttgttgaaagcctctggttcagggagcatcgtgttcatgtcctctgttgctggacttgtgcataccggtgcatcaatctatggagcatctaaaggtatatcatatatgtatacattcaaacaattaatgatgcatggcgttgttatgagacttaactagctaatgtatgttttaggagctatgaatcagctaggaagaagcttagcatgcgagtgggcaagtgacaacataagggtgaactctgtgtgtccatgggtcataacaactcctttaactagctttgtaaggaaatttgttatcataaataaatacaaagatctccttgatgaaaataagaaaaatatattactatatagttttaacttaattgaaaaatctctcagattttcagtgatgaaaagttaagaaaagcagtggaggataagacaccaatgggacgtgttggagaagcaaatgaagtatcatcgcttgtcgcatttctctgttttccggcagcttcttatattacaggtcagactatctgcgtcgacggaggtgcttcggtgaatggcttctctttcaagccttagagttaaagctttgattgttttctttgcttttcttctggtttgatgtttcttagtgtttgtatggtccatgtaatttcgttatgtgatgataatgtacgataatgtgtattaagagaaggcaaactgtttcttatgttaaatctaactaatttgatgagaactcgctatcaacaatcatgatggtgtgcatgtttaggagagattgatctatcatctgcgattgttacatatatcatatgtttcttcctgtaaactagagcaatattaaccaaaaaaaaaggctaaaaattatagaaacagaagaatttatcgtgaaataaactgggattgttctaaaaagcattctacacattggcgtaagagccattctttttgtacatgtgaaaggaaaaactctaaaatcctcaccatttttctttacaccattctctgcatatttcctctcttactcatcagcctaaagtgggatgtttggttctatgtatagaaaaaccgtaagcaactacacaattttacagatttgcagagaaaacaaagctctccttcacaattttcccgcagattatttccggtttagattttacctaattctcaaaacgctatggcagagccatccaccctagttaagctgtacaacacttgcggccttacgccatctgaggctgggttagggactgcaaagccatcctcctctctgtatatgagaaaaaacccacttagagacattgacacgcaatatattgtctttctttctccaatccttatagaagtctcttcaatcaagtaagatgatacaaataaaacgaagtgaagacaatttgaaaggtttatagcaggtaaaggtcgaaactttggagccaaagaacatattaaacatacctccagcagcaacgagtttttcaacacgagcaacgatatgctttccataagtgtatttctttaaagcattgagatgcactttaatacgaccaaggatcagctcacgctgttggtcatcacatgtctctaaaactttttgcactacatagttggcaaactgatccttcatcatcgcctaaatacaaaagatgaagaagcttatgagctaatagtttctttattttctccaacaatcatctgaaagtatgtgtttgacaaacctgaagaggctcgttttcatcagttgtgcccagcatctcatttaccagaaattcccgttcctctggccctccaaaagtcaaacatttctcaacaacgtttgaagcaaacttctgttggctcatctgaacaatcttccccgctaattccttgataatcacagtacgctcatcaggctttccgtgttccaatacatgctgtcaacaaaacgtgtattagtttttaagcaacctatacaaaataaccagttgtagtataactcttttttaacaaacctgaataacatagtttccatactgatcttgggccagcatactaatagttgacatgatttcatccataaccttactctgagtatcagggtcatggcagtgctccaataccctctgcaacataagacgagaagtgttttacttagaagcataagatcaagaactgtgtaatctttctttattactaagagcaagaacctgaataactcggcacccatatgggtgagtggagagggtccaacattgccaaagaaggtggaaataataaattcgatgttttcttcaggcacacattcaatacacttttgaaccacatggttcccattctgatcacgtacgcatcgcatcacatgtccatcgagttctttcaccattttaattttctggtctagatcaaccactcaattgctagaaggattacatacaaactcttactgcctggacgagataagcttataacatagcaacattttgagatcgaaatcgcttaagagagagtaacatactctgaaacacgacacatcactgt

SEQ ID NO: 31367 - DNA, 3217 bp, Arabidopsis thaliana landsberg
ccccaaatccaggttgtgccatgatttgcgctttttagacctggatcgcatcttttctggttgctaagccgctgaagcatcttcacctggagcaatgtttaggtcatgttgctcatttccattgacgagattagaaggaatgctcactttctcgctacccagatccaacttgctgactgacttaggctcttttttcttattcccatttgccaaatcagaaggcgtgttctcttccatgttccctaaatccatgctgttggctgagttaggctctgttttctcattcccattggccagatcagaaggcgtgttctcttccatgttccccatgtccaagttgctagctaacttcggcaatgtttgctcattcccaatagccagatcagaaggtgggttctcttccatgttcccgaaattctcttcaatgttccccaaatccacgttgttgagcgacttgcaccttttggactctgactgcatcttcttttgttttgtagccgccgaaacatcttccactggagaagtgtttgggtcaggttgctcattcccatcagcgaaatttgaaggcaagctctcttccatattacccaaacccaacttgttggctaattcgagctttgaccccattggagtagtgttcgggtcatgctcccgaagctcattggggttagtggaaggtatgtcatctctgggactcgttgcatctaccactgaagtaataggttgcacagctacagtttgaactgaagattgtgcgaggctatcatatgagagaacagaagctattgcatacatagaagcaccgagatgaggcggcaaattttcctttggatgtttaacctacaaatgcatatggaaggttgaaaaggatgacattgccaaaataaaataatgaaaatcttaaatcgtagtgataactcatgtaccttgaacaaaatggacgccattagtctctctctcaagatgtacatttgagcaatttcaaaagctgtaaccttgaaaggcagccaccgatccactactacttttactgaattttccggcccaagcattattttctctccaggcaaaccaacttctttatctatgtccatcgcgtctcctacatttcctactttgtggtcttcctcgtcatcactcttaacagcatcatagctctctgtagtagaaacggctatctctcttgaaaacagtaacacaggtatagtgggaagaacagtgcagctccttatcaccacaccccaatctcctcgagtgatctcatcaaaaacaattaaagcttcgtcaaacttggtagaggacatgtcaacattgtttgatagcgagggcacacggactttggctccagcaatagtctctattacagaccttgtccgattcttggaaagtgggcacatccttcccaacatagggtacaatccaactgctataacagcacggagaatacccggatcatgagcattcaggctacagtttgagctgctgctaggtatgaccccatgtctattaagttctccctgaagcttgcgacacagatcatccagcctcttcatgacaacttgggagatgaagtacttagaacaaaactccttagcttgaccacttgcttttgcatttttccagcactgaaaagccgcgacagtggcaagatgatcactgtggtctccataaagcgatgcaagttcatgttttgcggcagcagccttttttctatcacctggcgacaagggcatggtaaacggatccttctcgtcagctgcacatgccagaataagtgctggatccaaacagttcactaatatggcgaaataaatcatcttgctaatccgaggatgaactggaagctgaccaaatttctgtccaagttcagtcagctcttcttcaggagtcaaagctccaatatctttaaggatgattaatgcattttcaatactttgagcaacaggcgggtccatcaatttctgaaggaaatcatttacgttgcaattcggatccagcatcttaacctgaacatattgatattatagaaggacatcagtaagaaatcaagaacgcaagaagtctcaaacaggacgctaccatgcatgaatgacaattaaacatcatagaaaaaatctacgttagaaagaacagcacctgcaagcagagttcatccactggcattctcataacttcaggaactctatattcgggcaaagacgctgcccggagtttagaatatagatgataacagatgccagcttggcaacggcctgctcggcctgccctctgttttgcatttgcttttgatacccaagaagattggagcgttgacacgtcattatagggatcataactcttttccttcatccgaccactatctatcacataaaccacatcatcgatggtaactgctgattcagcaatatttgttgcaagtacaattttgcgacaaccacgaggggggcgattaaaaactttcttctgttcctcagctggaacccttgagtgaagacatagaatgatgaatttagcactatgtgcaaaaaaccgatcatcaagcaatttctcttttgttttgcttatttcctcccacccaggtagaaaaacaagaatggcaccatcttttgaatcgctgcatattttcttcattaacttcactataagacccacatctacttcttctggtttgattgtcgccatatacttatcaagtaagtcttgtgcttgctgagaattggactggatgttacccgcatgttccctgattatttgggcaggttcaaattgattctccttttcagctaattctaatgctgctataccttctttggacttcagtgtacagtcagcgccgactgaaaggagcttacagacatcgctaaccctgccctttccagcaaagaccataagtggtgttaggcctgtcgctgagttctggtaattgtaagcctcatgacttccttcagatgaaactagatctacgagacaatcaaactcatcatttgtccatgccaagtcgattgcttcatccaaagaaactttatcttcatctttaaaatcacgtttgacagcagaaagtagatgactattcttgcctgagttcatgacagagagcgcatcatccagaacaaaggttcttacctgtagatacggacgcaagattgttgttttccaattcaatgagactaagaagcatattctttaaagagacggcttgagagagacataacgagag

SEQ ID NO: 31368 - DNA, 3944 bp, Arabidopsis thaliana landsberg
aacagttaatgaggaaaatatgtggcgattcagaagacggtgcgattcttgtttttctacctggatgggatgatataaataaaacaagacagagattacttgagaaccctttctttgcagatagtgctaaattcgacattatatgtcttcactcaatggttccagcaggggaacagaagaaagtttttaatcgcccccctccaggttgtcgcaaaattgtgcttgcgacaaatattgctgaatcagcagttaccattgatgatgtggtttatgtgatagatagtggccggatgaaggaaaagagctatgatccttataataatgtttcaactctccaatcttcttgggtatcaaaagcaaatgcaaaacagcgtcagggtcgagcaggccgctgccaacctggcatttgttatcatctctattctagacttcgggcagcctctatgccagattttaaagttcctgaaatcaagaggatgccggtagaagaactctgcttacaagtactgctcctcatttaatttctagttaatagcaattggttctatgctgtgagccgttcgtgcgtatgcaatctcttactgatcattgccctttgattacattctcaggttaagatacttgatccaaattgtaaaacaaatgatttccttcagaaactgttggacccgcctgttgatcaaagtattgcaaacgccttaagcatactacaggatattggtgccctgacacctcaggaagagctgacagaacttggagagaaatttggtcatctcccagttcatcctctgattagcaaaatgctattcttcgctgtgttagtaaactgtctggatccagcacttactctggcatgtgcagcagactacaaggaaccatttacgatgcccatgtcgcctgttgaaagacagaaagctgctgctgcaaaacttgaacttgcatcactttgtggaggtgacagtgatcaccttgcagttgttgctgcctttgagtgctggaaaaacgcaaaaggaagaggtctttcagcagagttttgctctcagtactttgtctctccaagtgctatgaagatgttggatcaaatgcgtagccaacttgagtcggaacttaaaagacatgggattattcctaacgacatttcaagttgtagccaaaattcgcgtgatcccggtatactccgtgctgtgctagcagtaggattgtatcctatggtgggaagattgtgcccagcttttggtaataatcgaagaactatagtagagactgctagtggtgctaaagttcgtgtccattcgctgtcaaacaacttcaacttgtcgtctaaaaagtatgatgaatctttactcgttttcgatgagatcactcgtggagatggaggcatgcacataagaaactgtactgttgctcgtgatcttcctttgttacttatctcaacagagatagctgtggcccctacagggagcagtgattctgatgatagtaatgaagaagaagaagatgatgaagaagtagcagctaatactaatgaagaagtagcagctaatactaatgaagaaggaatggacatacataaagaagagagtaggcgtggagcgaaaatgatgtcttcacctgaaaattcagtcaagttagtagttgatcgctggctgcctttcagaaccacagcccttgaagttgctcaaatgtacattttgcgggaacgactaatggcttctattttattcaaggtgagtttagaatccattatgcttaaaactactccatacttttaagggttcttttatttgatttgatttccaactgtttattggcaatttgtaggtaacacatccacgggaacatttgccacctcatctcggagcttctatgcatgcaatagctggtattctctcatatgatggtcatgcaggactttcatgtccaccggagtctatggtaccaaaacattcaaggactgagatgtatgataccggtggatgggaagagaaaccaaactctttccttaactcactcttttggtctctgagtttgaaagagaacaagcatcctagtcacacgaataggaatcagcagcataactacaacatggctccaacagaagctgcatcaatacctaggcagcaaaactataagcaaagaaatcccaaagcaaccaacaataccgattcgggtaagaagaaagagaagatgtttgttaatcccaccaataggattaaccagcctgaagctgcttctacgggtaagccatcaaagcacaaatcagccaacagttcgggttcgagtaacaagaaagagaacatgccttctgatcaggcctatgggaataagcaacataacacagttccaagagaagctgccgcaccaatggcgaagaatcaaagcagtaagaaaaccaagaccaggtcaggcaacaactcggattcgggtaagaagaaagaacagtatattccaaagaggcaacgcgaagacaaagcagaacagaagtgagatgcatgaaaagagattgtttttggttttgggttttggtttgggtttgggtttgggtcccatgaaagcagaggaattgatgatgtataaacaattcatgtttggatccatgtctcttcggtggttcttggctcaaagtgtttctatttatctaatcatgaaacggagtttttaacggtttcatgttgctctaatatgttccagagtattgtaactattgttgttgttactcataaagcctcttctagcagtttcatactttcattttacttccagtgagatcaaacacgtcgaaattcattcagaccagtaggctcacagccacgtggcaagatggagcacttatacaaccttatcccgacatccaaacagaagattagatgcccaaaaatccaaaaattagccaataaacaactcttttcttaaactccatatttacaaacagtttcatcactttggtcttcaggttgcaacaagaaagagaaaaaaagagaatggcgtacagcccgagcttcttacaccagagtgcacttgcctcctctgccggacgatcatcatcttcatcttcatcgtcgtttcgtcatgtgtccctctcgagacccgtccatttagtatgtagagctcaacagtctcaggaaaacaataactctgctgttttccgccgtcttgcccttaccttactcgttggtgctgcagccatcggatccaaagtctctcctgcgccgcctatggtgaagccggtatgatcccactttctctatatacattttgagcatatatcaatgagaatcatgaagcaaatcttgattgttgttttgcagctaatgtgtttggtaagccaaagaagaacacagatttcctgccatacacaggagaaggattcaaaatccagatcccatcaaagtggaacccaagtaaagaaattgagtatccaggacaagtactaagattcgaggacaactttgacgccaccagcaatgtctctgtcatgatcactcctacagacaagaaatccatcactgattacggttctcctgaacagttcctctctcaggtttcactctgtttttaaagcaaaaacggttcaatcagacgataatcaccacaacacagctgatgataggtttctggtttctgcaggtgaattatctcctcgggaagcaagcttacgtcggcgaaacagcctctgaggtaatttccttttctagttggtgaaggagtttttgggttcaaacaagaaccaataccttaaagagtgtgactgatcatttttgcagggagggtttgatgcaaatgcagtagcaactgcaaacattttggaaacatctacacaagaaatcggagggaaagaatactattacttgtcggttctgacaagaacagctgatggagatgaaggtgggaagcaccaactgataacagccactgtgaatggtggaaagctttacatttgcaaa

SEQ ID NO: 31369 - DNA, 777 bp, Arabidopsis thaliana landsberg
gaacatgttttcggtttcatccaatgatctatcgatgactctcttctcataggtttcctatagatttttatatgaaaaagatatagtgaacacagaaatattagactatcgagaatcaaagctgccacgatttaatcaggaatatgcatcccgagtttgttcaacttggctgcaacgctcatcttcatcataattaactctctaacgctctcattctcttttttcgttgagctaaactcggctagcaccgttctgacctctgcccccctcctttatcgctgtataacttgctgtacatcccccatatcgtaaaattcagctattggttatatgtgcagtttgtgttttatgctgataatgcttcgtcccagatttgagtacaatgcttctgcctcattagtgaaggaagtttcttttgatgaatctgaaggtttgtatgaataaaattttgaatccatctaagtttggacttgtcttctctgctcatcaagcactattacactttctcagggggtttgaagaccaaatttttgggcaagtgactacatctcaactttcctcgctgttcataaactttggagggaccattagtggaaaagacctttttcgactttcgaatgtgaactgattctttcctgttggcaatgttgccaccacatctgaacttttcctttataataatctgaacatctggttgggcaatataatggacgtttataatagtggatgaagaagtgaaaaattccctagatatcataagtcctcactggattgact

SEQ ID NO: 31370 - DNA, 1203 bp, Arabidopsis thaliana landsberg
ctccgtctgtgcattatccatcaaacacttgtctcgaacgacagtaccttggttgattgcttggtgcaaacattagctcttctgttggtgcaaacattagttcttctgttggtgcaacctttggttcttctgtttaaatgtcacaaaaaaaaagactattagtaaatagtaatatgaatcaatactttttttaacacaaatatttgcatctaattatgatataatttgtagttaccatgtgataagtgggtggggataagagagaacaggacacaagaagccaaaaagattgccacaaccttcatattttgttctcttgactattcttttttctttaaagattgtatgttatagtttcagttgtaaattgattatatatagatattttgcaactactttgcatctcatatctttggaaatacaatgtaaacgtttgaccaaatttatatttttgtcattttagagaatattaaaaaaagtcatggaatctctgttttatggtataccattttgtctaagaactgtaatgctttaaattaggaagactattagaaaggatttaccaaagtttcttaagattttatcagcttattcttataaaattaaagtataagaaaaatgacattaactcagtcaacattctttttagcattctgcacattttggataagaattaagacacaagaaaaaaaaaattagtaacaaacttaggcaatttagaaattaaaaacaacaacttctatatgaagagagataatttcaaattttcattgacttacctttgtttaagtaacataataatagttctatgagtcccttcggggacatgcgataaaaaaataagatactttttctatgaatgttattttattagaccatgtagtatatcttaggaccggactaaatatttgttagttcaaagatttaagctttactcttatgtattttttttttctccattaaaatcaaaacccgtgacaacttacaaatgcaacatagtaggtatacctttttgcgggataaaataattcaagtaagataattattgtaaataaaacatggatttgacatttcattgataaaaaaagaacaaaataccatgcttattgacatagacatccagtaataaaagttttttttttttttgaaaaatgagatttatatattacttattttaaatgtagatgacaaagggatgtcctc

SEQ ID NO: 31371 - DNA, 897 bp, Arabidopsis thaliana landsberg
gagggaaccttcatggccagagttttgtagagtctagagtagcgagctcttgtgccatcagctgttctagctaaagccagcaaacttagagcttcgggtaattgcacaaacatttgtttcatttcctctaagctcatgtttactagcacagaaggtcttgggacaactctgacaatttcacctcctttgggctcttgaacgcgtgcatcagccttgatcacgagctctgagttgttgttgcctccacattttatgatgaatggggctgaagagcctgtgttgaattgcaaaacgttccactgagatacatcagtttcacctgaggatattgattctaatgagggtctccggtcgtgtgattgttccagaatattagtgtcctcttgttcaggaatcgtctgcggtcaagagaaacaagttagtttgtttactatttcaatccggatctcatcattatatcaggtagagttctttgtgtctatggtaggttcattgagaaactgattatacataaactaattatacatggaaatcaaaggtacctcgaccaactggtgtgctgtagcaatttctctttgtgcgcatggatggtcgatatcaagaagagaaggcatccgctcagtgagttcatcaagggactcaagtaatgctttcttcttgcttttactcaaaacatggacagaggcttgtcttgtgatttcctgcaagatgcaaaataagttattgaccaaaaattaaccaaaaaccaagatctagtatgaagcatcatgaggtataaataccttgacttgcttcaaaatgccatccagagaaatgagagatgctaatcttgagtcttcagcataccgtagaagggtttggaataggagaactgccttcttccaggttgagcgttag

SEQ ID NO: 31372 - DNA, 3160 bp, Arabidopsis thaliana landsberg
aaggatctagatttaaacctagtgcttctgagagaagcttttatttcaaatcacctaagctcagtacatgctttgagtattcaatcatagcatccctgagtcaaatcaatactgttaaataaagattattctaattcttgattggggcctattaaaaaaaaagaacaaagaaaagctaagactattttcgttacctgcaagtcttagggagctcctcaggagttggaggatcaggagccatgtaacaagagatagaatctctccaagtaagagacggcgaagaactatatagatcgaaattactactgtatgcaaatttgttcttggtgaaatcaagcgagtagtatgatttcttgacctcagggtcttcttcctcgtgaaatctacgaaccccatctttaatctcttcaagaacgtttaaaggaacaccatgattaatcacctggaagaatccccaattctccaccgcatatttgactttctccacgatggcttcacgtgagggtgtgtccacgttgacgcttgcaaagtcgatggtagggatctctaggtctgaaacagagtgtttcttgtctggtaaggtatcttgagggacgtggaaaattcgagggatctcggtgattttagcatcgatgagccctttaacaccttcttttgtattgtcgaaagctttgcgctcgatgtaacgatcgaattcgacagagtttttggccattttactgtttcttacctccttctaaggaacagcaaaatgaagataaaaaggacgactgagaatagacggttgttgattctgaccggaactaatgttgtctctttctctctttcacactgacttttatgagttgtcgtaattgaatttttcttcgccacttttgttttattaaggactgattagtttttaattacgcatataaccctgtaaatagtgataacagttgcaacatataaatgatgagttcaatgacgcaattccatcacctgataacattttataagtgataagattgaaatacacagtagctcaacaaatatacagatatacatagtttacacacacacacacacaattatttcttatatttggtacatgcattggtttgattattgaagagacataaacaaacagtataattgatgcgaagaaacgcattaagaatttctgtcgttttcgtttttcatatcctgatattcgagagatgcgacgttccatcgagacctttctcaaaaaatatttttgaatactcttttatggttatgtctctgtattttggagggttttcttcagacacaagctctttcatcggtccgtaaactctggaatttggacgcatacttgagctgaaaaagctagctactgaaatccttggtccttgtctatttgcaagcactctatgctccacacttacaaacttatcgttcgttatcagctgcatcaaatcaaacctaaaattatttaaacaagacatttaagtttaaggtatttggttctacagattgttactttacctgcaaaaaatctccaatgttgacgacaagagctccatggataggagagacatcaacccaagagtcttgatgaagaatttgaagaccaccaatgttgtcttggagaagaagcgtgaggaaggagttatctgagtgtttcgttatccctaacgttaggtcaggttgtggacaaggtgggtaataatggcagatcataagcaaagtcttcacgcaatccatgctctcaagggtctgagatttcaaaccaagtgcttctgagagaagctcaaatagtaaaccaccgaaacgcaacacatgctttgagtattcaaacatagcatccctgagtcaataaacaatttagaaatctattaaacgacctaattaagttgttaactaatctcacttctaagtttttaagaaaaagttaaagaatattcccgttacctgcaagtctcagggatctcctcaggagctggaggatctggagctatgtaacaagagaaagaatctctccaattaacagacggcgaagaactgtatagatcgaagttactgttgtatacaaattttttgttgccggcatcacgcgagaagaatgatttcttgacctcaggatcttcctcgtgaaacctacgaaccccatctttaatctcttcaagaacgtttaaaggaatactatgattgataacctggaagaatccccaattctccaccgcatatttgactttctctacgatggcttcacgtgaggctgtgtccgcgtggacgcttgcaaagtcgatgatagggatctctaggtctgataccgaagcagaaggtttcttgttggttaagatatcttgacggtggtggaagataccaggaacttcagtgattttagcgtcgacgaggcctttcacaccttgttttgtttcgtcgaaagctttacgctcgatgtaaggatcgaattcgatagagtttttggtcatcattatgtgctcttcctgtctaattcccaaaggtttctgctatatatgaagaaacaggaaatgaagataaaaaaggaaagattgagaatgaatggtaggggttgggttaatggtgtgtgggtccgatttatgtttgtccatttttgtgcaaaatctgtatgtaggtaatgatcacatgtatgtggtctctctctcacgccatacacattcagacttgtggtgcttgatttttccttgttttctcttagtgaggactaattgtggtaaagtattatgcctttagccatctttgataccacttgtatctccgaaatttgagttctggaactgaggattaggcttttgagtgttgagtatgtgtcatgtgttgttatttactcatagttcgatatttgaactagacagctatgacctgcccaaccatttggcaaccataaatgcaagtatgtaacggtacgtacgaataagaaaaacttggaattgaattcaaattcaaatttggcaacttcaccatcaattctcgcaacttttcttcttttctttctgcttactctaagaatccaaggaaaaactcaaaaaaggttaaagggttcgggcacacattcttttctcggaaaccaaagaaagccaaattcttgggaaaaggttcaaagcatctgggtccaagacaaaagatgaacacttctatatgaacattatac

SEQ ID NO: 31373 - DNA, 2503 bp, Arabidopsis thaliana landsberg
acacccccttccattggggcacataatgttatgcagtctaaatttaaagacttagaatcacaactaagtaaagcggggaagtgggacatgacaagatcgagagatcccttggaacctcagcccagagcagctgagaacacactcgattcttctgcagttaccaagaaacttgaggaagaattgaaaaaacgtgatgcactgattgaggttctgcttcgtcttcctattgagcacacttttatttatgatttccttatttttgaattacccagatgatatttgaacttaacatttgtctgaagagagtagttgttttctgcagaggttgcatgaagaaaatgaaaaattgttcgacagattaacagaaaagtcagtggctagctcgactcaggtgattcttttctctatcctacactgcacatgattcagtatctgcacatgatatagtatcacatcatggacgcttctctttttggagctgttggaagaaaaattattctatctcttctcttcatcaaatgttactaattgccatacacatggagattttcctgctccagctagctcatccattgttgtatataggtatctagcccctcatcaaaagcttcaccaacagtgcagcctgcagatgttgacaggtagttatttgatcacttggaaccatttaatccaaatttctgtcttctctattttgtttacttcccttaccacctgatctgtattttctacaggaaaaatagcgcgggcactttaccgtcttcagtggataaaaatgagggcacgattacattagtaaaatccagctctgatttagtaaaaaccactccagctggagaatacttgacagctgcattgaatgactttgaccctgaagaatatgaaggtcttgctgccattgctgacggcgcaaacaagctactaatgctggtacttggttaagaactagtttcttagtatctttattagacttttcagtggtgtagttatatgacatgacaccattgttctatcataatatgaagaatgaaggttatgatggattcctgatgtctctagacactaatatcggttaaggacatgtttttatatcaacttatattggcaagcatttttcctattgttgactcgcaggttttggcagctgtcatcaaggctggtgcttccagagagcatgaaatccttgctgagattagagattctgtcttttcatttattcggaaaatggaaccaagaagagtaatggataccatgcttgtttcccgagttaggatactatacataaggtccttactggcacgatcaccggagcttcagactatcagggtgagcataggcatccgagttgtatctgatttttattttagctttggccttagcttgtatgactatgttatttctcctggtaaaattaaccctatcctcctcatttaggtctctcctgtcgagtgctttcttgagaagcctaatactggtagaagtaaaagcactagcaggggtagcagcccaggtagatcccctgttcgatatcttgatacgcagatccatggctttaaagtaaatataaaggcagaaaggagaaacaagttggcatctgtggtatcaagaatgcgtggacttgaacaggtagatttaccttggaagagcacttgaatttcaaagatgcttgagtttatctaacatgttatatattaagagagacttatgctcttgattgttatcatctaggatgctgggaggcagcaagttactggagttaagctgcgggaaatgcaagatgaagccaaaagttttgctattgggaacaaagccttggctgcgttatttgttcacactccggctggtgaactgcagcgacagattcggctatggcttgcagaaaattttgagtttctttccgtgacctcagatgatgtatcgggaggaaacggtggccaactagagcttctttccacagcaattatggatggttggatggctggactaggggccgctgtgccacctcatacagatgctctcgggcagcttctgtccgagtatgcaaaacgtgtctatacttctcaaatgcagcacatgaaggtatgcgatgtcattggtcaaaaaatattttttgagtggaattggcagatagacattcccaatggtctgaaatgaaagatctctttaagtagctgatgttgtggctgactttacggcctatgttgaggtctaaggactaaggttttagtctgagtaattagtctggagtgatgcctaatatggaactgtggtacaggatattgctggtaccttggcggcagaagaggcagaagatgctggtcaagtgtctaagcttcgatcagctcttgagtccgttgaccacaaaagaagaaaggtactagaccgcacctgaaaataaacgatatagttctgggtgctttgatttttatcttagaaacgttcttgtgctctgactttcgtttgctttctttatcagattttacaacaaatgaaaagtgatgca

SEQ ID NO: 31374 - DNA, 1658 bp, Arabidopsis thaliana landsberg
cccgttcttcatcagccaccttcctccaatctttactatgttataaggttaagcgggaaacacacagggtgatttggtaccttgacgtgtctttagaatcttaaatgattatagcatatattttcattcaaaacgtctactcttttatatagaatttacaagaactcttaaagtttactccttttaaatttgcagtgaagcatgtgttagtgcaaaagaaggggacagagcttcttgttgcttttgctttacttatatccctgaggctgttccaaggcctctggatccttttgacataaaccaacaatttgagatccatcaaggaggatcatcaaccaagaagttctttgctacatctgttgcttcagatgggataccacctcagttcctgacgagaaaaggttggtcggttattttctcggcccccgaagtcgaagactatggtttgattgatgatgcaaaaggcatagttgacgcaaagctgcgctatgagcttcctgatttagataacagcgttgtagttgggaaatggtatgttccgttcttgtttgttaaggaaggtgatgcaaaagatcagatgtataagtcaatgtattatagtatgacgcttcagcaaagatttgaagaggttttcttctgtgaaaacgttggcaacaataaacgttttgaggttgtagttgatgtggaggtagaaacagaagtggtcaagcttgaaggagagaggattgcaagagagacacaaggtgtgaactcagatggagttgtgtggtttaattcctcagggaatgagaagataggtcttgggtctgttgtcttagagaggatgaaatgggaagaggagaggtttgggtggttaaacaaaggctatgaacaaaggtctagcattaagagaactgaaagatttgaaggcggtggaccatattggaagagttatagatgctatgtattggtagagacctttgaattgaagagaactgatgggagtttggtattgacatatgagtttaaacatgttgataagttgaagagcaagtgggattgagtttatttcagcttctttgtgtgttatgtgtacaatatatggtgtgttcgttttaatgagagctttatgcaaattcatgtgttataaagctctcatacatatttgtaaagtttatgtaataaatctatatgataatgtttgtgaacctcttcttaaaggtgaactttggacttcaaaagtggataaagccatattaaaaattgtaataacgtggcagaaaagcattagctaaagccaaagaggaaaacagagtcccctgtttcttttgcttcagttttcgtagatactttgcaacctcctttgctcataatgggaaacaaccatagtttcttaagagtaagtattggaccgttgactactcaatgcgactaaaaccggtcaaaaaacttgttaatgaagttaataaattgtcacatactctgcattatagattcaggcataaagtcaaaccaaaagacaaagacttctatgcatttttatgctattgtataaagacacttgatgaagatacaaccttccaagaaattttcctataacgtgattagatactatcatcaaaaagtcaaatctattcttcaaagaatttgcttaatcatataagcctataaatatgaaa

SEQ ID NO: 31375 - DNA, 2491 bp, Arabidopsis thaliana landsberg
agtgcaaacaaagttctcattttcaaaattgttcctaagagtatagccatgaagctccttccccaaattcaagcaacaaagctgggaacagccagcaagcaaactggctatcgtaatggcatccggcaaaagtccaccagttaacatcatctgatggaacacctcaaaagctgtacttgcccttccagactgtacacacccggatatcactgagttccagctaattaaaggagtctcctgcagttgctcaaacaaaaacaggacagtctctacatcatcaaacttagagtacatagttatcagtccattcacaaccagtgtttttgtgcacaatccgcttttgatcgcataaccatgtaacgacattcctatgtcaatatgggaagactttttacatccatggagaattccaactaaagctacagcatcaattttcatacacagctgacgcgttttagaaaaatacacaactgctatatccatatctcctttctccgcatagcatgaaacaatcgaagttaagccgacaatactatcttgtttagcaaacccataaagacgctctgctgaacacaaacacccacacgttgaatatgcacagcccaaagaagtacccacagatatatcattcaccattccacatttaacaacaagacaatgtagtggctggtgcctaacatcagcagaaagaaaattgatgatagtgcctggactaatttccacattcttctcacacacattctttaaaacagtgatggcttcttcctgtaaacccctctgactataggcaccaatcattgtacttccaagaaactgtgctatttatcgtctcatattctctaaacaagacttctgatgaacccaactaaaaacgcgagagtaaaacgaaatcaacgcattcttcacctgagaatccaactcaaggccaggctttgcagcaacaccatgaacagatctcccttgagatacaaaaccacattgtccacaaaaaggtaacaaattcacaagtgtagtagcagatggagaaaacccttgctgaagcattacgataaaaagcttccacgcatcacactcataaccatttcgtgaatacccacaaatcaatgcattccaaacaactgtatctctctcaggcatttcatcgaacaacatttgtgcactcgttacgcaacccttcttcaagtagagattaagaagagatgttttcacgtatacgaaccgatcaagacctgattttgtgagatgggtttggacttgttcgacttgtaacttgaaggaattgagagaggtagtagtggcttggagaaagatagacatagtgaaatgatttggtgtaagagaggaacggagtaagtcacggaagatagtgattggagaagaagagatttcaccatggatacaagattttagtagagaatggaagtaagaaaggtctctatatagagttatgggtttggtaatgcgcatactatctctgttctgtctcctctagctttatttccttgtgtcggaattattagaacttgtgtatatcaagttgacaaatgacttgtgtatctcaagtcaatgttttgaactatcgactactgtaatttattgttactgttgactaatttttttttcccttgagatattttaaaacagtccacttaagcatttatgctttctctcgttgatttttaatatccagtagttagtttttctaatggcaagaatatcatgaaaatcctgaatttactagaaatattaatttaaatcttgaactttcgaacaaaatgaaacaaatattaaatttttgttgatttttgaaattaatatcaatttttcgtcgatctacctatattagacatgacgttaaatagatcaacatattttattaatggagttaattttctatcaatgtacttattaattgaaaacaacattgtttcatacaacaacatataacaacacgatgaatcatagcaattgaactaattccaaaaattcaatcttagttccccaaatcaagcaaaattcataaccttaaaacttcatataatttgaaaatttttattgagcgattacgacaaagcattgtcgttttattattctgagggaatgatgtggttttcaattaacagatctgttaacagtatattaaccttattaacatagtttgttaacccacgtcacgtcatgtctttttttttgtcatccgaaaattaattagggctcaaacgagccaatcctgaagaatgatgtttacatatgtaatatgaagcggttgggtacaaatttttcgtgccaaaaaattactcgtgttgttttggaaaattttgaaattttcaagtaatttaatagatttacgtacaaaattttgatattttaacatataaataaacccaaaccccaaccgaaatctaaaattacccggacgggttttgaaattatattcccggagaatccgaacccgaatacccgaacgctgagggctagtgcgaaccaaatt

SEQ ID NO: 31376 - DNA, 872 bp, Arabidopsis thaliana landsberg
tgatagctgaaatgagtttgttcatgttgtgtgtatatatactctatgatatgagttgtatgttctcttcgcttatctcatgcgctgacttgccaacgaggttgttttcagtatcctgggagatattttcatttttttttataaatcaaacttgtgactaaaagtgaaacatcatcaaatgaattcacttacggtagccgcaggttgagggttgagctgcactggttggaagttacctcttaaacctgtttaatttctcaaatgcggtgctgcaacagcagctatacggcttgaagtggcgttactaagactgatttcacgtattatcggaccaccttgactgactctatcagaaggcaaaggtaaaggattgaatgtattaacagtaggcggttgatcacgtattatctgaccaccttgactaatttcatcagaaggcaaaggcaagggattgaatgtattgacagtaggcggttgatcaggtattgctatccttttcgacttatctgcaggcattccataagtacagtatccgaatacgtggcagtgtgtattcctgtttttctccataacaagcagtggaatagtcaaccaaagacattgcggtttggaaccaaaatgatattgacataaatatattttaaaggttttggagaggaagaggagaccagtaattagagacaatctttttcagccttgcctccaaccgctgaaatagagaagacctctcaaaatcttgcttatcgtgggccggttctataaagtttgcttcaagaactcctggggaacagattttggttaatgagtcgctcctccagggttttatcccaagcaaaacatattcagtagaatatataaggagaatgaatcac

SEQ ID NO: 31377 - DNA, 1972 bp, Arabidopsis thaliana landsberg
aaacacgatttgattttaggtaggccgcgtgaatctctgaaattaccacgattttcgctgagattttatatcagtgtgtttttaattttttataaaaggaaaggttaatggtagaaggaaattgacaatcttcaattctgattttgttaaacgttcactcgggcgattgcgatgcagcgtttcaaaacgcaaacgctaaagttttgtcagattaaacgtaaagtaccaaacacgtgcatttgtaacatttgcaagtgtggtgtttaaggatgattgcgagataaacaatcaacttttaagtttttccaatagaaatataatcaacattaaatgtagtaactagtaacttgaactcattcaaattcaatttgagttttaaattaccttttaccaaaatttgagttagagttttccctctctttttcataaacttttgttcctcgtttaaagaaatttaccgcagtattcgtttttaattgatgcagtctcaatctcaatcttagaaatttaccgcagtaaacatatatgtcttaatacttcaacttttttctttctaaaataaaatcatggtacataaagttggattctcggaagaaaaaaatgtgaatgtagagatggtggtaacgaggatgaatatatttttgagataagttggaaagtagacactttttctacaaataatttgcaaagtaagtagttgttttagaaatagaagaaatagacacttttctctttccactctaatacaactttttgtctaatagagattttagtaaatgacttatataaccttttgttattttattatgtagtaagataaagacaaaattcaagtcaaattttactttttctcttttttttttttacttaaatttttttaccttgtttgataataattcttcataaaaaattaccatataatcatattaatttttaaattttgtatgtgaatctaaaaagactaattttgctatatttcaaaaatatgtagcatttttttatttaatcccagccgacagtatacgtgatattattaaaactggtgtacaaatattagagtacgataataatgcaaaaatcaacatataatattatcgaaagaagtgatagagtgagtttaagagtgtacaaaatgatgtaccatagaggattgaaaatatggtgtacatgatcgcacatctttaaaaatctatgagacaatgtactaacattggtgtaagagatgatgtacaccactaattgaaataatgatttatacattctctataagtgtacaccaagttttgtacactttgtctaccaatcttgtatgttatcatttaaaagttgtatatatcattctatccaccaatcgtcataatagtttcaatcattttgtacaccattaaaagtaacttaattatgtacaccatcatgtacaccattatattgaataataatatttggtttatacaatcattatgtttgtaaaatattaaaaacaatattacttatattaataagtagaagagaagtcagtgatgatttatgaaatatcggtgtacacacttgtacaccaacgaataatggttagtgtacaaaacaatgtttgaaatgtttgtgcattataatgatgacagataaatactctaaaagttaatgtaatttttttaagtaaattatttaagaaaactaaaataaaaattaaaaagataaagacaaataaaataaagtaaaactggtctctaatattatttttattctctctcaagataaagggtattttaatatttgatatgtattttgttttttagtctattaaacatatactctatctcacaaaaagcaaaaaaaatgtctatctctctaatttctaaaaaaattatctactttacaaattatttttgaaaaagtgtctattttcccaataatatctaagatctattataaagatactaactctccttttagatggaagattaaagaagacttg

SEQ ID NO: 31378 - DNA, 1969 bp, Arabidopsis thaliana landsberg
acaaagaaggctctttgaaagtagaagtcgaatttaaagttgtttctaccaccaaatactctccatgaagatatcttcaacaccattagttttcattatcagctagctatttacttttggtcctttttatatattgtttattaagactttcgtttttaatttttttatgtgaagattttgagaaaaaaatggattgatttgaggtttattgcatcgttaaataaaagttaaggaagtaacaaaatcttctttttttgttcacctgtttgtcgaaaagatccacaccataaccaaaccatccggttatgttatttataaaacagagccgtcacaacaaaaacaatggctcaaaaaattcgatagacacaactgtatctaacgttttctttcttagactctaaacggattctcaaaatccgaaaaatttgaagaatattgattggaaccatatatggctcgcgtctctctggagtttgtttatggctaggactcgtagccatcaacaagtgagactaaagtaaatggatgacttgtgagactatttatgggttcacaagttagtataaaaattcggatatagacatagctgatatagataacatacattaaattatgggttataactaaaccgttggttttattaaaactgtcacataaaaatttacaactcaagaaaccagtacatagaagttacatgcagagcgttaccatattttattgcatatcttcacaaagattatattaaactcttaaactctttcctttcttaggactgtaaaaaagcattttcaaaaaccagcaaagtctaagattgattgaaacgatggcttgtgtttctctggaatttgttgttggctacgactcgtaggtgcaaagtaggaatagttttggctcgtgaacagtttctccgcgactttacttccaacaccaaaggttaccctagttgccgccgggttgaggttgctcagcaaattctcttcccctacacccaaccaaacaatataccttttagagtgggagaaactcaaaaatataattttagagaactatctgttgaaacccttttctttacctgcaaggaacgttcttttgctgttggtcgcataaataccaaaccctaccgcgataaagtcttgatcttgcgagagtatagtgaatggatgacctgccggaacgataaaaacttcgcctttacacactcgtgacacaactttgtgtacgttttcactcatatcttcttcttcttcttgtccttgtcctggccattgttgttgccctctttggaatttataaggagtagccatctcgaagcgggcacaaccattctccacaaacgttacaaatgtggtcttagagttaaaatgaggaaggaacaaggatccctgcatgtattacacaacccgatttttcgattagctagtaattaaaccaattgatacatcataccacatgatatattaaaatttttgaatgtaaacctgtgtcatgttagcccaagcggcggctatgtgaaggtcttgcagttgattataattcttaggatgtgcctcgtggaaatgaccaaagtcgttggagtaaattggatctattgcaaagagattgaaaggagtccacaacgttcttaggtctttgtcttcctccttttcttttttggctttgtgtttgtttgaaggagatgtagcgtgctcagcaagttccttgatttggtctggagaaattcttcggataatcccttgaccaatttcttttgatctcgtaaccaatctccctagcaattcttccggcacctataccaaaaaaaataaattcttccaatccttagtatgtgcctgatttaataagaaattcataacatgttctagggaagaatagcatacgttgaaactggtagagaggacttctttggtaaacccattgaagtaagattgctgaaattgggatgcagcagggaagtaatcctgttgaaaat

SEQ ID NO: 31379 - DNA, 2228 bp, Arabidopsis thaliana landsberg
tttttcatcaagatttgccaagagaaaaataaacccacccctggatttgggattacccttgacgactttctgaccatactttctccatctgtagccatcgtcaagaatgtctatatcacttgttgtttgaaccaccactcttggctccttcacattctcttctcttttcctgcatttataagccattcacaacaaatccaatcagacatctcattgtctcctcatccttttggtttcagttacttaattatgagtctgctaattaccatctcttggcctctgtttcatcttcaccaatgtctttaccgtctccattactgctgttctgatgtgctgctatagcggtggaagatgatcgctttgtggattggggcttgggatgattgtggcttcctttatagacaatctcaatcatctgacccttcacaagagacgtctcctctttcttctttgcgagacaatttggatacgtgcatttgaagtaactcctcgggttttcgcttcctttgacttgcttctgcccgtatttgcgccaattgtagccgtcatcagaggttttgttactcgacatgatttcggatttgaataaatccagttgaggtaaaggctgagttaccatctgaaaatgagatagtttaaaactagaatgtcttaagagataataaagcagaagctaaaaatgcaaaaatggatcctacagatggtaggaacaagggaggagttgtgtcttcatatttgatttcatttttgtcaatgagcaaaccgttattgttatagttcagagattgcgctggaaatgtgcctgtcgtaggagacggcaaaatctgtgatttcaagatcaaaagaagaagatgatatgagagaagaagaagggaaatggacaaatcaagaaccttgaattctttcaatattccaagataaggacaaacaatcatagtttgaaacgttggaggagatagatagatacgttggaggaagtgaagagaagaggagagtcgagaaagtcggcgggagtaaggccaggaggcatagtgaagtaaggcgaaggagagagagggagcggtgacggtgttgctgttttgaatttcggaacagctctttggcgatcaaaagagcccatcaatggtttacgtatgaggtactcttcttcttcttcttcttcctatattaaattacgagttggatagaaggaaaggatgtttccaaggaaaagcaagcaattataaaagataagcttgtgaccaagtgtgaagcgtgtgtattcaaaacaccaaaatgtttgacttttttgtgtaaggcggctgaattcacatcactttcaggagtccttgaggtcttcttctagattacttaatgccaagaaaataatatctattactcatctctcaacaactaatagctcaaagcaaaggagaagactaagcaaaggagtggaccaactgtcatctgatttaaacggtaaatcaccaaaaaatccaccatacaaacattacaaaaagcactactcagctattttttgatgggttttgaaatccaacaacataagaaaagaaatagactcacaaactgagacaagcagcgagtctgtaaaagaaacgggtcttgatgattcaaagcagttggactttcaagcagcttgctgggaagcaagtctcttcctggcttcctcaatgatggtcagcttaatacctttgccctttggaagagacacccatggctttgttcctttgccgattgtgtacacattccccaaccttgtggcaaactcatgccctgttgagtcttgaatgtggattgtctcaaagcttcccttatgcttttcacggttcttaatcacacccacacgccctctgtttctgcctccagtcaccatcacaacgttacccacgtcaaacttgatgaactcaacaatcttgttctcctcaaggtccagcttgatggtgtcatttggcttgatgagcgggtcagggtaacggatggtgcgaccatcataagtgttcaggtatggaattcccttctgaccaaactggatagatctaaccttgcaaagcttgaactgcacattcaagcagaaaaagactcatcaatcttctaattccaatcactagttctaattccagtcaagatctaagaagagagtgcaacaaacctttgcttcctcatccttgatggagtggagacggaacgtccttggtgtcgtgagaaacggagttccattggcttgggga

SEQ ID NO: 31380 - DNA, 782 bp, Arabidopsis thaliana landsberg
cgcaagactagcttgagattggtatgggggcaaaatctcgctgctttataggccaggaacggcgggccagacgtgcaataagctgtgattaacacctcatcatgaacgaccggctcgggcgaaacacttacgaagcgattagcggagagagagagagatatatctatatctatggaagcgccagcttgaaaccgcgcacacaatttgctcttgcttattatcgagctgcactttgcgcaccaaaatgaaaggaaaatactaatcaatcttcatgtctaagctatcgaagaaatcacgcatgtcaaagtgcacaggctggcattcatcagaatccatagcggatttcccacattctaggcatagccatcgaccatcactaagctttccatactttgttcccctaggctgcaaagaaaattagccaagatcataagaactcaaaccagtgggattatctagctagtttccttcttttaagttttaacgatatggtggctgattattcatctcatatcattcccctttcccgtgttttgttggttgaaaggtaaactcacctctaacctttcgcaactgcagcatttgggagttccatcagcttcatgaacagggcagtatctttcctcccaaaacggatgaatattgtacgttttcatctgaaagaatacagttacagttacattcatcgacaccgtgacaacttactactgagaatcctaaaatggtataccttcttctctttgcagaccatagcagaccgttcatagcaggatttgtgaaac

SEQ ID NO: 31381 - DNA, 3429 bp, Arabidopsis thaliana landsberg
aagggacatcaaaggaatatcttaggtcagatttaacttcataaagaaatatatttatatctttaaagggatggttaatacctatggattctcattataaattctcttagcgcaaacctcgggaggtggttcaatatgacagatcatcaaacctttggagcttattgtttttgaatttcaaggactagaaaggtcgtttgagttaacaatgcaccgtctaacgagatccgtaaataacaacttttctagaaaaactatattaatggagacaaaaaaaaataataggaatttgatagtggattagcataggtggttaagttatgaacttatgatggtatctatttggtggagcctcatggttaaagagatttgttcaacttgagtcatctttgtaaatatatatatttttggatctgtctcgctttttatgtcttacgtattcaatcaaattaattacgcatttattcaccaatggatgattgaaatcaccatttcttttattacgtattgtattcaccaatggatgattgcaatcaccaattcattcttttattacgcttaaaaattatcgaaacaaaataaaatttttaagacgcatacacacatttaccaaaactaggattggtagcagcaaatgttccggtatttttgaaactacatgcctgattggtacgaccatgggtctgataataagagttcatcacaaacgatgcatgatttgcaagattattagggataaaacaagatccaccaggtcggattggcctacaatcaactccttgactacatgcaaaattaatatttgcttgcaactgcgcattcgttgcgattagagttgctatacaccatgttttggaactcgccacatggatatggttgatcatgatggaagataacatgatgaataagagagtcaaaggtgatgatattttggccatttttaaaactgacaattgaattgtattcaactaatttagtttttggatatctatgtaggtatatgtatgtgtgcgtctatgtatataaataaaattttgacgatatatttctacttttgtagatatattattcatagttattcattttggtcgaagatctgaataaaaaaaatatctcgtgatagtagaagtaagagatttgaaatatctagaaatatatctttataattagaattgatgtctataaaaactttttaactagatggtagaaaatcaaaaagtttaaaatattttggaaaataaatatatgctttataattagaaatattttgtaaacagtaatttttctttttgatttgaaattatatgtcggtaaaaatagaaatatatttttataatcagaaatgatatgtctataatgtattagtagaaaaacataatttaatcatattagatacttcttttcaaaaatactcggggtttagaacttagactatagactattcaaaaaatttgagtaactgattagtaactgaattgttagaagaattgagtaactgcttagtttagaacttagactatagactattcgaaccgtgagtctttaggtcatttttgttccacctaagattaagttaaagaatttgtttagtaagtgatcgataatcttagagtcatggaatgaaggttttaatgaatctcttgcaaactcgtgatgcccaacacttcactttgttgaattcttttcatatttacttgcttgcttgtttctatgacgaaatataaactaatctcttatttttgtcatagcttatatcttttctaattgatttggaacacattctctctctttttgtgtaatcaatccttaaatacacataagattagtggtgcactcgatacttttcatgtattttataaagtaaaacttatgaggtaaaaaagcacacacatcattattccacaagactctcacgctgatgcgtgtggtcttagcatcaagtagacagccatacttgtaagcctgttgcaaagtcttctctaatggatttaaaaaatcccagaaaatttagctgcatggctcctaactgtagaagatggaaaaatacccaaaggtgaagctaaataggtcaacaaagacgatggtcagattatggtcgttgatcctatatttataatgcaataaattagacattattttcaggttatatttcaaaccataaatatggaaaccaatttttcaaaaattacatatgcaaggattatagagagagcaatcctaactccacaaattgaaactatttacgggattaatgtaaacatgttagcataactacaagggacatcaaaggaatatcttaggtcagatttaacagcagaaagggatatatttatatctttaaagttatggttaatacctatggattctcattataaattctcttagcgcaaacctcgggaggtggttccatatgacagatcatcaaacctttggagcttattgtttttgaatttcaaggactaggaaggtcgtttgagttaacaatgcaccgtctaacgagatccgtaaataacaacttttctagaaaaactatattaatggagacaaaaaaaaaaaataggaatttgatagtggattagcataggtggttaagttatgaacttatgatggtatctatttggtggagcctcatggttaaagagatttgttcaacttgagtcatctttgtaaatatatatattcgtttttggatatgtctcgctttttatgtctgacgtattcaatcaaattaactacgcatttattcaccaatggatgattgaaatcaccatttcttttattacgtattgtattcaccaatggataattgcaatcaccaattcattcttttattacgcatagaaattatcgaaacaaaataaaatttctaagacgcatacacacatttaccaaaactaggatcggtagcagcaaatgtgccggtatttttgaaactacatgcctgattggtacgaccatgggtctgataataagagttcatcacaaacgatgcatgatttgcaagattatttgggataaaacaagatccaccaggtcggattggcctacaatcaactcctcgactacatgcaaaattaatatttgcttgcagctgcgcattcgttgcgattagagttgctatacaccatgttttggaactcgccacatggatatggttgatcatgatggaagataacatgatgaataagagagtcaaaggtgatgatattttggccatttttaaaactgacaattgaattgtattcaactaatttagtttttggatatctatgtaggtatatgtatgtgtgcgtctacgtatatatatataaaattttgacgatatatttcgacttttgtagatatattattcatagtaaatcattttggtcgaagatctgaataaaaaaaatatctcgtgatagtagaagtaagagatttgaaatatct

SEQ ID NO: 31382 - DNA, 4583 bp, Arabidopsis thaliana landsberg
ttaacaccagtctaataacaaactagtaatcagaaaccaaaaataaaacgaatcctaatcattactccagaaaatcaattcattaattctcacctgaagtttccttatggtagtcccatccttattgaaatgcaactccttggctgcacatactatggcaggacgggatcttctgacgcacacgttatgtctccttccaaacgagcttgaagagatgctagtcgcagaagacaacttgatagcattgggagcaagcaacgaaccaagggaagacgtggcagtgaatgtcgatgccattttcacttctcaaacactgaaaatcaagtccatccaacagtcacataaaacgaaagattcaccaaaagtactaaccaattaaaactggcaacaacaaaaaaaaaaaaaaagaagatgaatttcaaaatcagagctcaatccccaaatactcaaaaccacaactacaccaatagccacaaatctccgggaacacaaaaacaaggtaacatactttttctaagctactagtaatactttttaatttcaatgccaacaaaaacaatcaatcgatacacaattgcatatacgcaaacatagtagctcaattgatgggaaaagtgacactcaccagacggtggaacgacggaggtgaggagggagatggcgcccgagaggtttattccggataaggaagaagaagtaggtttctccagtgacgaaatgaagaatgcacttgctactgataattttttctctgaatataaaggcgatacgagcctttagctcttgaaacttcgagctaatcttaaccgttggatgtactcttcattgttttctcattagaactctctagaacgtcggatgggtaatcggatcttgggtttatttccggtggccttgtttggtgatttgggcctgtttatgaattcttaatcaaataggcccattaaatactctcgatcttaaaatgtttttatttaataatagcttttttaagctaaggtaatttacttccttttatcctaaaggtaaagtatattttcttgaatagctagttttggtaagtttctctgaaaaatagattttactttcttttgtttttctcttaatgatttgcttttagttttaaaatagttgctcaaaacaaaaaagttgaatatatatttttaaagatatttcaatgtatattggggtaaatttatagaagaaacacacctataatggaaagcatgccctcttttgcttttaaatttgaccaaatttacttttgaattatattttggtaacagatttgagatttatatctattttattacaagattaccaattttaagaaaatggaaaagtatattatccagattttgcaggaaaaataaccaaaaccacacggtctatagtcttcttttaaaacaaaagaggaaatatcttaaggtggaagaaaaaaaaaaagaaagaaagagaaaaaaaagagagaaggtgaggtggttgattagtggatctatttgaatcagagggagaggtagagagacaaaaccctttttttcctcttccccgaagcaaaacccttctccttcttggcggctgcggccatttttttcttctttctctcttctattctatctcttaaaccctagattcgatctgggtttttcctgattccatttagggtttctctatcttcttttttttcttcttcttcttctttctctttggtcgcatccccttttatccgagaaggatctatccaaatctttgtttgtcgaatctcctctcatggctaccgttgctcctcctgctgatcgtatcctttctttatgtttctcgatctgtgttttgatttctcgatcttgaatctgttggatcttgaatccagtgagctgattttgagtcttgttcagatatatttgatattgcctagattcagtttcgggtttctcaatatatttctcgattgttaggtttctatattgattcaaatcgattcatttgtggcgagtttgattgatttgagaatgtttgctttccactattctaatggttaattgtgtaattctttgcttccttgactcaccttgtttgtagaagctacagatctgttgcagaaactatccttggactcgccagcaaaagcttcagagatccctgagcctaacaagaaggtgatttgcagatttaattttggttttctgttgtcacaacttttgcttcttccagttttttttaacgcttttgttttgtgtcttgtgtagactgccgtctaccagtatggaggcgttgatgttcatggtcaagttccttcttatgatcgatctttgacaccaatgcttcccagtgatgctgctgacccttcagtttgctatgttcctaatccttacaatccctaccagtattacaatggtagcttcatcctcaaatcatttacaatctagaaacattatttcactaaattgtcaccactggtttaacaagtttttcgttttgtaacttttcagtatatgggagtggtcaagagtggactgactacccagcttacacaaatcctgagggtgttgacatgaattctgtaagtgtgtgctgactagttataatagtgcctttcatcgtctttatattttctttgcttaacaggttcaatattttaccagggaatttatggagagaatgggactgttgtgtatcctcagggttatgggtatgcagcgtatccttactcgccagcaactagccctgctccacagcttggcggggaagggcagttgtacggtgctcagcagtatcagtatcctaactattttccaaacagtggaccgtatgcttgatctgtggctacacctacccagccggatctctctgcaaacaaacctgctggtgtgaagacactacctgcggatagcaataatgttgcttctgctgctggtatcacaaaaggaagtaatggatcagctccagtgaaaccaactaaccaggctacccttaacacctcaagtaatttgtatggtatgggtgctccaggaggaggtttggctgctggttatcaggaccccaggtatgcctatgaagggtattatgctcctgtgccgtggcacgatggctctaagtactctgatgtgcagagacctgtttctggtagtggagttgcatcctcctattctaagtctagcacagtaccttcatcgaggaatcaaaactaccgctcaaattctcactacacggtatgatgtctttccaaacttctttttgctaatgaacaccattgtctgctttactggcatatatatatagccgctcaagtcttccaaatttgttaactgaccttcaatcaacttttttctttgcagagcgtgcaccagccttcatcagtgactggctatggtacagctcaggggtactacaacaggatgtatcagaacaagttatatggtcagtatggtagcacagggagatctgctttgggttatggttcatctgggtatgattcaagaacaaatggaagaggatgggcggccacagacaacaaatacagaagctggggcaggggtaacagttactattacggaaatgagaacaatgtagatggtttgaatgaacttaacaggggacctagagctaagggcacaaagaaccagaagggaaatctagatgatagcttagaggttaaggagcagactggagaatcaaatgtaactgaggttggggaggcggataacacatgtgttgttcctgacagagaacagtacaataaagaagatttcccagtggattatgcaaatgccatgttctttatcatcaagtcatacagtgaagatgatgtgcacaagagcattaaatataatgtttgggctagcacaccaaatggaaacaagaagcttgctgcagcataccaggaagctcaacagaaagctggcggctgtcccatctttctgtttttctcggtgtgtatataatcctgaaattaaaaactgtgctctttttactttgttttatgatattgttctttatactccagtttttgtctttcaggtcaatgcaagtggacaatttgttggtcttgctgaaatgacaggaccagttgatttcaacacaaatgtggagtactggcagcaagataagtggaccggctctttccccctcaagtggcatattgtgaaggatgtgccaaacagtttactgaagcatattactttagagaacaatgagaacaaacctgttaccaacagcagagacacacaagaggtaaatatttgtgacatcttttggcttgttttactgattactcctcgagcgtttttgttttcttgtgcctaactttctttgtttggatcatattaggttaagttggagcaaggtttgaagattgtgaaaattttcaaggagcatagcagcaagacttgcattttggatgatttctcattctacgaggttcgacagaagactatcttggagaagaaagccaagcaaacccagaaacaggtaagaactagaaaacaatttcagaaatctttttcattcagtatatatataacttgagtgtttctaatgtattaaagcttaacaggtaagcgaggagaaggtatccgatgaaaaga

SEQ ID NO: 31383 - DNA, 1908 bp, Arabidopsis thaliana landsberg
cctctcccctcttggttgctgtaagagccctacgagaaaaaaggcagacactttcttctctggatggtcctgttctcgacacatctgccttgctcgaccctcctagttcaaacatttttcccggtaaatatgcttacacatatttagattagggcacccttaagccagcacactaattgaacagcatgagaacgggaacactgactgttttacaaatgttgtgcagatggagatcatttggttgctgaagattcaaacatactggaagcaatgagcacagtgaacttttggctactcttcttggcaatgctatgcgggatgggttctggattcgcgactgtaaacaacatgagacagataggcgagtctcttcgctactcttctgttcaactcaattctctagtctctctctggagcatatggaactttctgggccggttcggggctggttatgtctcagacacattcttacacaaacacagctggccaagaccgatcttcatggccataactctaggtgttatggctataggccatatcatagttgcctctggtgtacaaggcagtctctatgccggttcagttttgatcggtatggcttacggttcgcaatggtcgctgatgccaacaatcacatcagagatatttgggatccggcatatgggaacgatttacttcacgatttcgattgcaggtcccatcgggtcgtacatcctctctgtgaaagtgataggttacttctacgacaaagtggcttctgaagatgacaattcttgctttggaagtcaatgtttcaggacatcttttatgatcatggcttctgtggctctctttggctctttggttgcttctgtattgttcttccgcacacacaagttttacaaaaaccttgtagcaaagaggaacttgaagtgagcttgaaaattgtataaacctttatgtttgtgatttgaagtttgatactttgatccaaacaccacaaaactatttgtaattgtgccatgaatatgcgagggagatttgttaaaatataaattggaccataaattggtaaaaggttcctgctaaattgcaaatatagaccgtgttggtcggtttgaccggttgaaccgaattctagctaacatttgggtgctaattttaactttaaaccaatcactttaccaaaaccggagggagtcgcttaaaccctggtttgggtttttctgtgaaccctaaatgcttcttctcctttcataatcgccaacaccaaaacttgtggcagtctcttttagtcgtcatcgatcttcaaatccaacgagggattcttcaacttctctgttttcaggtaagaaacccgacaaacattattctcttctatttctgtttggattcaatctaaattctgaagctttattcttctctctacctgttttgtttgtttgcttgtttcatgtttctgagtctcttctgcaaccctaaagcttcaatttttgagtgtgtatttcactctctcgaagcctcaatcacgctttgttcatataaaattttagctagagtctagttttattgctatattgatgattattttcgattgttaaaataattatgaagattgtatagtattgcattaaaggtactgtctttgtgttcttatatttttaaccatcttatcagaatctccatcttacttttactattccttccaagcaagcttcttcaattcttaaagaaaagtaagttttttgttttttttgttgagttggtttcagtctcaaagttaagtggttgattaacctaattgttaccgttctattgtaaaaaatttagctggatatagtcaaggaacggaacctagttatggaattattatgtgatgacattggaaccagcatgtgccttacaccctcagaaccggacctgcctgtt

SEQ ID NO: 31384 - DNA, 3270 bp, Arabidopsis thaliana landsberg
ggtgcacaaaatttaagaaaaactcatcttcctataggcggataaatcgcagccacgccagaacccagaataataaatcattcaatacaaaagatcattttacaaacctgcattgcaggcttcagagaactgaatatggtatctacttcttgaccatccaaacccggtaagagtgaaactaacagatcaaacaaccttgccctgaaatgaatagcagattatagggtcaatttaactaagcaactagaaacacaaatcggagtaacagtaccttaagttggaagaagaatttttgtctgcggtgttatccacatccatcccactaacaggactttcatcttgtgcaatggcagttttggtagcttctaaaagctcttgcagagtcttgaaaagtagctttgaaacagtctttttctccgctatggaagctaagttacctatcgcagactgaaagtaagacaacgaaagttatcaaatactgtgacaagctctgacttagtgaactatatctaattagtgagggacatcgaccagttacacgagaatacaacacaaagatgaaaaagttctggtgacatttaacgatgtaaggtaatcgaataccctgccagccatctaaggttcttaattacctgaagagaaccgccatcatctttgctacattcatgaaatatccttgacaaaacatccaataatttaggagcacataaccgcagaacttttaaattagctgccgcatgctgtgaatcataacgagcagtagctcgttgcatagcaggactagcatcattagtacgtacttctttcccctcaacaacttccttattttgttgaatcagaatattcaaactggcacatataattccacgggtctcagcctgtgtttgaagaactccacataatattcgccccagatcggcaaaactctccacagtatccacgggataattacagaatgaaggtaacaaagcccataatgaatatacgagagaatccacactcctggatgctacaggaagaccttgtagcttgagctgccatcacaaacaaatagcaaaattaaagaacaataaagaatgcatacatcatcaaatagcgggaaataataaaaattaccttttgagctttgtggctcattgtttcgaccatgctaaaaatagcctctgtgaagaaacttaggcgtcctccaactgtgtactgcttcaagattgggaagagccaaacttttacctcagacagatcattagcttcaaggtttaaacgcacaatgcttaaaaatgtttcaggtcccatagcaccaagggctgatcctacacactcatgcaactggagatcgccaataaagataatatcagaaaaataaacagtcaggaaattatggaacgtgactaacaaaagcaaggtctaatacagtgacatgttgcatcatcatatatcgtacaatcattcatttcagactaaaaaaagtgagagcacgtctaagtaacagaatagatatttcgtgtatccaattgctgtaccaacagcatgatccaccactaagtcaaataaaaagcagaaaaaggtttacacaagaactgtagccaaaagatcaagcattttcaaacttcaatataaaatcaacacaccctaatatctattgacatagttgcatatgctcaaatcatttcatttcttagaacaactcgccatatatctaattgttattgacattctatgtcaagaaacaatggagacaaaatactgcgtggtcaatgattatgccaagataagagagtaaaaatgacatcactatctgaagtatttgtaccctaaactagaatgcagcagatgatcattcagctcaaggacaagtatagtacagttacctgcttccggtaaggaaatccttcatcaggtaaatcttgcatatcagataaaccctggagggtgttcctcataaaatatgcagaatgttcacctgaaaattgcgtgaaagaattagcacatgaacattaagcagataatcttcaacaagaagaaacaaatgaaaactcaggataaaaataataattacctaatttatcaaacattgctgaaactacttgaaaagccatatcccagactgcatggtacttgtaatcaagcaagctctcaactgttgcacacagcttttcgatgactgttggactaggcttccttacattcaagtttgaattccggatttcgttgacaccttctctgatcaagctttcgtcaatacatgaaaatatcaaactcttcaacgcatcagttgctgcaaagatagcctcctcgtgttcagatgcaataatatctgccaaaagaagcacatagattatgtcaacagtaggataaattacattaaaaagaaagcagtatgtttgagaaattcggaaacccgaaaagcaggaaggtgcaaatacaacagcataccattcagaccattgaacacactaggaagtttaaccacacaaagatctctgtttagggtaaaactcctagtcatcccaactttcagtaaacgtgctgtaaaggtcatggcatcagcagatgtttcatgtcccgagaacagtccagccgcaagagataacacttcgagcagcgcctcaaccggaacctcggaggttggattgagacaaactgcatttaaagagtctatcactggccttgtaatgtatggatcgcgaagaatcatcagcaccttaaatccctcaatcagagtagcaatgtgcttttttgacatcaaggccaagcattcttttagagtgctaagaatgtaaagcacttgctttgcccctctggctccttcggtagaacccacttccgatttatgggcgaggtctaaatagttctggaacatttctgtaatagctccactgactgattgccaggcctttgttccatgggatttctgcaggacatcacggagacaggagcttgctagctttcttacctggatttaatagaagaagatcgtcaaagtctgatgcagaccaaatcatcaacacgggtaaatttgtaatttacctttccgtctgaatgagttacaaaattcagtaagatgttgtaggaatcagagccttcgttcaccataatggactcaaccgttgtgagaaggtgaaccaaacacttcaatcccgaaatcagagcactcaggcgtggctgatttcagacgcagaacattgaggacgagacgcaaagccaacccatccctcttcagtactcctgctgagactttacggaacacaagggaaaggatgacaatatgtg

SEQ ID NO: 31385 - DNA, 2028 bp, Arabidopsis thaliana landsberg
gttggagcgttcgttaagaaatactttgcatgttcatgttctgtttgactgggagggttcaagattattacgttgatataaaaatcttaaaagtgattaagatagtttttgtatcgtatctttaatactttcttaaaaaaaaatcttatttcaatagttgttacagaaactgaggctaatggtattaaagatgagttttgggctcggtatccatctttgaagatgtttttaagtaaggagatggtcaaagaatttatttctgaagagtatattttggagaaaggtaagcttattggagataataaggccaaagaattgaatgaaaaatgtgaggttttgtttatcaaggagatggagcatctcatcaacaaatatcgcttcatggctgatgttttggagttgttgtttttgtgagaacttttcggtagtggtgaatttgattttctcgtttttatttatgttataattattgtgttatctatgaatgtaaaagatttatgaaggattcgaagtttttctcttttctttaagattattataaacgtctttcataaccatctctttattcattatatgttcaggagtgaaaaaacaaaatctaaaaaatagggttaaatgtttgcttagcttctctcttcatgtagatttgagaacggatgaacaagaatttactaaaaatatatcattgatctaaaaattatgaaaaaccaattcaactttttatccaccaacacatatttttctttacttttctgttttgctacgcattacctagtcttatatttcgaaaaattataaaatctcatttcacaactaaattaaaagtattatttcacaaacaaataagatgaaatgttgatagaaaaatcatcaattaataggaaagaggattggagtatacttctattgattgttacagtatccacatggcatcgataatcatagggactactaataagaatttctgtccacaaattccaattgaaattcaaaattcaactctttgctctcttaatcacaaacacaaatgagccacaaaaacgaagacatcatatcaagaaacgacgatgagcttcactgcttctctcgtctcttctttgacgtctccctcgtttgtctcactcgaccatcttcctccttccttcttcctcccaaccacactcgtcaatccaacaagcctttctcattcacggcctcctcgattgtccgcatcctatggtccggctgcaaaagctgcgacagccaacgacgttgttccagaaacagctccgacatcagcgtctgaggtcgtctccagcttctacgccgccgttaacgtccatgatttatcctctgtcacagacctcatcgctcaggactgcgtctacgaggatctcgtcttctcatctccctttgttggccgaaaggtgaaacgattattattctaataaaccaaagtttcttcttttcagactttgttgtgtgtcagagcctaattttgataaagccatgacaggcaattttagatttcttcggaaaattcattgaatcaacaagtacggatctccaattcgtgattgatgatatctcaacagaagactcttcagctgttggagtttcatggcatttaggttagtttccaaaatctttatgatttagtcgtctatgtttctctaatgataagtcgtaaattggagatttttgacagaatggaaaggaaagaacttcccatttagcaaaggttgcagcttttaccggttagaggtgattgatgggaagagacagatcgtgtaagcacactttctcgacagatcgtgtagactgacagagatgccaatttttgtcttgctgggataaacatttcttctcggttttgtttgcagatatggaagggactgcgttgagcctgcaatcaaacctggagaaacagttctggtaacatgagctactatcaatttttgattgtgtggatgtgtttgaaattgcagaggtaatgaagatttaacagcttttgcattttgtgtaggggatcctgtatactctagagtc

SEQ ID NO: 31386 - DNA, 6989 bp, Arabidopsis thaliana landsberg
  unsure (1)..(6989): unsure at all n locations
actcactgctcaaaagctttgtggctaatcatcttcttcacgacagcaaacttttgaggtttctttgcctttcccatcttcgaagcagagagtaacaaaaaccctagaacgacgcagagagaaagactggtaagctgaatatgcgaggtctgaatcggcggaggctgagaagtggttttcgaattgggtatcagagacggagactaacgctcaatatacagcctaattataagcccaattataagcccaataataaaataaatgggcctaatttatatggcccataagcgaagcgagtttcttaaatcacgtgttagtaaaggttaagaaacgaagagaaaattccagatttttcaaagtgatgcgagaatgatctggagagcagaagaaatatcttttccctctgaacgttgttgttcgtctttctataaatcaagaaatgtctttggattgttcactacccatagaaaaagctgcaatcatctgaatcagaaagtaattcgaagaagaaatctgcgttttttaattggtggagagagtgagagagcttcgcaggaactgagtcatcggaatttacggatcgtttctgtttcgtgtaagctccgtcattttcccttcttagtttaatgaatagctttgagaatcttgagttcattgctcttagtttaatgaagatgcgattgatttagtttggcagattttggtgattgtggtaacgaaataattctgaatgaaccaaattcacattgtatttttctaatgatatatggatttgggtatttgctgcagttttactggaattggttaagtgatcttgattaaagatgatgcctgtgtacatggatccatcacaaccatgtcaaatgagaccacaggaatactattatcaaggatttggtaataactctcagcatatggcaatggatgctccaccaccgtgtcatggaagctgcgttcacggcaactttcctgcttactggcctccttgttatcccccacaagtaccgtaccatcaatgctgcatgaatcgttccgctttccatcctcctcacgcgtcttacgctccgtcttgttacgttcatccaccatttccagttggttatcaaccttggtttgatgttgagaaggatgtgcctgggaagcatcactgcgggaaatgttcttcccagatgtgtgatttgaagaaagacagaggcgttgtgattgaagagcatgagcctgagattgagaaaggagaagctgtacttccagttcgttctactaactgcccttacccaattatatggattcctcatgagaatgctaggaatcaggaatatagaagctctcttgggttagggaagcataaccagcctcctgctgaagttagagctcctgacaatatgacgattcagaaaagttttcctgagtcttggcgtggttgttttccatttgatgagagcagcatgaagtcgttggtacagaatcaagacagtaaaaaggcgcagaatgggaaaaccgtggaagccccgtttgatatcagcaaattcaaatccttattgcaaggtcaagacatgaaggaagcgcaaatccagaagaacaaggaagagctgggacagcttacgtatcctacttcttgggttccatctcgtcggaaacgagatgatgttgaagcttctgagagtagtaatgaagacaggaaaaagatgcagaatgggaaaacggtggaatacccgtttgatatcagcatgataaaatccttaatccagggtcaagatgtgaaggaagcgcagaaccagaagaacaaggaagagcctggacaggttccgtatcctattttttggataccatcttatgggaaacggaaagatgttgaagcttctgagagtaaggagagtagtaatgaagggcgtaacttggagtcttgcccctctgatatccacagaaatgaagggcagataactcaagcaaaaggcaaagaagggaattttgagtgcaatgtactttcagatgcggaggagaagagctctgtaataaatatcccagtggcgaaccatctacaggaaccaagaaatattccagtgaaactatcagaaaaccatctgcctaaaccaacggagccaaccaaaaggattgcaaagaatgagccagttaagagcacaaaaaaagagcagtcttcgtcatcatcagaagcatccaagttgcctccggtttgtctgcgtgttgacccattaccgaaagagagaaatggtggttccaaatcagtaagtcatcctaaacggatggaaaaatctaaggagactaagatcgcggctccactgtcctccaagaaggctgaatcaaggactgttcctgaggcttgtaatgtaaaatgtgaagacgcaaacgcagaaatgaagatggctgagggaagcctaaacgcattaagaacagaaaaaggatcagttgagagcaattctaatcttcaagaagaatcaaacggtgagattattaaaccttgtgaagctaaggagaatagagaacagcctgcaaagaagagctttacagaagaggaagctgctagaattatccaatctatgtaccgtggatatgacgtgagaagatgggagccaattaagaaattgaaggagatagccactgtccgtgagcagatgggagatgttaaaaagcgtattgaggcgctagaagcttctactgatcagcacattgaagagaaggagattgttgttaatnnnnnnnnnnnnnnnnnnnntcttttgaaattggatgctgtcgaggtaatgcatgaaagactaatttcattggttggccgagatagtttatctcagtatgtactgctgtgtaggatttttgctgacagtttcctatactgatgtttatcttccagggattgcatcatagtataagagagttcaggaaagctttggccacagagctctcaagcattcaagacaagcttgactccttgaaaagtagttgcgccagtgcagagaaagaggctgtaaaggaacaagtggaaattaaatctcagcctagtgactctccagtgaacttggagcactcccagctcacagaagagaacaaaatggtatctgacacgaatttagagaaggtacttcgtctgtctcccgaggaacatcctatgagcgtcttgaatagaacagatgaaaaacaggctgaatcggctgctgaaacagaagagggatatggattgtttgaaaccctggcaacggattctaagcaagctactgaaaatgcagcggctgcttcctcgacaacaattccagagaaaattggagaggttgagactgttgttccgggtaatccaccgtcagctgatggaaacggaatgacagtgaccaacgtagaggaaaacaaagccatggtggtggaaagtttggaggagccaataaacgaattgccgcaaatggtggaagagactgaaacaaactccatacgggacccggagaatgctagtgaagtctctgaagccgaaaccaactcatcagaaaatgaaaaccgaaaaggagaagatgatattgtattgcattcagaaaaaaatgtcgagctctcagagctacctgttggagtgattgacgaggaaacacagcctctttcgcaagatccatcgtcatcatatactcgtgaagggaatatgactgcaatggaccctaaaacagcgagccaggaggaaacagaagttgatcactcacccaacaactccaaaggcattggccaacagacttctgagccacaagatgaaaaagaacagtctccagagaccgaagtcattgtgaaagaacagcctctagagtcagaagttattttgaacgaacaggctccggaaccggaaatcactgaacctgggatatcaaaagaaaccaaaaagctgatggaggagaaccagcgattcaaggaaacgatggagacgttggttaaggcaggcagagaacaactagaagtcatatcgaaattaaccagtcgggtcaaaagtcttgagaagaaactgtcacataagaaaaagacacagatcagacgtcgtgcaagcaaaccaatgtccgtaagtccaaccgatgccgtattatgacccccataaacattgatatgtctcaattcctcatatattgtatccatctccatcctattgagtacagaaaagagaacgagaactcaaaaattgtcttaacgaaaatccaaatatttacctctctgttttcttcgacgttcatggataacctccttaaacgacccattcgctctgacagattcgactaaattttgtgtcaaggcccaatatataactatataaggcccatacaatgatcaacccattagttatttcaaatgtttttattatttatttcaaatttttgctataggtgtaaatttcatgtattattactttaattacatttaaaatttgtatctttcaaatttgttatgggagaaagaaagagaatgattgtgtggtttgtgcggacatagtgatccttttcatgccataactcactcttcgttttcttctttctcatcgtcacgttaggttgtctctgagccgccaaatattcatctcttgtggtcccgttcacgtcccaacgccatttacactcatctccgtaacctctctcttatgtgctttctcattacaaacaactaaaattctcaaagattaacatgtgcaagagaaataacaagtaatgatatgatctcattctcacctaatctatggttgaaaaaaaggaaatggtgtcagtattagtcataataaagccttggagttgtagactatagcatgaaaggaccaggaatcttcaagcatggttattttctgatacgaatgatttatattttaatcgtttattaacacccatttaacctcataatgactctattagcctactctcaatccccaaatttactagcataattaactaattcaagggattatccttcacccacttgtgtgcatccatcaaaagttatttcttatcttagaaatacatttcatctaaaccaaacaaatgatatacactctcatttctattcattagtgtcatttctacaattgtagcagtatgttaactactgtcactattgtgatccaaatatacagtaaaaggttgcacctctactgtaactattttaacaagttcgcaaactgtacataggagaaataggttgatttccatggagaaaagaaaatagtaaaaggtgaaaaaggttcactcacacgcatcctctgtctctgagagatatatttccccttgcagtaaataaaaatctatggctttgttgggaagaagaaaaagtcagagtaaactcgtaatctttgtcgggagagagtaacaggcttttgatgttgtaacattatactactattgttttaaaaagcaaagaattgtagtagtaagaattacaatcatacttaacaacaaatcacgtttttcgggtttttgtataaataaatgataaagcaagatggacaaattttaaggataagccattaataagtgatctgtgaatttttaaggaaaagacgaaagaaacagagagagtcgagacacaactgtctccaagaagacaaccttccacagcttaagggaaacagaggtgaaaacagagcgagtaaagagatggagagagagtgtgaagaaggagaaatggagaaaaagctgagacgaagtttcatgggctatactaggagagctggtccttccactcctccacccacctggcggctcgagttttcgccgccacgagtcggagcgaccaaggagtttttggcgaattcggaggactctgtccggaaattgtgtgctgatttgtgggaaactgaacaattccggcaaagaattgagctgcgacggtgtcgacgaagggattcagatgtggaatcgcattcccgtagcccgcttcacgatcatgtaaacaattttggcgcttttgatttgcttgaatgtttttgacgggtttatgtagggttttagtcttcttgttttgataggtcgtaaagttgtgatctttacggtgaggttagagtatattcgaccggaaaaaatctcatttttgcgcaaattccaccgagaaaatctcaaagtattgttctttatgatgtggtcttttgctcgtctatgcacaaatttcattggacaaatctcatggtcgtaaagttggctcgtaagtgtgtttagtatttatatatgagttttaatttgcagccaccaagcagagctagcttgaggaggcaaattgcagcaactgatgattatagaaatggtgatctgttgcaacctatctctcctgcaagttgcagcagcagcagcagttcattgcaggtgaagaaaacaaagttttttgctctttgttcactcttaaatttaaccaaggaatgcttttttacaatcttgttttgagctggatttggtgtgtgttggcttaatgtgcttgtaggttgtggtgcgtaagccagcgtttagtcagacaggttcttcggcggttaagtctgcaagctatggtttgggttcctctacaaagcttctcaaggtgctaaaccggatatggagtctcgaagaacagaatactgctaatatgtctttggttagagctttaaagatggagttggatgaatgtagagccgagattaaggaggttcagcaacggaagaagctaagcgataggccactgaggaagaaaaaagaagaagaagaggtaaaagatgtgtttcgatccataaagagggagttagatgatgagagaaaagttagaaaggagtcagagactttgcaccggaagctaacacgagagctttgtgaagcgaagcattgtttgtccaaagctttgaaagaccttgaaaaggagacacaggaacgtgttgttgtggaaaatctctgcgatgagtttgcaaaagcggtgaaagattatgaagataaggtgagaagaattggcaaaaagtcaccggtgagtgataaagtaattgtgcagattgcagaagtgtggactccccagagatt

SEQ ID NO: 31387 - DNA, 4938 bp, Arabidopsis thaliana landsberg
cttgtttaacaattttgatatctagaatctcatagacgagtgtgattgagtttattgttcaatcatgggactagctaatagagattggatagtgataactatggattacccatttggaaaatggaactgatgagatcgtattgttatttttaagatagaaaagtttgagaaaccgtcttcactatatcagaatgaagaagtgttctacatttaatagtttgagtacttggcacaaattcgtataatcatagtttgtgtttcttttggtgttgttttagagttgtatacttttgaatacgccttacatttcatttttctttgtgtggtgggagttagttttaagtaaaatattgactcaattttgattttttcaatctcattaatttcattatattttgttcgaattcaattgtaatttattcataggctaaagaaaaggagttgaagaagcaaaaagctttggagaaagagaggctggctgaactgaaggtaagctctgaggaactccaattattcatttcgggttcctgcttcatatgtatgtgtaatgtgccagccaaatccttaattttccctgtaacttgaaatatttatcatggtgtgcttctcgtgtaggcaaaacaggccaaagatggaactaatgtccctaaaaagagcgcaaagaagagttccaaacgggatgcgtcagaagagaatcctgaggattttgtggaccctgaaactcctcttggagagaggaaaaggctttcttcacagatggccaaacaatacagccctgctaccgtggagaaatcgtaagtgtgtagatctttttctttgacatttatcccaagaagttcctctagataatctctgttattctgtaattgggtcagatggtatgcttggtgggagaaatctgacctttttaagacgcatgctaagagtcccaagccaccttttgtaattgtaaggcctaatccgattcttaaattcatgctcgttctggattcgaccttctttttattgtcttctcgaatacttaatttgtgaaaaccaaattgagttgagaaaatcttgagcttctgaaattattaatactatttttaaagtttctttaatcctttgattgattctgcaggttcttcctcctccaaatgtgactggagccttgcatattggccatgcgcttacatctgcaattgaggtttcattagcatattgtttggtgctatagctgtctattgttcctcccgatgatcaacggcttaatacttgttgatgcaggatacaattattcgttggaagagaatgtctgggtataatgctttgtgggtacccggggttgaccatgctggtatagctacacaggtgagccccaatctcatctcccatattagttgaagtttcagcctatagagtgaatcctcgttgggctacaggcttgtagctttatcttatacacattgtatattttttttttacttggatgtacattctaggtggtggtcgagaaaaagatcatgcgtgatagaggcatgactaggcatgatgttggccgtgaagaattcgtaaaggaagtgagttgaaaatttaaaatatgttgatgaatagtttccttttttcattatacaaaaattcttgttttgcttgtgatcatggaaaaggtgtggaagtggaagaaccagtacggcggtacaattctaacacagctacggcgactaggagcttctctcgactggtctcgtgaggtaatatccagtaatttgacctttcttggataaatgttatagaaaattggctgttttatttatttcgccactaggtgaacatatatgtaaatgatattttttatcttcacttgtgtccctgggctatccatcttacggatgtgtttcggcctgtaaatttatagtgttttacaatggacgagcaaagatcaaaagctgtcactgaggcctttgtacggttatacaaagaagggcttatatataggtatgtttaagtctgactttgttctttgatgcaagctatagaattcctgtagatggaaacagtaatataccgaaattaggattataggaccattttacctttttcagttatcttgttgtaagaaagaacatttgactgaaggtataccatggcttctgcagggatattcggcttgttaattgggattgtattttgagaacagccatatctgatgttgaggtaagtcagcagcaactgttagactaagattgttggagggcatcctgtttatgtggagtgtctaatatctgtaggttgagtatatcgacattaaagaaaaaacgctactaaaagttcctggctatgagaagccagtagaatttggtcttcttacctcgtttgcttaccctctggagggaggcttgggagaggtaattgttgccactaccagggtggaaacgatgcttggggatactgctattgctattcatcctgatgatgcaagatacaagcatcttcatgggaaatttgctgtgcacccatttaatgggcggaagttacctattatctgtgatggaatacttgttgatccaaattttggtactggttgtgttaaggtatacctctaccttatatatttgatgctgggtttctgcccctattagttgtgtttcttgtgtcaaagttacttaattcttattttgtagattactcctgcccatgatcccaatgactgtgaggttggaaagcgccacaagctggaatttataaatatattcacagatgatggaaaaatcaacacaaatggtgggtctgacttcgcagggatgccacgctttgcagctcgtgaggcagttgttgaagctctgcagaagcaggtaactttctctaactcttcacataacatatataatttttctttgattgttggtttgagaatttttgttacactatgggtagttgcttgtaagtgtcttgtagattttaactgttttgtcaatatattattcaggggctgtacagaggtgccaaaaacaatgaaatgaggcttggactttgctcaagaactaatgatgttattgagcctatgataaagcctcaatggtacgttaactgcagcatgattggaaaggaggctcttgatgttgctatcactgatgaaaacaagaaactcgagtttgtaccaaagcagtacacagcagaatggagaaggtttctttcatttatcttttactctataatggtttcttaatctaccccatctatagaagctcttacagcacagctgtatggataagctgcgatggcggtttaagatgtcattacaccatctattaacaatctttaccttacagatggctagagaacatacgtgactggtgtatttcaagacagctttggtggggacacagaataccagcatggtatgccactctagaggaggatcagctcaaggaggttggtgcatacagtgaccattgggttgttgctagaactgaggacgatgctcgagaagaggctgctcagaaatttttggggaagaagtttgaactcactcgagatcctgatgtacttgatacatggttttcttctgggctctttccattatctgttctgggatggccagatgtaaccgatgacttcaaagccttctatccaacttctgttcttgaaactggacatgatatcctctttttttgggttgctcgtatggttatgatgggaatgaaactaggtggtgaggttccattcagtaaggtacatgtacattttaagtcaaacaaggatcacacctccttttagatgcaagtatcactgtgaccggtacttatatgcaaaaaacatattttatgtctttgctataggtttatttccatcctatgatacgtgatgcacatgggcgtaaaatgtcaaaatctcttggaaatgtcattgatccacttgaagtaataaacggagtaactcttgaaggtcttcataagagattagaagagggtaacttggatccaaaagaggtgattgttgccaaagaaggacaagtgaaggactttccaaatggtatccctgaatgtggcactgacgctcttcggtttgcgctcgtctcttacactgctcaggtactatccattgcaccgtccctaacaagctccttctgtgtatgttctataaactaaaaattgcgtttcttgattcttttctagtctgataaaattaacttggacattcttcgagttgttggttaccgtcaatggtgtaataaactgtggaacgccgtcagatttgcaatgatgaagcttggcgatggttatactcctccgcagactctaagtcctgaaaccatgcctttcagctgccaatggattctctctgttctaaataaggcaatatcaaagacagtggtgtcactagatgcatttgagttctcggatgcagccaacacaatatatgcatggtggcaataccaattctgtgatgtgtacattgaagcaattaagccttattttgctggtgacaacccaacgtttgcttcagagagggctcatgcacaacatgctctctggataagtctggagactggtttgagactgcttcacccatttatgccttttgttactgaagagctatggcaacgacttcccgcacccaaagacacagaaagaaaggcttctatcatgatatgtgactacccatctgccatagaggtgagtaagattttcggattttccttgtaacttgtcataattgttcacgtttataactcttttattctgatgctgtgaacccagaactggtcaaatgagaaagtggagagcgaaatggacaccgttctggcaactgtgaaatgcatgagagcacgcagggcagggttgctggagaaacagaaaaacgaaaggtctgagtatatgattaaagccccattcgaggaacacaatgaaacatttcattaaccatcccgcattttttaaaatgattctcgctgagagg

SEQ ID NO: 31388 - DNA, 4698 bp, Arabidopsis thaliana landsberg
ctttgctttccaccttcatatatataccaacaaccggtttacaaaaaaagaaaaaatttttacaacaaccaacctcatactaaaacacagggggctgtctctcatgcacttaagagttaagataacacagttaacactcaaaatgttttatccaccgaaagaaaaggcacatacatcatctctataattaccttgaatcagggttttgtgaccaggcaggtggaactctgctcgagacaactgttggcatggttttaacattgatatcaagtggatgaaaccggtattgaatgtcgagttcgaggaggattttgattacttcctcgatcaacaacgctcttcttgtaaatctctctcccatgttttgatggttaattttatgacatagccatattgctatcctcacaatgttcaaatcttccacatccttaacaatgatatcagcttttggataccaatactctggcttgttgtcgatgtaactgcggttttcgcgaaaaaaaacgatcgttatcatcctgtcataatatataaacttaagacactaggacaagtgcatgattgtttaccttgatattctctgtttgattgcagcaatcttttcaggaggagtagtaatgtggacacagcatgtgacttcatctcccatatccggactacggttgtaattgtggattgctttctgccacagaagaatatttggatacacaatcttcagattgtcagctctcaagaacactgttgtgagaatgttcatttcctccaccaccatctacaattttgatcttgttaaattagcctatatataagatttagtaaacagactcaaaacaaacacatattggttttttagttacctctacagtgtcgatgagtaaccgatcaccaacatcgtaagggtgaatgatgaagaggaagatgattgactcgaagacggtcttgagagagttcccaaacatgaaggctaagagtacaacttgtgaagttaaaaagagaagatacttggaagtagcgatttcaagaaggatcagccatatgactatgatgacaatggcagtgagaaaactaatcatgtgatggagtttgttcactgctgttttggtgtcattgagtgttaaggcaagtgctcttctctctctgaaagcatttacctaattaagcagaatcaatactttagtgacatatatacataatcataagaatcaacattttctatgaacaagaagtagtaccagccagttcttcaaggctgatttagtaatctttttggtcactaaggcgccttcgaagagacacattgtcttcatcgcctcgtctactcgcaaaaatctcatcaagtcctccaggtatatgtgtctatttatatacattcagattatggatttattaggtcctaggaaagaaatctttttaaagaaagtagagaaattgtatactcactttgtgccaggttgagctacgttcttgaaaatcttccttgcagctgctttagcttctttttcgctccgtatctgtcgagtggattcatcttcacacgtgttttgaagcgcttgttcgtccaacgtagtcagggaaacatttctcacaatcttcatcagtctcttcatgttccaagctgaaacgtttttctgattcatcttgtgtaaatcatccattgtgattccgttatcaccacccgtcttcggaatgattggagagaacttcatgttcattgtacttccacttttttcctgaggaaactctttggaacaaagttcgggcgataaatcagctgctcctttctgcatcttgtagatctcatcttgcgtccgatcttcctcttcctcaatcctgcttaactcaagcattggaggtccagataacgtctcgatcaagtaatgatgaaacagagcttcttgaatccgatcaaagtaggtactaacgtggaacgaagatgctaaaactttcaccaccagtgtcttgatcagccataagaccgtgctcaacaagaaacacactaatattttagatacgagaagaagaacgtcgctttgtgtttccctttctactttcttgtcgaacaagaaatgccaagcgacgagcacgaggccaagccagagacagttctgaacagcagtcttcacaccgtatacgaagtaaagaacccgtttcctcaataggaagtttctttcgataaagaagacgatgattcgtattccgcatcccgaaaccagcctcccgcagatgagaaccagcaagaccacttcccatttccacagatgaaggctccatagagtagcatttctccaagtatgaagcgctagactcacactaacgccactacgagtgcgattaagctcatccattgaagcaacgttatcgcgtccattttcaactttcgatattccactggaacatcttcttcagccgaagaatcatcttcttcatcaatatcatcagagtgtctcccaagtaaacctgatcttaactgatccgatgtcccgatccagctcgagtattgttgttcctcttcttgtggcggatctatcaacctcgatctcgccttcgccctcgaaacaagctctgttttcctcaccgatgaacatcttacaaccacctctccttcatcctccaactgctgctctaaatttaaccgcattgtggccgatgaaaacgaagtcgaagatgtacaagaacgtacagaaccagacatattattagttcctgaactgtttattttgaaagagactctcgtttctttagaaccggacaaattgttgttgttgctgacatcctctgtttcctctgtttcttcgtttacatcgagtgtgatctcctcacggtattgcgggaaatcgaaactcccgctctttgtataatcatctgttgcaatgtcttgccagaacttatagctgtttccatcgaaactagacccagagctctgagttttagcaatgtcgccatcgtcaagattcgccagtttcttcttcttctttgtcttctcgttttgatttccggtgcttataatctgtttatacgagctatgagacttaaagggtttgcggaattccatcagaaaatcaaaaataatcgaaagaaaaaggaaaaaaaaaacacaaaatttagaatctttagaaacagaaacagaaactgtgaagatgatgaacaaaagttacgttatagtttggaaacaagagttacgagtattattttgttctctgttacttaacttactaacaattataatttggtttaggagtttttaaaaccactatgagttggataatgacttaatatagtaattaatttgtcattcgataaaaaacgatcactaaatttaatgaaggtgttttacacatctcatgttctaagtttggactttgattgttttcgttttagggtgggcacatttattaacatttaacaacacccaacacaagatttctcttagtctttgcgtgcatacaatattgttcttgtttcctttcgttcttatcttcatcattaacaaggttatacgttggttttgattcttttctttgttgtttattaatatctctgcttaacaggcaagaactagcttggttattgaataatgatttcaatgggtagatgagattaggcttaagtttgaattagggaagattaatttagactttagagattatagttgctacttaatcctaagcacatgtaatgtaagagtagagtcatagatacttgattgattcgtgaagaactcttgaattgtgattaatgaatcttgaaaaggtcaaaattgtggttatatgaactaattaattagattaatgtttgtttggttacaaaattgttgactcctttgaggcaaaatgaaaagtgttgtgttgttcatcaaaatttcaggcaggttggttttgtgaccagccaggtggaactctgctagagacaacggtaggcattgttcggacattgatatcgagcggataaaaccggtgttgaatgtcgagctcgaggagtatcttaatcacttcttcgactaagacggctcttcttgtccatctttcagccatgtcttggtgattaatcctgtgacatggccatattgctagtcttactatgtgcaaatcttccaaatcttttacaatgattttggcttgtgggtaccaatactccggcttgttgtcgatgtagctacattgcggtaagttagttagcatatcggtataaaaacgcgcataagcataaaaatatcggtaagtcttacttcgatattctctgtttgatcacggaagattttttcaagaggagtagtaatgtggacacagaactcgattgcatctcccatatccggactgcggtagtaattgttgattgatttctgccacaaaagactattcggatacataatcttcagattgtcgtatcgcaagaacacggtagtgagtatgttcatctcctccaccaccaactggatttcatttcattaacatttggttagccagtttacaagattcttgcgggttacatttcaaaggcgcatgcacatacctgtacactgtcaatctcacaccgatcaccaacatcgtaagggtgtacgatgaataagaagatgatggactcgaagacggtcttgacagtgttcccaaagatgaaggccaagagtacaacttgtaaacaaacaaagagaagtaccttgaggatgcaattcaagaaggacaagccaaatacaacaataca

SEQ ID NO: 31389 - DNA, 2268 bp, Arabidopsis thaliana landsberg
  unsure (1)..(2268): unsure at all n locations
aggcgctctgttctgatttcactctcttccaacatcccacatgtatatctttggggatgaagatgtccttagagctcccaacttatgtgctatgtgactgtaaatgtaaggttaaaggatcaaaagagtaccgagcaatgctacatactttataggtagctacacttgtcttaaattcaatgtaaataattatagaaaggttttgctccgcaaatcatttgcacatgtgctgttatctttgctttaggataccttagccgctagaccttgcttgctgctgatgcaagttgtcgtctcatgccgtaaactaaaaaccacattaactgctgaaattatagcttaagagtctggtagttcaaagagatggagaagaaaatgaagtaaaagaatgtagagtttattgagtatatactacatggaccggttacttcagcttattggttaacctgatcttggttcaatgttcacatttaatctttaagtatataagctcaagtatgattacatttcgctttgtaacaacattttggatttaataaagttccgtcataaactctctcttccccggtctccaatctccgatatcgaagtttcttagagttgttaacaaactagatacatatcactaaatattctgattagcattataaattcgattattaatgtgtgggtttaaaataaaaaatggcctataattaatctagtgtctgactttgttctatgtataactttttttacattcatagacccttgtttctattcttaaaaaactctatatgataaaacatgcaatgatcatatcatacgtgttatccaaccagaatacaagagtcttgacatcattctcaatggtttttctaagcgaacctgaagtacacacatgaatacacgcctcatatcacaaaaaggatgttattttgacaattatatcgtaacacatgttaccatctatgcatgccttcaaacatcaaagtcaattgaaggaaacacacctctcagttgtcggtgacttcccggatcatgtaaagatgactttttgaaaaccaagaacatcattgcccactccaaagctgttacctctcattccaaactcgatcgtaatcgccatattcaagaaatacgtacttggagatcatgcacaaggctttttaaaaatagaccgaactttactagttactatctaccaaacaggttatgaaagtaggcaaaaggggaagggtcaaggcccatgagacatattttccaaatagacactaaaaatgagccagatttttcaacaacacatttggtttaagggctcaaaaaatatttgtcaacacccagttttaaaacaaaagaaaatagtaaattacaggcccaaatgtttttgttgccctatagatattagtatttctnnnnnnnnnnnnnnnnnnnattgatgaatagttgagagacgataaagattgagctgtcaggaatacaaatcaaacatgatattgttcgtttacattattactcaacgaacattcacgtttccaaattctgatatcttttctaatatttctccacatgtagcatgtaattagttacaattttgaaaatgagtaccaaaaacgtgaaattattacaataacgtataaatattaaaatttctcgagcaatcaatacttgtcaagactcattgttaataatgcatcactataattcattctttttttgtcttggtcaaacatgtatgaagcgagcagagtctatgaatgtcatattatacacatagatatgcggctttggtcgggaccggcccaataaaacaatacacatgttcaacgggttcttccacgtgtcaaacttatgttggctggacggtatgtgactgtgcattgtggttacgtttccaaaatgaatacgtaagaacttttcctaaattatgtcttttgcacaatactgtaagtctgtaactatggtactaaacattataatatcgaattggaaacatttacatttgagaattttagtgtttgttggcaacgaagcatgtgagatcacagagaagcaatactcatctctgagctgttcaaacagttttacatgtcagcacccaaatatagtcactatattcaaaaacaaaattatttacttgcattcaatgctagccttttttattcggtccacaacaaattataaatatttgtatataagaaaaatcagagacctgattttgtaatgcgtggcttgtcaatttcaaagcacacagannaaagctaactaagcaaaaaacaaaaaaaatac

SEQ ID NO: 31390 - DNA, 1037 bp, Arabidopsis thaliana landsberg
ttgctcttccttaggtttccatggtctgtagggtgaagcatgaaaatctcattcaattgcttggtttttgtgttgatggaaacctccgcgtccttgcatatgagtttgcaacaatgggatcgttgcatgacatcttgcatggtaagattagctttttggactttaagattctctgctcagttctctaactaaataaaccccctgttttgaccaaaagtattcatatcggtgccaaacgataatttgtccatgtaaggttgcttattgtgcgattacaggtaggaagggagttcaaggagcacaaccaggtccaacacttgactggataacgagggtgaagatagcggttgaggcagctaggggtttggaatacctccatgagaagtctcagcctcctgtaatccatagggacataagatctagcaatgtccttctttttgaagactacaaagcaaagattgctgatttcaatctctcgaaccaagcacctgataatgctgcccgtcttcactcaacaagagtcttggggacttttggttatcatgctccagagtaatgtttcttaagcccttattgatctgtattcgtatgaatgtctaataaacagctaaaatgttaatccgccctcttatgcagatatgcaatgactggacagttaactcaaaagagtgatgtgtacagctttggtgttgtacttctagaacttcttacagggaggaaaccggtggatcataccatgcctagaggtcaacagagtcttgtaacctgggtgagtatacatacgttctggactataatgtttcgtattaattgtacccttggctttacaatttcattttatcggctgtgctcaggcgacaccaagactcattgaagatgtagtgcgacagtgcattgatccaaagctaaaagtcgatgactctccatgatcagttgctctagtagctcgatacattcatcagttccatactcatgtcgataaactctgccttttcgatatattcgcgtctttgagcatgtcgaggatatgttatgtt

SEQ ID NO: 31391 - DNA, 4660 bp, Arabidopsis thaliana landsberg
  unsure (1)..(4660): unsure at all n locations
atgctaagtgggcttgataaagttgaattgggggaatgaaaaattgggccttgatgatttggttttgttcacattggagctccaaaaattatcaggtcgggttgaacaagagaacacaagatcaagctctgctttgcacttacgtgaaaatcggtctccttcgtttcacgtttccttgagactcggtttcgttgtgagatcgttgtcccgacatatcaccaacctctcctaaaattgtgttggttgtggttgatcgatcttgaaaatcaaaccaatctcaaacctttatataatacactcttgaagtcttcttcttaccagattaagaacttcatcgttttacacacaaacaaaattctccagcaatctttctttgttagaaagtaatttcgaaaatatcataatgatttggttcgttagatcttagttttcgagtattgtgaaaccagtttaaagagattgtatcaagagatccttgaattacataaaaactgtcacattacatatgatttaaaggattaaggaaaaagtttatcaactcgacccctctcatatttttcctttaacgtttgtgctcaattataatttatgtagtgttgttaattttagctcctacaaagaattcatagcttgggataaaattaatcttccattatacaaaagaagataagatttcaaacatttttttttctttctattgaacaaagtacaataatcatatatagtttaaacagtaaacccaacaataataaatccaatatataaaacaagaaaataattgaaaattttacacagcttccatcggtaaaacccaataccttcctttcgccttctctccagcataattaggtgcctgaatattttaaacaagattttgagcaaatgtattgctcaagactttctgaagtatacttgagatacatagggaacctacaacgagagtcacacatggtacatcttggtctagaatcgtgatcgttgagaaatacttcaaacttaaacccctcgcccatgattactcctggttttaagttcgaaaagtctcccattacgtatccaatatggcacacgagtcacgaccccacaatcattgcaggtaaagaaccatttttcaggattggtttcggcttcacaaatttcacaccaatatttaccaggcgcctactccccagagctcaacaataaataatgtgcatcacacctgtgctttatcactaatggtaaagtagcgcatttgtaatccaaagaatgctcacattcaacgcaatgcagcacactgagtttcttctcaccgcaagctatgcaagtatcgcgatctactgtggttagaaataacgtgtgaggatgaagtttttggtgcctggagaaagagagagacgcacaccgaacatagtactacatccttgccatcatagtagctaaaaccacttccaagtctatgacaaacatcacacttgaaaagttgttcgccaatatccttccctaagagaagagaaagtatacatgtggaaagcccatgccgttttttaagagggagattagcacactcttcgtgaagaataaaatcgcattccatacacttatagtgcttctccgaagatattggacgggcgcaagcttcacaatctatgtcttcattaccaccatctgtgatagcgtccttgattagcaataagttatgaccgtcgagggatcaacgacttatgaccccttcggcgatcactttggctggcatactatatagatctttctcacgaatgtatgcgagttcaatcccatcctacacgtcttgtctagctgcacatctcgaatgaacgaaatagtctggacattagttgcatgcatagcctacatacgtcgagttgacatcttgtcgacatatgtcacatacccaattcccacgagatgagaggatatgcatgcgatatgcgatgatcatgacgatttatgttgatgacgagtggaagatcaatgcaatcataatggaacatgagagagcatggaaggcatacaaaagggtttcgttcaccttgcataccacaagcgttgcatgtgaaggatacttccctccccatgatggtgagtgcatgctcgtggcactttggatgatccactttgtggggtggaggtcggtcccttccgcattctaaatctacgctgatattgcataacttacaatggtaaataaagtttgagagtttccgttgacagtagttgcactttccgtcagagtaattaggtggcccttggaggagaagctccaggggatggttcgggtggcagggatggtcaatattctccggtgactttggaacgcaagagatatgccattccatattgcaagtcaagcattcatatatttcattaaaatttacatctttcaccgtatggcagttttggcaatcaaatggacattcagcaaattgttcatgtaaaggatgttcgtgccaaaagaggtccaccgtcgtagacatgacgaaggttccgaatggtacggttgcggatacgatgaatgaatagataagggaagagtaagaaaaaatagaaaagttttttacttcaaatcttaattgatttctcagttgtggacccgtatatatatcacccacgatctccgatataaatcactcaagttgatcatcgttagctgtacgcagtaaatagaagggtttgttggcaaaatagtcagttttcaaaacttaattgtaaatataggcagtttactattcataattggagaattaagtacattacactattactctaagtgaaatctgtgtaatagaaaaaagtgggacatagaaagagaaatggaaattaccataggggcctttgattttttcttcactcagtctactctctactctctacacgctctctctctctctctctttttatactatacatatatattttttctttattttttagacacctttcaaatctaataattgaaatgcttatcaatacgaatttattttttaaattaattcagatacataaaaatctatatatttttctctataatttgatatgcattttgctaataattttaaatatattacatagacatttttatcaatagtcaattaattatatgtacacacttttatttgtacaacataataaatattcatatttataacaaatttatacaattcaatttattatttaacaacatatctcaattttttcatataatacatatatttgtatattttttactatttgattcgtacacttagttttgtacaacatttttagtgtacaaataaataaatgtacacagcgtacacttacatctgtacactaaaagtgttgtacaaatttaagtgtacgaatcaaattatgaaaaatcactactttgcaaattgtgaatacccgatacatgtacgcgtttattgttggacaattttattttgtacgttgcattagttggacataaaatacaatatgcatgtctgtaaatatttatttgcttgacggttttaatttgtaatttccacttaggctacatggaaccgtaagcggatactcggaagcatttggaagcggagaagcgagtttttctaaaaaattagaatgcatgtatatattggaagtatgtgtataaaattatataaatatctaattcataatattcataaaatataaaaatttgaaaagatattcagaataataggtgatataaatctctaatcgaatatatttgtatgaaagttcatgtggcgtagtggtaaatactcgctaatgcattctctccatccaggttcgatcctagagagcctatttttctacgttttaattaaattacaagggtataatcgtaattttagacacaacttcttcttcccaaacaaaaccctagtagtcgccgttcctctgtaaagtttttttccttcttcttcttttttgaattttaagttttgttcatcattttctcattcaacttaaccaaaatgtgaaagatctatcaataatctagaaatttctaccttaaaactgaagttttggacaacttttttcctcaccgatttgttttctgttttgtcaaaaacaccggccaataaaaatgtctttacatcaccaacatttctaataccaaattctaaaattccatataagaaaattccaaaaaattctacctntatgctacatagataacaaaaacttcaaaattcaacaaatctgatttcggcaagatacaccagaactaatgtgaaatgtgaaagtctctaactttcatggccgattatttttcttagattgactgcaaagtcaacaatcacatattcactgaataatgacttcctgtagattagtggcataaattgtaattaataaagttgatttggggtattattgattttgtacttggtagggacaatgagcagtgactaaaaatctaattatgaatagtatactgcctagttctctaattatgtttcaaaaagtgactaactcacaacttaaccctaaatagaactgatttaattagtcttttcttaaggctcaacgaaattttatattcgaccgagaaaagggggttcaatgttatatggcaaagaggttggacagagggccaataaataactcccccgactaatctttcaccggattattgaaaaacatgttcatagtagactaaagataaaaataa

SEQ ID NO: 31392 - DNA, 2802 bp, Arabidopsis thaliana landsberg
attgactattgggtgcaggaaaaaacctgatatatatatatatattgatgttgtaggcacttcttgcttatgggctcagtagctcaaggcgtgccccagatgctcttcatccgtgagtctctctagtaatcttgtatactgtatggtagaacagaacagctttctcttgtttgaagaagtacttagaccagccttttcactttgctcagctatggctactcaaaagaaagatttgtatggtctttgatatctgctgttggcatcttttgccttgggtctggtgctaccatagttaatggagtacagaacttgtggacttcttcggtaattttcggcatatcttgtgactttgacgttatctgctatttgatcttttggattattagatactctttgtacatttccttggttgttcatcaattttgactatctttctcagccacctccgaatatggaattagctgctgtggtaattggtggttcttttctaattgaaggtatcaacttctcctgatctttgtgcatcttgttatgtgaaatattcttgaagttggtcgagctatacttcaagcctacatgctgaatatcgtttgttaatctttatgtctcaaaggcgcttccttactcgttgcaattcaatctgtcaaaaaaggagctgctcaagaaggcatgaccataagagattatatatggcgtggtcatgatcctacttctgttgctgttatgactgaggtattactttatacgtggatctgatttgaacatatgtagaaaccaagtaaaggaatgttgttagagtcgttgaaaacactgttaaattgtattatgttcctattcgtctgcttgtgactattgtacatgcacaggatggcgctgcagtggcaggtttggcattgctgccgcatctctggtcgctgttagaatgacaggaattccaatctatgatcctataggatcaattgtagtcggaaatttacttggaatggtatgtctgtgtctgtgctcgccttaacttgttattatattactctatattacatttctaaactaaagagcaattcgactaggttgctatatttctaattcaacgaaaccgacatgccttgattggaagagcaatggatgatcaagacatgagtaaagttcttaaatttttgagaaatgactcggtacaaattcttcttatcataatttagaaatctcatatatgacgcatgtagaggtgggctcagaatcaaatattgtgttgtgtaggttgtagattctttatatgactgcaaaagtgaagtgattggtcctggatccttcagatttaaagctgaaataggtgcgtattttgaactgttattcgctctcaaagaattgatttgttccctatgcttgaaaataagaaggaaaaaggcaaagtcttagcgagtgaagatcattctatcgtattctgaacttcttgagtgattccattgggcactgtattaattgttgtatttaaacagatttcaacgggcagatggttgtccaaaactatttgaagagaactgggcgtgaagagtgggcaaaaatggtatccaaatttgcattctttatctcatagttgtgtctttttagcttatgaacaatctattaactaccattagtcaaatttgtggttagttactttaaaatttctgaaaattgatggtgtacttactcagtttcgcgaggctgcaaagaacggagatgattctgcaatgctcaatattatgtcaaactacggtatgcaaatgttcgacttctggaattgtcatagcttacgttccaagcttgaaaacaaactgtataaactgttgcaggtgaggaagttgtcacggctttaggaagcgaagtagaccggttagagaaagagatccaagagcttgtcccaggaatccagcatgttgacattgaagcacacaaccccacacccacagacccatctctttgatctaataaagaaactcgcttaattcaaggtcggattatcgatacattcttttgttccattctcttggcctgaagaaatgcaagccacaagtaagattgtggtaaatcctggcctcttggagaaatagaagtgttacagttgtgtgatagggaaaaatttgcaaatggattcttctcatgagtgttgttgatgttatattctatgcacacaacaacaaaaaaaaagcttgttacttgtaggaacattgagatgtaagatcgatattattttatatgtacacgatactagtgttttggtatttcgtattccgtattcagataattcggctaagacatacataatgtctgttctcatgactaaacccaaatcaaaaaacaaaataccaacggcccaaaagtccatataattgtttggtcaaactttacagtttacacgatcacattgaaatgaaaattgtagtattgttttttagtggaaacgcgtaagttgacattaagaagttgactatgaaaaattctgctgctcttttgtattttgtggccatggtgtgtattggtgtttctaggaaacagataaaccagtttgcattctaggcgatgacagaagcgacaggcctgaggcgtttcttttctaagttcatttgctgtgtgtccaatgcacaagatccatttttatgaactttaagtttatatccagtaacttggttttttcttaccatttttccccaacttttctttgcaggtgatgcagacgattcgactattgaatatgaaccatatgtgtacattccagcgaatagttactcgtatgccgaggtgacgaaaattacaaacaagtttaat

SEQ ID NO: 31393 - DNA, 2498 bp, Arabidopsis thaliana landsberg
agcccttagatctcactgtgagacacttacaacatcgtgcagcgtatgagtcaattaacgatgtcgttggtttttgctacacacatgagatcaaacagagtttaagattctgacaaacgaatcttcatgcaatgataagaataaaacattgttgataccttgtgggatgtatcttgagtagttgtcttcaccatattttaagttttgaggagatgaagagagtttttttgtggttaaactttttggttgaagtgaagtgcgactaattatctcctttggatttcgtgaacaccaacaaattctcaataatgatttgtgtaaatcaaattagatccataaaaaatgaaaaaatctctaaaataatagtacattggaaccaacgcacaataggagaatcaaagttcataaccatatctccaagttctacacatctcttgcattcaaaagactttttcggtgttttacttcgaatctcttcgtaatcttcttgtgactctataaatctcactttgagagacttacaacattgtgcagcgtatgagtcaattaacgatgtcgttggttttcgctacacacatgaaatcaaacagagattaatattctgacaaacgaatcttcatgcaatgataaaaataaaacattgtcgataccttgtgggatgtagcttgagtggtcgtcttcaccatatttcaagttttgagggagatgaagagaatttttttgtggtttggctttttggttgaagtgaagagggactagttatctcctttggatttttgtttcacttaataaactcgcctattagagtaaagtctttattgcaatagcatttaagttggatttaagtctaaaaagttgtatttaatcaagtactaatacaaaaacgttacagaagagattagatccaatagaattgattgaatatattaactgagaagtaattgacaagatattagattcatgaaaattgttaaatatattaattgagaagtaactgacagatgaagacacgtgttgaaagtatatgatgctaaatggtacgtaaagttaaaaaaacattgtcatattattaatgacgttagaccaaagaattaatttttccatattttttttttcattcgtagagcaatcttacattttgagaggctctgttatattttttagttatatattgctagcttttcctttatcgaacactttttgtatgcttctcagaactttatttcaagtaaacatccatcagcgttcaacaaaaagatagatggtcatatgttacgctttgtcgcacctacaagcccaaatactcgtgcgttcgaatacttcattagggcccacgagaactacataaaagtgaacgcacgtgtggactacatctgcatccatatgttccacagatgagtatcttttagaagagtatcttttttgctgacccttttaaactagggatttactagtcttactccaaaaagatactccgcgtacacatgaattaggtaataacaagtagaagagagatataatctagatatagataactctctgcgatacgtaagaaaaccggaaacaatttattaaacagtactagcaccatagtctagcacgtttgacacatacacgacaattattgtatgaaaacaacacttttagtgatcatgaccacccctttacttatttatgcttgactgcttgtttacacagtttcaactgcggttttagatcctttagtgcatatagtagagcatgccttggcgcatcgttcaaccgcgacattcacttttccacttgtgtctgaccaccgaaacaaaactagaatgatttctctagtaataatgttagtagcaaatatgcatttggagagcttgctttaccaaatttttggagactcgttaaggcaccacacagagaggatacacaccccaacttacaatatacattgactacatgaccttgcataaaaaataaaatcttgatccatattctaacaaatattgtatcttaaaaaagcatatacccaagtgagttcagtttttaccagagtttgtgagactcccgtaaggaaaccccgaaggacaataacccacgtaagtgtctcggcatccactttcagctgaacaaagtatctgcaaatttccttctgaaatgcaatcttcaaactccttcctagttgactggctcgggcagcaagttttttgtgcttctacttgaatttgcgagatgaccagacccattacgagtacactgaatatcacagttttgccttccatcttttgattgattacttgtaatttgataacaaagtgtatatttagagaaaacacttttagtcttttagttataagctatgtattggtcaaaactagactgacttaaaatactacttctagaatttgccacgacaagcttcatttatgtagggctctctatagagtctacacgataactgtcacatgcatggctgaccaatttactatgcacctacccatttttttaatttaatg

SEQ ID NO: 31394 - DNA, 2596 bp, Arabidopsis thaliana landsberg
ggtattcaatattcaagtatgtaacagattctagcatatagattacaagtcttaagcccaacaaggaaccagactaaaactgattagggaaaactaagtaagattctataagctagagtttgtacaaaaacaaattctagcccaggtaatgaaatatccaaatgcaaaagacaacatttattagctcagaatctacttttaaaaaagcccaaataccacatatcataagctggcacttccaaacgactctaaagtctaaagtctaaaccaaccatcgccgctgatcattgacttattggcatactacaaaatttacttgtttggagcaataatgggttttctcttttagccccacctaaaccctttttaggaggaaacctagattatacgtggccacactaaatattattctctcattaattgctctacttttaagagccaaccaaactttttgaagacacaaatattatgaaatagtaatacatttgacctccgaagtttcaacgaatgatctacacaatccatcgtgtcaaagatacaatttttttatccaccattaaaactgtaacaatacaacattactcataacattgactttcaggataatcaggctcttcatcaccttgacttgcagtttcagtctttttatctacttactgcatatatgatatgagaaatccgatttgtgtgttaatgtgacataaacaaaaaaaaatgttcttcctatatatataacaaatattttttatgaacaaaccaataataatgtgtatcagaagcaaacaaatgattttttggtgcactcatgttcccataacaaaagtgattagtttctcataaagtaaactcaataattattccatgagtatgtttatatccatataaaatttgcaattaaataatcaaacgtcaaggttcaattatagtcaaaacaagaacgaaaaacctaaccaatgtgtaatccacagattggttaattgcactgaaccgtaccttatcataccaccccaacggctatcgacatcgatttattaccaaaaaactcctcaaaactatataaaagactctactatcttccactttccataaaagggtaaaatagacatttcgggtaaccttctctcaccgtcaccacacatgcaattacactcagacaggaactcaaaaagacagctcattcaattacatcaacacagatcactccaaagcctttctctttaaattcgttatcgttttttttattttatcaatttaatctttttatttgttttgttcttcctcgattcaacactcgatgctgtgacaaagcccagattttggccggaaagttttgtgtgtttccggcgaagaatgcgaagaaaccggaagaaatctgaacggaatctaagctaaaagttaaagtacgatgtcggtgtacgacgctgctttccttaatacagagcttcgaaaccgacatcgatttttgtctccggctatgggtcgtgatcggaatcttacttggatctctaattgtcatcgcactctttcttctctccctctgcttaacttctcgccggaaaaatcgaaagccgagagccgatttcgcctccgccgccatcgctacaccgccgatttcaaaggagattaaagagatcgttccggcgcagaatcagtctgttccggcggagatccaggtcgatatcgggaagatcgagcatcgagtggtgttttcagatcgagtgtcgagtggtgagagtagaggaacagcgagtgcaagtgaaacggcgtcgtattccggtagcgggaattgtgggccggaggtgtcgcatcttggatggggccgatggtatactctgagagagcttgaagcggccacgaatgggctttgtgaagagaatgtaatcggagaaggtggttacgggattgtgtatcgtggcattttaactgatggaaccaaagtcgccgtcaagaacttgcttaacaataggtacttccaaatcttcaattttgattctaaagattggtccttttactctgtttctcaatttgagttttaggtattctttgattttgtattggtttcattctaaatattcatcctttactcaacttctagataagggatttaggtattctcaaatttccgatttgattcctttactcgtttctagattggggttttaggaattaccagttgggggttttgcaatttgcgtaatcaaagaattttatttgttgtattgcttggtattgaagtttgtctctgtttctctacctcgtcatgtaatgtgcttagatccattaagtaaatgcttgtggatatttatgtagatggttaagagtgatcgtgatcagagtccttctcttatttaactgcattgcctgtgagttgtggtcctgaaggttgttgttattattgaattctatgtatgtatagattatgtcattggtctcatgtggtttttatgggtaacgtctttactaataatagcactatgcttctggattttgatctatgtgatctgtaacatttctagttggtgcgtctttgattgccaggggtcaagcagagaaggaattcacagtagaagtggcagtcattgggcgagtacgacac

SEQ ID NO: 31395 - DNA, 1904 bp, Arabidopsis thaliana landsberg
tatagattatgtcatgggtcatatgtggttttgatgggtaacgtttttactaataatagcactatgcttctggattttgatctaggtgatcattaactagtctatatatatgcaatgtctttgaaacactttttgttgtagttaaagtctgtctgatttgtgttggtttcttattataaaggaataaggtagctgaagctaattaatccaataaagaaaaaaaagaattttctgcttgaaatcaacgatggatcttcctcctcctccagagtcttcatcaaatcccatatcttccttctctgtggtaagaaatgcggaatataattagaaatattagtctttccttttgggcttagatctttttaaatgagaagaaataatcattttgtcatgtctttttgttaatttttgttggattggatcagttattattattattttttctttgtctctattcaggctcaaaagaggatgttgctacagagatgcgaaagtaagtttaagataaggaagctgaacgatactgtcgaagaagacaatgtcacgcagatggagccaaactttacacttgagaacactcttgtttccgaaccagaagcagatttgaggcctcacacaactgagcccactactgaaggtacttactctttttctccccacactgtttacttaattttggtgttatcagttgtatatagctaaggttttgttaatgttattggttataagggttttaaagatgaaagctatggttatggaataagaatgttagtattgtgtacctgtgtttgctttcttgaagagcttttggattccttaaaaatcaaaagcttaaaacttgtcaattatgtctcatttttttggggttagttttcatttatcgacaatttgacattttgttctgttgttcacatgcatgttgtttagaagaaactcagagatcttcagccaaatcacagttgtataatttatgtagtgtgaggcattggaaagcaccactgtatgagtatatcgccgagggtccttgccatatgaaaatgtaagagcacataatttctgcactcttttcacattttaaaggttagaaatcttttagtgtcagcatcattcatgtttttcttttgttttgttcagatttacaggcaaagttacggttgaaatgaaggaggattctcggataacggttttggagtgttttgggaatccacagtacaagaagaaaatcgcagctgagcaggcagcagaagcagcactttggtatcttaagaatgtgggttatacccttcaaacagagaaagcttctggtcgtaaaggacggagtaaaccgatatcgaagatgatggtaacaggtgaacccgtgtaatgatctttgccagttagaatctgttaagggtgatcacttttgtttatgtttatcggccttaaggattagcttttgatataagctctacctaggatgctcaaaaggtcacaaaatactcatcttttatgagactattttcatgtgtacctttaacctgcgttattttttgtctatttatgcaaatgtctattttgatactttgactatatcttgcgtcaactttcctttgatataactatatacgcaagtcgcaaacttttgatggtttgaccatagctattgccaaccttcgtttggctcatgccatcttcaatgaaaattagcattttgataggtttcataagtttgatatctattctgagtaaacaaaatttggaatgagtctgtctttataacacataaaaatctactactagcgcctcgaagctgtcttatcctaagcctgcctttataccacatcgaaaattttcatcttaccccatatctaaacagttgggaatttttatatgctatgtggcgctttggttactctcgagattct

SEQ ID NO: 31396 - DNA, 1820 bp, Arabidopsis thaliana landsberg
  unsure (1)..(1820): unsure at all n locations
cgatcgtgtgatcgaagatcatcttcgtatgtcttagtatcctggatctcttagaaatggaaaataatagtcaatatgactgatgtgacttgaaataataattagttacttgaattccttaatgatattttgtaagttagagggttttttccctagtccatctacgatagcttaagaaaaggttttgctgcatgtgcctgttgttctacaagcatattaaacattcttgtcnnnnnnnnnnnnnnnnnnnnnnnnnnnnnnnnnngagctcgttgggcaaatgacgatattctatagtggaaaagtgaatgtgtatgatggaataccacctgaaaaggtaaatcaataacattatactgtccagtctgaaaatagaaattttgttggcatgtttttgatcattcatcctgtgtattggtttgcaggcccggtcaatcatgcactttgcagccaatccaattgatttgcctgaaaatggtatttttgcttccagtagaatgatttcaaagctcataagtaaaggtaagcttttgctaaagtgtctgatctgtttttcagttgatagatagatgattcaaacatgaaatgattttgttttgtgtatcatcaaactggaaaaagttcatggaccagcttttctgacgcagtagagcttttttatttattttctcttcttgcaaacactgcttttgttttgtccaactttgaaaggaggcatgggtagttgaccaaggaagtatgtctaaatgttgcattgtgctatactaccttgcgtaaaatatccaaatgcctcttgcatgtttttgtgatagtgattccactttccttcttcagagtctagtttgaattagtcaaaaatcaaattgaaaatgtgaaatcttattgcagagaagatgatggaacttccccaaaaaggccttgagaaggcgaattcttctcgtgattctggtatgaacagtattcatattaccttaatgattctcggagcgaaacttgatcaacacatcttcacctgtgcaaagctatgctaatgttgttaacttggaggaaacttggcttgcttgttgttctgcatgttatatgacctgtgaagtttattaatctaaccgtcgttctatgttttttgggtcgttcttaaggtatggagggccaggcgaacagaaaggtatctttgcaaagatatcgtgaaaagcggaaagacaggtgcatttatatacttacgcttattccaaaatcgctataaactgatatgttttcgtaatgtgcagaaaattctcaaaggccaaaaagtgtccaggagttgcgtcctctagcttggagatgtttctgaattgtcagccacggatgaaagctgcatattcgcaaaacctaggctgcaccggatctccactgcatagccagtcacctgaaagccagacaaaaagtcccaatctttcagttgatctaaacagtgaaggtaagaagagaatcatatataaagctttgttaaatcagtggtttggatgatttccctcataactctcctcgcttggtctccaggcatttaacaagataccgaaacgtggagatgctataagctgtgaataggcgttgaaacagttgcttgcttgtaagctcaaagatatgaagaaaagaaacctctcttcggatcggccttcttttgtgtttccggggttttgcacccataatttttggtctatagttttgagtagagcttagtaggttagtggtaatttcttgtttctgattctttttgtgaggatatagtcacagagagtagagacaagagaggtgaaagaagggctttcattttctaggcg

SEQ ID NO: 31397 - DNA, 2276 bp, Arabidopsis thaliana landsberg
  unsure (1)..(2276): unsure at all n locations
gtaagatgaaatctttaattgggaatttcttttggtcatatggggtgatagcatcgtctacatgaaatttccaattaaagatttcatctcacttctctcactctttatcgctcccctacactagaatcattctacaatctgtatcctgttaaactaatagaaataaaggtattaacactgttcaattctcagatataggtcaaggtatactctcaacgttaaagcaaaaaagtgtttagtataactgaatacctgaccaacagaaccaaaccgatacatgacattctcgccagacccctctgaatttggtgacgaccaatacgaatcaaacgccacaccacttacctatgaggaagctttcacataagtcaagtagtgtttgtcttacatacgtaattcactatactccaatttaagaaccttacccacgaattgtgtccctcaccccatgccacaacctttcgatcttccatactccacacttgaaccaagtcatcttcacctccagtcaaaaggtactttccatccatactgtcaggccaatcgcaatgttagcatacatttacaaattaacaacgcatgctaaaagcaacttgagggagaaaaaattaacacagaatattattttcctacaaatgcaatagggaagatcatttgtcaaaggatttagatccagttacctccaagcacaacacaatagagcaccataataactttttacaccacacactagcttttgggttgaaaaatcaaaaattcgaagataacctgtacatggtcaaaagagaaaatgaattctcaactgaaagatatatatatagagagaggaagaattggagccggcaataaaacaaaaacccatcataccatctcttccaacagttgccaagtacgctccatcatttgaaaatgcaatgctattaatcgcaccttgcccaatatgccatctcgctactggattactctgcagaaatatttgtgggaataaacaaataatagaacatgtaaggattgtagcatcgcgttgtctgagaaaatattcatgtgcaggtgtgtacagaaaagaaatgagaattctcatcttgccagagctacacatacagtcctcgaaaacaacatcgaatgaaaattgaaaacactaccaaaaacctcaggtaccttgctatattttgctttgtcaactgaaaactgtgtaggatcccttatagcagaaaatgaagaatcagttgcaccttctttattctgcaagtataataattactcaggtaaatttttttgacaaaattaggtaatgaaaagtcaatttctttttcaatatctgcacttgccttttcttatacgtacagatttccatcggcatgagcagcaacataagatccatcacctncaggcacccaagctatactagtacagcggctgttaaaagcaacaaacttaatcttattcttgaagtggataaaaaacatataaagtaattttgttctcggaaaaggaatctcagccagatttcagttatctctttatccaagaaaaagtgttctcctctgagactacatcctatcatgtaataatagtataaaagagatcttctgatcccctagactaaatcgagagttacctagagcatatatctagtaaattgacaaacgaagataactgcacaaggttgtgtcatatggcataaatacagaagtacaaaagacaaaaacaagtgagaatactgacgattgctacaccaacatatgggaaccaacaagattgattatttcaatttcaaaaaatgttaacaaatactagaacaataaagcagagaaagaaaaaaaaagaaaagaagtttacagaaagaaaaaagcttgcctgttatttacagaaccatctttgttataatgctgagcactaacaagcttcttaccaacatcctgcaactgctgtcttagtgatacggtgtagactacaataattcaccaaacgaataaacaacaagacaaagttccatcaagaacataagtaacaaacttaatctcaaagttgaacattaccatccccagagttcagcccaataagtagatcatgtccatccttagcatctggatgaaatgcatggcacatagggtttgaattgctgatatgtatagactttactggatcctaaatcaaataatttctcataaatgtgacaaacaaccagcagatcaaatcaaatcttaagaaaacaaaacgagtagaggtaagattaccttgtcctgcgagttcaagtcactaataaggatagcatc

SEQ ID NO: 31398 - DNA, 4693 bp, Arabidopsis thaliana landsberg
ttttttttttttttctgacaaccctagacaatactcgtgtacgtttgcctcataagctcagatgtcataaggggtttgatctttgcgtgcatcacaatccttcaataattttttaccttttaccctaaaatctcgtctacacgtatcaccatatttgtcttcaccaagtttgtttcactatcataatcagcgatctcttgacacatattgactagtccttgttgcttattatcctcaagtgaagccaaataagccacgcacactcggtgacaccttcaatgtttgccatgtgtcatagtccatgcaaatgcccacttcattttattaagacgagagctatacaaacaccgtctcttcttattcacttgctgctagttataagaatcagacagaagttgcagagaaaagagaattaattgattggtgtaatggagaaggcagttcatttatccaccaaaaatggacccaaggttccaggagagccaacgaagaccggaacctccatggttgacacggcagcttcagccgtacaaagcttcgctccgattaaccaaatccaccaacatctctgcgcgtacgcttctgaaattgttaatcttctcttttcattttatctttaaacaagaaataaagaagaggatcggaagaatgagggataatcataacagtataaaacctacaccacattttttcgtttaatagatctgtcaaattcttgtagtttagatttaaaaaacattgtattgatatcttacgtaaatcaagttaatcaaattttcttgaatttttaatcgatgtgaacacgtgtggagttgtgtacatgcatgcagaatgaaacttaactatttcatatgagtttgtttgcatcagtaaaaagatgaactatatatatcctctcctttttgcgcttgtcataggtttcatttctatgcatatgacatgacccgacaagtggaggcacaccatttctgtggtcacatcaacgaagacatgcgccagtgtctgatctacgacggtcctgatgccaacgctcgtctgatcggtctggagtacattgtgacagagaagctctttatgacattgcctgacgatgagaagaagctttggcacactcacgagtgggaagttaaaggaggcttcttgttcatgcccggtgttcccgaagctattcaacggcaagatctcgaaaaagtcgccaagacttatgggaaagtttaccatttctggcaagtcgatttggggcatcagcttcccattggcttgcctaatatcatgatggctgttactcgagacggacaactttatccggaaatgatcaagggtacgtagatttgtcatttataggttatgcttagtcaaatatgcttttatgaaagttaacatgaacattttgaaatgttcaatgggtgaccgcagagacggaaaagcaatttggagtatcgatagacaaggagcgagagtcaagggcttatatgaagggtccagaccatgggatccatcccttggcaaatggaggaggcaaaggcctgaagttggagttgcgagaggttgacataaagccggttgagtccgttccaagagtcttcgtttaagttatacttaaatagacaacttaagaagaataaataaataagcgatcgagcttttcttttgtatagccctcctcgaatcatgtgtataagatgtaaaatacacttgaagtagtatattatggtgtcgtctagtggttttaaatattacgtcttcatgactccagttcattatcttttatgaccctgcgggtaatcgttattataaccttagagaaaagatgataatactatgaccaaatggaaactacaaaatttgttgaatcacactatgataaataaaggccccagtgaaaagaaaggaacagaagcgtagtcttgtcatgtgtgtgtataacaaatgtaagacacttgaggcattctggtgagcgacgactgcatcttctttatttgaacttgtctcaattgaaatggaagaacagagagacctctgtgttctcaagattgaacagccaatttctgaagatgttggaagaagacttgaagactgacatcatccgtgaagattatatcagagcctgcattcatctcgcttgcattgttgtatgttgctgacggatttagctttgctaacagaaaccttgcctgtccattattgccatacgtattacagaacatcagtaaacactaggcaactttcagtgtttcacacttgaacaatcaactacaaaattcagagatgaaaggggttaaaaacactgacctgggatccatgttgatcacaaacaactaatcttggtacagggaaacgatcacgaatgatcatctgcgcatcttcttgaggggcttccaagagttgggcaaatgccttgacaaataaagaggtcagacgagacatgtaaggctcatattcgagaaaatccaaggccaatgcaacttgcatattcattacctggtgttcaggctgattttgatatcccaagttgcgccactgtgcaatggtcattccatggaaaacgacaacactaatgtaagaatccaacaggaggatacggtctgcaccaatggaagcaacatccaacaatgcaggttgaggtagtgagttaaacgaatatgttgttagagatggctgaatcataacagctgcgttcgaaatattttctcggcttaatagcatgcggttgtaagcattttcgtctggactattgttgaacacctgccaatttcaccacaccatgagtacatttaaagatatatatttaatacaacttccctaacgtcaagcttacctgcacaaactgtgagcgtcggatattgaacttaaacttacggaatagtgaaaagtttggatttagagtaaatgaagcatgatcatccttccggtaatcaccaaatttataacaaatacgaataaggttccggtccagccatcgtgtagcatcaaatccctcctgaggaaacataattgacagaaattaatacgtttgataaccaaaatccacaaagtttgggttaaagcaatggtggaaagatattcaaattatcgaatgaaaatccacaatataaatgttttaacattccaacatacaaacaacatttttttcttaactttgtcccaatacaatataagaattagcaaaaatgcaaatcggtagaaagtaccaaggactgtagattcaagaatctaagtttgaaagttcctcaatttaaaatttacctctgtttccattttcaaggaagctaatctggccacaaccacagcagcagtttcttgatcaaaaccttgcaccaattcctgcatatacaacacacctcattagcatacatgtacacgtacaaagaaaaggttaaaaggaccataagagtatgacaatgggaatgtggaatacaaacatgcaagactagatttcaccataaataagggcttataagttaaacattacagaaacgttgatgcatactccagaaatctaaacaaacttgacagtaacttagaaaactgttttctccaagttgatgaagaagtgttaataaaaaaggaaatgatgtgtcaacgtatcttaacagaagcaaactgtcagccaagctactaggaagatatgagagcataagaaaaatataaaattcttgcctaactagagactagtcaaatgaatcatttacccagtgtaatcctcacactgaccattcaaatagctaaagagactaacgagaatcaaagactaaaaaatgcgaaaacaatggaccaggacatattcgatcattcttgggaaaggaaacccataatgaagtagccaaatgcaaaaatatctagaaactaatctggaaatgtggaaagtactaacctctgtgctaagaccagtatctacccattgtctggtaacagtagtaactcgctgtaatgttttaccttttgaattttggtagctgcaatcatatatttcagatcaaatttctattatttggatgaatatacccaaacccagaattgcatgaagagcataccttgtcataaattgtaaatatagttggttatttacacctccaggagcacttgattgatcactagaagaaagatcaaagaagactgtcaaacaagtccttttatcgaggccacacatcttccattgtgtagtattcccctccccaataactgtatcagcaacgctagggcctttctgcaatttttccaaaaaagagaggcataactgttaagctatctatcattatttgaaaacaagaagatcaacttctgagtatgggtagcttcaaccttttgcaaagacgcacaaggtccaataatcccttggatttttatgtcctttgaacagcagatctcaagtgtaccactgaaatggtagtatgaaaaagagtgagaatgcgactaactgaagatgtcttagatgcaacataagacacttggaaaatttaatttagcatgcatggacaattgaaatagcacgaagaacatcaggctatagcaacaactcacttgaaacaaaggccgagagactcttcgccatcttcaaatactcgcttaaaagaatccttaaatacagaatggccaaaactttctgataaaacaacaagacctccagttctttcaaccgcagctttcatttcagcaacaccaacctaacattcaaatcacagatacataatta

SEQ ID NO: 31399 - DNA, 4504 bp, Arabidopsis thaliana landsberg
aaagctgttgttggaagagattttgtttgaattaaacgcagtagcgcatcttattgtatcagaagcagggaaggtggccaaggacgaaaagtgctagaggcagaggcccaaaccatatcatcgatcaatcatgcaagagatttcatcccaaaaaaaaaaagaaagaagaagcaaatagtaaatctctgtactccagacaaatcaccaatgcaaataaaagacttccaactatgatgtattttatgtgagaccaaaataacaaagagctctaaaatagtacaaacgggcatgcgggtaatcaggaagatatggataatttaagcaaaaaacaaactgggactgtgactactttgctcaggattgcacggccagtttctgaagatgttcaataaagacttgcaggctcacatcgtcagtgaagattatgtctgacccagctgacatctcgtttgcattgttgtaagtcgctgatggattcagcttagccaataaaaaccttgcctgcagtatcaaaggatgtaaagttataaaggaaatggtgatgaaaaccatcagatcaaatcccacacagataaactaaaaacatatgtgaatgctaacctgtgatccatgttgatcacacacaactaatctcgggactgggaaacgctcccggactaacatctgggaatcctcttgcggagcttgcaataactgagcaaaggcctgacacgagacatccgagatttaggatatcatagaattaatgatggtataaagatgtcacaaaatgagaccccatggtagagattattgaccttgcgagttgctacaacccacattatttcacttgcatataaatggaaccagctctgaagagtattgtttcaaaactagatgtctcaatttggatttctaccctaaaccgatgtcatgttaacaacccaactcaaaaggacatatattttatagctacgaaagtgtaaaatgatggtaaaaaaatgcttttacaaataaacagtcaattactggttcaaagcgtgcattacctcatgttcaggctgatgatgataacccatgtttcgccattgcgatatagtcattccatggaagacaacaacactaaaatatgcatctaatagaagaatcttgtcagctgcaatggaagccacatccagcaaagctgcctgaggtcctgaattgaatgaatatgacgtcagagaaggttggatcatgacaattgcatttgaaatgttttcccggtttagcaacatgcggaagtatgcggtttcatcaggactattgttaaagacctgccaccattccaacaccgcgaaagaaaacatgattcaactatgtaggccaattacataaaggcagatattgatgaaatctaaaaacggtagtctacctgaacaaactgtgaccgcctcaggttaaacatgaattgagggaacaatgtaagatatggtttcagcgtaaacgaggttggatcatcctttctatattcaccaaattttgaacacagacgaatgagagtccgatctagccaccgagttgcatcaaatccctcctgaggttatacataatacactgcatacgtgagtatatgacaaaaataaagtagacatcactaaacaaagtacaagacatgagtatatagcaactgttacttagagtttcactatgagcctcacacagactacaaattattggtataaagagatgaaagctacatctcatacagccacaatagttcctcaaacaagatgctacagggacaactgtaatccacctcaattagttgtgggaaaagtaaagttttacttcctttggacatatagatgaacatttggccaaagatcctgaaccctaggtaaataaatatggccaggagaaaagaacccatattttaattcatcaaaagcaatatgagcttaacccttaccccaacagcacaaaaaatttaagtcacggtcaaattaactcacatattgtaagcaaagaaaagatgatgtaaggtacctctgtttccatttttaaggaagttaatcttgccataaccactgcagcagtttcttggtcaaagccttgcacaagattctgagaatgtatacagcaaccatggtaagaaaatgtttgcttgccagaaaactatttgaacaccataacacatttacatgaatggcacataaccctgaccacggttattattgattccatgacaatagtaaaatgtaaaagaaattggctatcaagctggtactagcattaacatgtggataatatctcaaaatcatgcaaccaacatcatgattctgagattcacatgatatgaatttgccgcaaaacactcatgggaggctaaggattaggaatcatataaaataaagcattaggaatcatagtatgttatacagtaacggcatccaagggatccatgtttatcctaacaaacaaatttttccaagaaagaaagatgtaagtcccgttgaaatcccaaaaaccaaagctttttttgctttctattcacagtaaatagcttttactaaattacaccagtgagaaatggaaattaatttttggttgaccaaaatgagaacaaaaaatgataccatgcttaacaatactatcgttaacaaaaaaaaaaaaaaggttactatcgttaaccgcattttcacttggcaaataataatacttgctagcagagttatagattataatcctaacatagcaacgctaccaaaacataataaacagtgctacggtaaaagagctagtagattacatataaacccaattgcgtataacatttgtataaaatggtaagtttggcagaaaacaagactacctctgtgctcacagcagtatctacccactgtctggttaaagttgtaacccgggccaaacttttaccttcagagttttggtatctgcaatcgagtcaacaacagtaaatccaatgcttctagatataaagtaatagcttaatgcagacagataaaaagtttaacaaatgaaggaaaattagagacaaacaaaagctgcaagaataccttgtgataaactgcaaatacaactgctgatttaaagctccaggagcagttgacccggttgaagatagatcaaagaatacagtcaagcaggtactcttgtcgaggccacacaatttccaagcactggtattcccctctccaatgactgtgtcagcaacattgggacctttctgcaaggcatcaaatgaaaataaattaaaatcaattaatagcagatagctttattcattcaccaagcattaaaaatacatcttgaaataaaatggattctaagcactccaggtaaaaccttttctaatgatgagcaaggcccgataaccccttgaattttgatgtcttttgaacaatttatctcaagcgtgccactgaaaatgaaaggttcggagttagtttgcactaaggaatgcaaaatatatattatcatagcatacaagcagtattatgcataatgctccacaagaaagggtcttaattgccaaaatattatttatcttgcaacaccaactcaacagaagatataatagcaaagtgttgacacagaagcagagcagaaacatacttgaagcagagaccaagagagtgctcgccatcttcaaacatcctcttaaaggaatctttaaatacagaatggccaaaactttcagacagaacaacgagaccaccggtactttcaacggctactttcatttcagcaaccccgacctaactatacccaaaatgcaacagcagaaacaattatagttaggtatcgtatcatgtgatggaaatgatagctaaagtggaattttttgatagatacaacaagcaaagcctatcaacactgaagttaaaaagaaaacatggtattgatataatacgtctttcatgaggcaaaggaaaacaatgtgaatagaaaagcgggggtttctgatatggcttgggaaagcatattttctatagtgttaaaagaaacaattctgatttctagattaaagggatgttctaaaacaatcaaatagattgcccttcaaaatttcaaaatgtatgtaacagatatctacaaatggacgctcttttcgtgcgcaactactaacatctgcaaaaataatcagaaggaaaagaatagaaactggtgatcacaggttagttaaacaactcgagtacaagtaagagctttcacaattggtgtgcatcaacaatgtcaaattcacctaacaatttagtaactaagaatacatattcaagatcatacacataaaacaacactttcagagagttaatgaggcatggcattcattttagctaaaatataacagcgacatagacaaaattgaaaaatcaagcattgcaagaaactacacatttatacctgaagaacaaaaccagagtttgggcatcatgccaacaagcaaaccataatcccgacaattaatacctgatcaagtgaaaaaaaaaaaaggtctaacacatgaccctgagcgacaagctgc

SEQ ID NO: 31400 - DNA, 683 bp, Arabidopsis thaliana landsberg
ggagccacaatgactttagcttgctcctctaatgtgaagtttgcccatttgaattcagggttgatgttgtctctgtacatctctaggatctcgttgtggctcaccacacctgggtttgtgaagttccagattcctttcaagtttcttttcgccatctcgatggagattggtaataactcgtccaacacagtcatgctgtttgggatgttcactactttgttgtacctggagatcttggtgatgaagttgcgcgggttgtttagatccgaggagatcggcatccttaccctcaatgtgcatacgttgtcatactcctttagcagctcctcgacctgtaacacattcataatgaagattagcatactaaaaaagaaggagatatcgataaagctagagtaacagagcaagaattagttataccatggctttggttttcgagtagaaagagccagtgaagttgggtgtgtcttcctccttgaagccaattcctgaaccttccggatgcttgtcgtcatattcgaatatacaaccagtagcgaaattcatcattaggagtccgtgctctctgcagacatcagctagagtcaatgtgccagctacattggcacggatagtctcggtcttgtgagactcacaccagtcaacattgggtctcccagtcacaccagccggattgaaaacat

SEQ ID NO: 31401 - DNA, 1347 bp, Arabidopsis thaliana landsberg
taggccgacatatggttctcccggtttccctacacgggctcccaagagggacagcggttgcaagctgtgtctttggggctacagacagttggcacgcagctcttgcagcagcagctttgataggatttgtgggacccatatcggccataggatccatattagcagggatagattacagcggactggaccacgtgatggtggtggcgtgcggtggattactacccagcttctggcaggtgattaagagagcagtgaggttagagagaaggaaaggcagtgtggggatggtgctgggactagcgtgtgcggttgtgtgtctgactttcacgagacttgtgtgcttgcacacaccctactgcaattctgcacctgaggctgttaggtgatgactccttgtgaacacacacacacattctcttattccatgttgtaagatatgtatacttcaataccctgacttaactcgtgtctatacaaacttgtcggatgattggttgaatggaaaagaggatgtcttgtactcttaatttggatatatgattgggtacagatcaagtagatggggctttttctagctctaatctactgggatctaacaacaaaacaacacttttgacaatagattgtttgtgtaatgagggggacgaattactgtaaggggccaacgcatcattagttacgtaatccttcaaaactgatcaaatctaattcttgtgtttattttgaccttgaatttttctaccaacaatcacaatcgtcacctacataatttgcttcaatcaggtttttattaaacaataaatagagagcaccacaacagaatgaagtttttcacatattcgataagtaaatcattcgatctttatttgtaatttataacctttttattgacttattatattcatggtaactgaaaaagaaaacaacaaacttggcctaacaatgacatccaataggatggacctaagaagggattcatcttatttattccaacacaaatggtttcaactcaagaagcctatgaactggcgaaaaacacacaggaacaaaaaccttgaaagactaggatgagattcaatcatccttctctttctctgaaatctctgacatctctgtcttctcctccaccgactgtgatcccgtcatccttgccaacaaaacaaacgacattcctccagcaacattgtttgcacacctcaaaactatcacacttgtcttaaacaccaatgggggcaacacctttgccagcaagaactcaatcccattcaacgtttggtaccttgcattcgcactcactcccatatgagttgcccaagttaaagaattaagcacagtcggtggcggttt

SEQ ID NO: 31402 - DNA, 4058 bp, Arabidopsis thaliana landsberg
cgcaggtcgactctagaggatccccctgttattgttttaccagagacgacgaagacacaagggtttcagaaatggctcgatttgataaaacctcatggttcatgaattaaaccgggtacatcacactctaaattacggtctaaaatcggttaacagagcaattgtatggttcgtatgtcaaaacgcagccggttcgtaaatacatttgccttgataaattttcacctcttttgggtttcttctactagtcttcacttccgtcagctatagctttggagaaactgcatcaatggcgttgagattgacatcgctaaaacgcgccgcggttgagtcctgtcgcattttggaaacccgaagcttcagtcatgtcgctgcgatgccttcccccttgaacggagcttttgatcgcccgatttctatgccgccgctggttttacctgagttcgatcagaatcaaccgggtttgatcgaagaaaagagcttcgggttcgggcttcctagttttgcttttaatggatccatggagctaatggctgtgcctaagaagaaggtcaaagaactctcagtcccttaattagttttctcctttcgttttccacttctgaaatgataaaatttcttagggttttgatttattgtggtatctagggttagcttttttgacggagtcagggtttatctagggttttaggaaggtgcactataggacttattagttgattatgcaattgagatactaagtgctagaatgcttcttctatagaatctatctaagaaatgttgtctctttgtgtgtttttgagtgtccattgtttttccatttgcttgtgtatctttgggtttaagttgatttggttccttacttcctttaggttcacatgtgaatgaaaatgtgtaatttttaatggctccttggagaatgatagtgttaattgaagctgttcttgatgaaacatgcagatttctaaacacaagagagggataagaaatggtccaaaggctcttaagcctgttcctgtgatcatccgttgcaggtaagagattagcttctcttctttttttttttttttttttccgcagattagcttctcttcttgttttatctgtttgatgcttcttaatatatccattaggttgagtttggtatgggtgtttagttttgaggctgtgatagaaaaattctgttaggtttatctaggttgttgttgctgcagcaacagctgaagaataaatgcatatgctttgtgattcattgtctctcctaactatcacttggtataaactgcacttgagtaactagaactgtgtatcgttaacatgtttgacgaaagacctacttgtgtgcaacatggtacaaaatatgagtctagttgttcggttttggtatatgtttgatttaaaacttcttttgttttcatgatctcattgtgagggcacttgtatcagaattttatatatgccgccagtttaagtgcacactcttttgtgtttccaggagttgcgggcgagtcaagctgccacatttcttctgttgcagcggtgagcggctaaaccctactgagtaaggcaattcgaacaactggtcatggtttccaatatgattactccttgttggatatcaagaggataaaatcttggctttcttagtagtacactagaatgataaaagacttagttgatgctgttttggcaaattattgtatgctgcaagatcaatattctcatgcttctcttgacaaattatgttattgtcattgcttgttgcaaagtgtaggattatctcattcacttttatttgtgctcttagatttggattcaacagctaaatatattcgaaatggataaatatattcacgtgaaaccatctatacaagcttttgaagctctcgtcatgtacgctcgctgtctcaataacctcttagtttactcgagtgtcatttcaagggtaatttttggtttatcatagtcaaagtagctcgtgtttggtagttttatggactaattttggtttgagatctgatttgggcacattgtgatagcgagcacaatgataaccctaggtaagatagttatatccgaagcctcattgtgctcatttccttctctttaatgattacaaacagagacaagcaagttctaaacaaaattgaaaccccactctttggagaaaccttgattagatctaatctaagagttaactatctcgatcttcctcctcgttgtagttgaatggtaacggaactgatttgaatgctctgaactttcccacattgttcaagtgttcattctccaacctgtgttcgcaagtcgtcaaaggaagaacccttgagtaaaaaatggtttaaagagaatttagtgatcgtgtcgtggtcaaaaatttacctgaagaaattccagataccacgacgtatgatctcaagagcagcaagaagagcaatcatcgtttctcgatgtaagaacgataaattgaaatcaagcacagtctgcaaccacgccatcctcaacacaatgtttaagacctacaaagaagaagaggcagaaacaaaacttataaggaaaccatcaatcaggaattgtactgttcttttgattttcatagttctcacgattgcaacgtagtagacggctttgtgaggaacaagaagcttctctctcaacaaatgtttagatggtctgtgaagtaatccccaatcaaaaacaatgtcccaatatgtgccgtaaaaagttgccaatgccgagaaaacccaggcagagattttccagatgtttcctctgttaaagctgtaagctgttctcaagcaaacagccacaacggttaataaatacttgagagcattgtagccttgacttgaatcattctcttcgatcaatcttcgaacacactgaagaaaacgtgaccagtaaggtatcacagcaacgatgaagtagaatgtactgtatacatcgcttgatctgcaagtattttgcctgtgcttgaagtctccccaaccatagtaacatatgtaaaactccagactccttagtgcttgaacctaaaaaaaagaaagttgattaatgagttgaaacattttgaaaacatataaatgggagttagaagaatgttatgagaacacacaaacctgacttgttaattggtctgccaagaaaaaatctggaagattaacctgcaaattcagagtaaaaattaagattttttatcgatgttttaccccgcgtaaaaaaaaggatttgcatgagtatattaccttgtagagtggcgcagcaatgcagcggaagacaaccatgaggaagaagacgcggcttgaccgataaaagatgttgaaaggacagaacaaaatagctaccactagctgcaaaacatagtacaaacgaaatgtgttactacattagtaacaaaatgtacttaagattctcgtggttattatgatgaacaacttacagccaaaataaacatgggaagaagttcagtcatggttttgtagtcattagtgttaggatccatctccatgtcaaggtttattagaacagcgcagagagcaagcgtgccgagaccaaagcttagaagcagaacatgtctataaccaagctctgttccttctttaaaaccgaatataaacggataattcactcgatatcgcttccaaaagtatatgtttgaagcatacatgatcatatgcagaaccacaaatgcaaataaactgaaattatggtacaaaaaaacatttcttgtcagcaagaaaaaaatgttatcaattagagagttaaactatatatatatgttttggttttgaacctgtaaagagggaacattgtctccatgtagactttatgtccaactgcgcccattatattacgagcatggataaacatgactagagctaccactagagagactgtgcaaccgacgaaaaagcctgacaaagataagaactaatttgaggaattctgtttaattagtcatgaactaatgtaaataaaccggtttcgatttgagaaatttttttagttaccagtggaaaacgttattcgatgtttttctttctttacttttggtctta

SEQ ID NO: 31403 - DNA, 7065 bp, Arabidopsis thaliana landsberg
  unsure (1)..(7065): unsure at all n locations
tgaaaggaaagccctcattaatcctagcatgcagagacattataacttttggcagcaattctcccggcattctcgagtaactgaaaatgataacaaacgttaaagaacacatgaaaatctcatacaaaatccaaaagtagttgcaaattttaataagaagataacattagctaaacggagctgggtctacgcatgtattcatgaagctttcctaattcacttactcaaatgtaaatcttaatcaagagccattatgggtttataataacggatatcaaatacctttaaaaagatacaatacttttacaataaaacgaatatcattttaatcatgaggagctaataaaataaaacacagaagaaatgtacgtacggtgtgcttgatattagaagcaagaggatcttgaacagctgaatcaacaatctaccatgattatcactgtgaatcaaatgtagaatgcctacacccatacgaaaggcataaaaatcttggttaacaaggaataactaatagccagacaagaagaaaaaggttaagacaattaatgtcgttgaaaacctgtgtggagttgcattaatattagaccaagggaattggagaggggcataaatgatccatatttagtagattccttgtactctgccacttgaaggaaaatagatgaaggcccatccatcatggtggcaagagctgacgcagatgcaatccttacctagacattgcaaggtaaacaaaaaagtattgtcaggattcagcagtcatgaagttgagccacaaaaacatctctagacatacttgtttaaccataaaagttattgggaaggtgaaaaatgaagaacagcatcgaaatatgtgcctcaattacttgaaaagggacaagaataaccaccttcaaatgaggatcaaaaagcaagcaggtcattagagtagcttcaaacttcctgttaatgatctcggaaagttaaggagacaagaaaatactacggtatggtgacaaaagatgttgtaggttaattttccaccttggcttgagtacatcacttgttggaaagagagtcacccactgagtggtaaatgactttgaatcagcctggcaaagatccttaacaggaaaaaaagaaaatgaataagtaattgtcactgaaaagttaagtagaagatgagaaccaactaagaataatacattgttactcacctgtatgcaaacaattgcagctattctaaccttggagctttgggcaaaataagaatccggtacggagccgtcactgtcactaaaatcggaatctgatgatataacatcagaactaccagaatcatgagcagataggcgccgccagcttgaagacactggctgcctagtgttcaaatcatccctcttgcgcaagtggggtggcctataaggagtattcttggcattcttacttactccagaaatcaatggagaaagcttgacattcaaatgcttatcgttgtgaacaacatcagaaactgataactgaggtgggccagtaagtccaaaacagaaaaacattctcaatgacgctatgaaacttaagacctgcaacatttaaaaaatctgcttaaacaaaggaaaaaagtctgatatggaggttaaaccagaaaatcacttatccaaggctaagaggaggagcaaagggtatcaagaacccacttacgtgatcagaaacaggacatttgatatttgtaaggacctcgtgcacacagcctagaaggcatgaataaaagctgtagaaaattaagaaatgaatattacctaagagggcaacaagtctaatagaacccagaaaaaaaggagtaaattgtagtctccacaaaaccaaaggcatatacctccacatgaatcggtcttcgacaagctggcccttagatgctaatacgtccattactttccttagaacctatatgaaaattcaccaagttgagaaacaaagcatatgagagaaatgagaggatcgatcagtgaaggggaagattacctctagcgtgcattgggagacgtcagtaggaaacaaagactcagatagagaaaatgctctaccaaacatgtcaaaggcaagagccatggaatcccataagcgattctgttgaggcagtttcttttccacaagtaaagtaggagaagggtcttgatttgagaaaccataggataaaactaaatcctggtgtaataaaggaactacgcgcacaagaaacttgactagatgaatgttctccggatgcataggggccaaacgtctgggaaaaggaagaggagattacgaataaggtttaaacaatgtcagcaagattgtgagaagatatataataaccttaaagtctcgaagcattggatcacaggttcgattctggagaaataggcagcggaataaggtgaagaaggcatgggttggcgaagaagaaactccaagacagaagcaaaagagtgaagaaggagcggccatgacgaagaatttagttggaaaagtagacgagcacaaacatcgtgaatctggattaataaaaaggaggagagatcccattaataacaaggaaatgatgggaggagagaaggagaagacgcaccagttgacaagtatgacgagagacagggatccagtcaggaccatcagctttggaaaccaaatcgagcaggaacaagcaatcggaagtgagctcgtgcagtgggaggtgagagacggcagagataagggaatgggattgagagaagagtagatcctcgagcaacagaggaaccggcggcggtggagtggttgagatttcgtccctgagagagagaaacgccgtccgccaccttcccacgcttgacgaagnnnnnnnnnnnnnnnnnnttcagtctcccgggaaaaaactaagcaatcaaaaacgagaacgacgagagacagacagagagacgcttaatagtcttaaagggatttacatttttttaatttagagttagaaatcaattgtgttacaggaaaacatcttctccacccacttcactagttgatgatgttcattgctgcgtttagcacatcaattctttatttttttggggtgggcagacgcagatctcttcggcccaatcaataaatatatagcaaaaggaatagctcgtcttgtcatatcatatcatcattcagacatgcaacgaataaatacatatccgtgctcaatcctcaaaaacagaggagtgcttacaacaacaacaactccagaaacttaactagcaacatttgatagacagaaaaagtagcaagaaattagaagctccgagtcttatgttttaggaggaaacgcctgctccgccccacccttgtttgttccttcctcttccattttcacacttgcttcctccactcccactgggtttactcctgtaacctgcaatcaaaactaaccactttagaaaaccaccattcccacccttttcagccctgtccactgcttcattttaccttagtgcttccactctcatccacctccacctcacaaccttttccacgctccataattcctttcagtccatcctgcacgaacaacatgccatgataaataaattaatctcggaagaaaaggagacggctttaggaattgagaggcagagatgattcagctcagcttggctagacggtcacactatctaatcaggtcaattgttggagctgggagcatactaaataaatagcctaggctaaatgatttaaccgtagctaaagattcgctaccctcatgtgaatgtatctccagcttaaactaactgacttaatgtcagaatgagactcattctggaatctttaggttttgggtctcgggatgagaaaaagtgtaatgttatcagagcacattgtgctgttctggaaaatgctgtaaacctagatgaactaatgacttcaaatgtttgtaccataaaaagtgtctgagaaatcgaaacaattaagagataatgctgtagtaccttgtcctttgtatctggttcaacagcttctctttttactctgcttggtataggtttactgcacaatgcgatcccacattaagtaaacattacaccgctgactcgaaccaaaaataaaaaggggaggaaacatatatatttcataccggtcatcatcaacatccatgtctgaatccggatcccatcttttatccccatcttcttggtcttcatcaacctataatttacatagaaggcatattttacaaaactaagattggtaacaaccagagtcatcaatcaaggaatacttatacatatctaactggacgaacattatttaccagcccagctgtttaaattagaaaattcttattgtaactgcagttacacttagataagctcaccaaaacccatgaggaaatgcaagaaagaatgggcaacagaaataaaggagccaacacacttcaaatgatttgctcaagtggcatacctcgggagtctctgtatcaggtggtctttcctgaaatggtacacttggagcatgctgaagcttagagagattgtggagaaggtcattgcgaatctcttcaagcatctgacgagaattcttattttccatgttacttggagcaacgtgaagtgtatagtctggaccaaagtattcataatattcatgctccggcatcttgtcttcaacttcaactccaagtgcaactccagtctgtcatataaacagtttgttgtaataaattcaaagaaagagaggcgtcacagagggctaaccttggtacagagaccaaggaaatttcaatgcaaagctagagcagcataaaatgaacagaagaaagtacctcgtagcaccagcaacgggcaacattgcggatagtgtaaccaccaccacccaagagcagtaggggaacattgaacgatctcataaatttgacgcactcagcatgacctttgattgaaagattaaagcaccccaacctatcaccagacaatgaatcagcaccacattgcaataccacagcccctggtcggaaaatttccataactttccccatgatgggcttgaataacagatgatagctctcatcatcgattccatcatccagtggtacattgagagaatagtactttccgctaccataacctatatcctgaatgtgacctgtaccgggaaagtaatcaccaaatttatgaaacgagacagtcataaccctgtcagtagcataaaatgcctcctccactccatccccgtggtggatatcaatatcgacataaagaacacgctgcaaacgagagaggaagagttagagattcagaaacgacataaccatccctagcatatatcaaaacggtgcaggtggacaaacctcatgctgcttaaggagctctaggatagctaagacgatatcattgacgtaacagaagccagaggcctcgcacttcttagcgtgatggagaccaccagcccagttgatggcaatatcgcagaggccgtggttaagcttgacagagccaccaacagatcctccagcataggtctggcaaaaggaataaaggccgtcaaagacgggacagtcttcaccaacattgaagcgcttaagttggcgaatctgatcttgctgggtttcaggggtaatgctgcggagaaaagagacatagtcgtcggcgtggaagcggcagagatcacggtcgcgggcagggaagggcttgagaacctgcatatgctgaaggagaccgtagtgagcgaggagggcatgggtcatgcggatgcgatggggcttcatgggatgaccttggccatagtagtaattgccgacctcagggtcatagaaataacaaactttcctcttcacaccatcaggtccggacgccagcgaattgccgccagtatccattacctctgcacgcacgccgatccataaaaattatattattaaaaaatgataactaaaccctagccgcggagtagctgagccatggacgcgtttgaatgacaacaacaacactttttttaagttacgaaaaaatcaaatctagtgtgcagaagagacaggaaggcgagtgaaagatattaaaagacggcgaggctagacagacgccggaaaatggaatcacgcagacaaggaagagagtctgactgacctttttcgtaggatcaacggtgtgttgtagatcacagtcgcagtcaaatggtcggaggagaagctgcgatgatctctctctctctctctggctttcttcttcctttctcctcgccgaggggaagggagctgctctctgctttgctttcagattttctttcacctctgactgaaactgtagcctacttactcttctcttccaactttttctactttcattttataatggaaaggcccacttttaatctgttatggtttaaaatgaggcccacttttaatgtgttttaaaaataaggcctattaagttgcctttagcccgtttacttaatggtcttacgcagagtaacaaatcaattaggaaacagagcactagagcagcagtaggcactaggcaaggctggtaaaactaaactcgtgctgcttttgtctctgtttagtacagtatatcataaaactgagtaatccacaaaatcttgattgaaaaggagatggagacaatatgtgcttggaaactaagacaaaatacatgttaaataaagaatgggtgtgttaacaaggaagctaggctacaagtatccaagtagatggagaaagatacagaaaaagaagaagatagagagatacaaggtggaagaggagtgtgcattattgacattttgtgtaggaggagttggagccaatacaaatgatctgcagagggggcaagtgaggtggccacggagaagccaaggttctatgcaattgatatggaagagatgagcgcatctgggaagatgggtcaccgcatcctcagcctcaaactccaccaggcatatggggcagcaaatttcctcctccttttccttgtccctaaacatcactcccactaggttgtaaccgtcatcatcatgcgcatccgcatctccaccattcttcttcaacctccccaagggaatgcacacacatgtgtagaatactatggctgctgtgca

SEQ ID NO: 31404 - DNA, 5100 bp, Arabidopsis thaliana landsberg
  unsure (1)..(5100): unsure at all n locations
ccaccataccgccctcagcgtcaaatataaactcttcaggtatttggtcctgttgctgctcattttcattttcttcattgctttcatcctacattggttaatgatttctactttagaaccttgaacgtgtgttcaacgagagaataatgtgtactgcatccactgacctcttcttcttcttcttgttcttcttcattttcttcttctccagattcgctattttgtggaggaggtggaggaggtggtggttggttttgttgttcaggtggagtctcatctagtgatgaacgaggaagaatgaccagctcaacctattgaaaaaatggaccacatttgctaatcaataactggaggatatcataaatactccatccaaatcattatagagcgtcattctacattgctaatcaaaaatttctattaagatgttcaattatagacaaagacaatacaaggaaagtgaaagtaaacgtaggatgactaattctataagtttatgacttgcttgatcgttctgggaaagaaaacaaaaatgaatgagctagagaagagtacttacggcctttctgaggtcatcgattgtgactttttctcgtccttcaattgcagctaaacacttcgccacacgagctgcatacaattcggcgcggtgtccctgtatcataaatttgttatttgggaaaggagtattaaacgattccaggtaatcatcgacaaaagatacgccatgagaagtaactaccaagtaaaccaaacgcagaaatataactatagtgatatgatcataacttggtgaaatattacaatcaacagcgcaacaaaagcatttgatgccaggcccttctttttccagcgttgtttctaaatcaaaacaactctatctagatgtatctttctgcctgtggtgagccatttcttgagccctatactagttgaagtctataatcgtgacattatgttgcatcattgcatgcatcttgtcctttcttttcgtgtttatcctttttcttccaggaatatgttactaagtgtatttcttccattaacaaaaaattacttcagaatttttgctcaatacctggacaccacctcggacagcttccaaaaccagatacttcaattgctctctacttatcttgacatctttcaaatattctctagccaatataatctaaagtcagagaaaatgcactggattatgatcgagaaaagtgggatgagaagcatagcatcccatcaaatttttactaatgaggccctttttttcttaattcatttgaagatacctgcgtctttgctgtttctgtctcttcatttaccattctaaaaacctcattacagcgttcctgaaactgtgtggcaattccaactgctgcgacacgatcttcaaaactcataggtaggtctgcactgcaaaggttaacatcgtgatgtaaaaagagaaagaaatgggaattacccaaaagaaacaggcaatatttatcacacttgatttataaactccagtagtaccttaaattaatggcaacacggtctagcaagtgctctcgaacagcaccttcttcagggttataggttgcaattaaaagtggtttgcacgggtgcctaaagctgattccttctctttcaactatattaacaccatccgtcaatacattgagaagcaaattactaattccctcatctaagagatttatttcatcaacatacaacactcctctatgggcttcagccaaaagaccaggttggaaaacagttgtcccccttttcacagactcctcaacatcaacagacccaatgagtctgtcttctgtaactcctagtggaatctgtgtgacataaacgacaggaaaacctaagtaaaaagaaaaacaatttcagaaaaattgtaatgcctcctaaaactaaatgtacctgaatgaaaggagatttgacaatctcagtcttaatggtattgtcagcattgtactctatgcgctcatctaagtcatcttcccacctacatatatcacaaaaggtacaagccaacagtgtaagaattaaaagaagaagaaaagcaatttctttctcagattgtaagaatcttactcatctggacaagctgggtcagcatttgatattgagcctacaacaacttcaataggagggaggatttcatgaagccctcgcgccatgactgtttttgcagtgcctctacgacctgaaatggcaatccctccgatttcacgatcaaccgcgccaagtaaaagagcagtttttatgccttcctacaaacaacatttagttaaagcaaacaaattacatcctctgtgaggctttcggcatctaacaagttgaacaaacaaatgtaaaagtcccataacacacagttcactgatgaaaaactgaagctttttcctatacccaactccaactaaatcaaattgagtagaattatgcaacctgcagaatcaaattgcaaattctctgacctggccaacaactgcggccaaagggaaaaactgtcggccataggaggtggtatccgtctccgtatccgtatctgatgtggaggcagggacaccgttaggggattcgacggtagcattcgcggaggcacgtacagtgaagcggcacgaggcaattctgtttcgtttggggagggagagaaacagaggcttaggtaagagatcagggaggagattgcagcgaaagagtctgcaggttgaaactggagatgatgacgcgaccggagtcatcgccattttcaaagataggagaagaagaagaagaagttaagagagtgtattttctactgtatcaaaccttatcagcttacttttgcttctctatcttttgtctcgtcatcctttcctgattgcagcactatccacattaagatttcaataaaatgtctcaaaatttattagtatgaatttctaatatgatatttattgttttataaatttattaattaacctagaaaaataattaaagaagtttttcttattaattggagagttacgtttttattcaatttatatcttttaggaacaaatagatagcgaaggattaaattttgcataataaatcatgaaatctcaaggtttaattaagtcaagagtatgggaaatgcgaattcaatcgcttggatgtagtaaacaagtggtaactaatatagaccacaaacattattagctttgactataaaattgatcctcaaggtgaaaagtaggctaactcctataaatctccaaggcaacatccttaattttgagagtcattcataagaagaattgtgttcataactttttttacttgatcagaaaataaactatgcaataagtaataactaggttttcaaaaggcataatcatctgtacttctttgtatatgaaaattaaatatgcaaatgcaactaaaggttttgaatcatctttttgtttaattaagactttttaatgtaaaccaaattaaacacgatatatattcaaaatgaaaacagaattatcaacgctgctgtttctcctgacttaattcttgactcgtctccaagcaaattaaagcgtccaaatgagagatttaataataatcaaagataagtaatatcatcaatgacgaaatagtcaacataaaataaagtttattgtgatctagtcgatgtctactgtactttctcaatggttatactattattggtcccaggctcctcttgtagcgtatgcgaggactaataggctgctctcatggctcattttagaattgtaagtacgtttcgcttaagtctccttctccatatggctcttcggaagtactagtagatcacatgctctacaaagttttataccgtctccttcaagacgtatgctaagcatgcttgtgcgagtgtgcatctcccacacgtctctcgatcgtggtagttatctatgtccctagaatatgtgttgtcaaacttttattgatctacgcttgccatcatctcatgcatgcatgtgtctcacatttattatgatcgtcaaatttaaccacgaatatggagcaaacaagagacggatatggtccttgtaaagattggcaatcatagtcaattccatgaacctggtcctcaatagcttatcatatcttcttgttagcctcttatacgctaccaaaatgatagctgaaggcaaaattgatctctccaaactggtaattatatattgtgatgttcttgttgggaagtgtatctacctactctcctaaacatttggattggctatattgtttcgatttgaaaaaaataacacgttgcttttgtataataacattatttgtatagattacttggtacgtaaagttttgaagaagttaatttaaattatgttttcggtggaataaatatataaatccgaaggctgactgactttacacgttcgacaaagttttatggttaaactaaaaaaatgagaaaaagctagagttaggtttagtttaaatgtagttttcgttagtcttaataaatgcaagtaagatagagattgatgcacatgtaccttgttgtctctgcccacttattattacacagcgtcggtgccagtattgacaacaagcttgctcacacattcggatatgtgtctttttctctccaattacaaatttgattggttcgatttttacaaatttgattggttcgatttttcaaaaaaaaatttccaagtccaaaggaaatttccacggaagcgcaaatcaagttttgcgtgctaaatgaaattcaaagaaaatttgtagtccatatgaataaaaattgaataaatttgcctaattaggttaaccaatcttgtaacaagaaaagggcaaaatgggaaatatagaaaatgaaataaaaatgtgtcgttgttgttttgaaactatggagaagaagaggagaggcaattatataaaaaccgactctcatatccacatatatctctctctcacccaccttatagaattttctcgccctatttttctctcaacaccaaaaatttgtattttttttactattgtttaccccaaaaagtattgagaatcgcanaaaaactgaattgtaaaaaatatttgagaaagagaaatacaaaaaaaacaaaaaaaaaagttttaaag

SEQ ID NO: 31405 - DNA, 1079 bp, Arabidopsis thaliana landsberg
tactttgggtttctccatttaagattatttggattgatttgtgtctgttttaattaaggttcaacatttaatattagttcgattgatttgtctctgtttcactatcagagaaatttagatcagttggaagcgttatcgaaagaagctcaaggctaaaaccctaaggaacaaagctctttctcagtctattgttgccactaggttaatcccatttttaccatctcaatcacttgttattgtgttttgtatgcgaacaagaatttgatatgtcttgaattcatttatttttattggtgtttggttaatgattgttgtgtatgtttgtgtttccagttccaattgggttctatggtttgcaacattacctcattgttgggatcattgattttggttccactggttattgttcctacaatgggaggttcacatataagtgtgattcttttggactctctactttgatcgatgaggattacatttagtttcatcatttttgattatctgtttttggattataggaggacattggaaattatcaatggaaataatgtaagtttgaaagaagaacctctttcgctatctatgagtaagtaaaaactcttttctactcttggtatttgggattatcctgtgtttgtgtatagcaagtggaatcaccttcttctttttttctatgctttgctaatttgttaaggtttgtttttgaattaagatagcattacatcattgtgattaatggttgaattgtgatagcattacattagctaatagttatgttatgttttcattgaatgctagttaggtttagtttaagcaaatgctctatgtgattgattgctctctgtgattaaatcaacgctttagaataatatatggttctagtacctcttaaaaggtatatgcctaaagaatacattattggtatcagtttgcagatatagtggaataacagctgtgatgatggagggagttacaacaccacttaaagatattcatgtaaatccatatcttttttaaacgcttattacatcatgtattggatggttgaagggcacactcttaatggccttgtataaata

SEQ ID NO: 31406 - DNA, 1958 bp, Arabidopsis thaliana landsberg
attatgattgcacgtgcagctccctcatgatatgcttgaagttcttccgtattacccaaacactcacatctagaacaaatcagctatccatagaaaaaagaagaattgctatagacaaacgcagaataatcagaaatgccaagagtagaaaaggatgttttcaatccacccttgcctagtgcagaagtcttcctaatgacgatttgttatttctcgctaagtaaaatttgccataaaagttgaaagagagctccaacaggtgacttgcatgatttttacaacagattaccctaagcagcaaaaaattacgaggctacattctgaaataacagctacatttcgatagtaacatcaccatatcctcaacggaacccaatgactgacattttacttaatcatagatagcagaagaggttcttctttcaaacttacattatttccattcaaaccttgaaactctggagagtttattatagccaaagccggagccagaaagacaaaggaaggaccttgaatcaaaggaagcctcgacccaaacgaagtatgcaacagtgtagtgattccagagacaaaaagtacagtcgatacaacatttgcaacctcctcctataatcccaaaaaaaagttgaaattacatttgcaatcatcattgtccaaagtagagagtccaaaagaatcacacttacatgtgaagctcccattgcaggaacaataacaagtggaaccagaatcaatgatcccaacattgaaaggtaatgctgcaaaccatagaacccaattggaactgaaaacacaaacacacacaacaatcattaaccaaacaccaatataaaaaaaagaaactttaaaaagattcagtcactatctgacatgaaatccacaaatggaatctatcaatatattattaattaccaattatatataagtcataatcaagagaatcaataacaatttaacaaatagtaataataaaaatcagtactaaccaagtccaggagtatctctaagaccatacttcatatgcaaattcctagccactaaatcatcatccatactctgaggcaaaacctcaactgtttcttcaatacgacccggtcttctaaccgggtcacctgacccattagctccatcgggtccatttgatcttccaacaaccccatcagaatctctccttctcttaaccggttgatccttaaccggaacagcaacagaaccaggaggtggtggtggtggcttctctttcttatccttgtcagtctcaccgttagttactgcggcggagacagaaggaggaggacggagtctggtttgaccagcttcaagatccggttgggtttcttgttgtttagctctaaccggtaatgagagctgaccggaagaagaatcagtggcggtagtttcaccggagaatttgggacgaaatccggtttttttagcccaggaagacggtggcattgcggcggattctggagttggtggccatggacccggtttaggtccgggtttcgggtcggagcttgacattttttttccttgtggaatttcttctcagtattgcatagtgaagattgaaacttttttctttagatctaggaaaactctcaatcgtcggagaaggaaaacgacaaaagaaaattgggaattagggttttcttcaaatctccagagagagtacagttgtgtgtgagagagagtgagaagttctatgaagaagtaacagtgaatgtgaaaatgagagagagagagaggaaattaaatctaatcttttttttttttgacaataaatctgatttaacataagatttaagatattaaacattttttctgttttcattttttttttcttgtggtatatatttacgtcgagtgatgcaataaatctatttatatggttagaaagtagagtatatcctgaaagacaagaccaaaataacttatgtctttttttctttctgttg

SEQ ID NO: 31407 - DNA, 3533 bp, Arabidopsis thaliana landsberg
tcagtcggcggtgaaagaagatttgggaacggcggatacggctgaggctcagtacgtgatggcgaagacctcagtatggtgggatatagagaattgtcaagtccctaagggtcttgatgcacatgggattgctcagaatattagttcggcgcttaagaaaatgaactattgtggtcgggtctcaatctccgcttatggtgatacgagtggtatccctcatgtcatccaacatgctcttaattccaccggaatcgagctccaccatgtcccggccggtgaattccttaaacccttttatggttttctaaatctagatctactctctttttcctttctttttatttgtttttttttttctgataataaagatctgctagtgagcttgaatgttgttgatcgttgatgtatgccttatgtttcttttcattcttgttttttgttaacaactaacgttgtaggcatttataatcattggttgtattatttcacttctcaatcgaaatcgttttagggttttatactgtttggtttgctgttgattttgactacctcgatcgttgttattgatcaaagagtgttaatcaccaaagtgtttcgttttccttttttttttttgtgtgtctcgatgtgttatttcaggggtgaaagatgcgagtgacaagaatattctagtggacatgttgttttgggcatttgacaatcctgcgccttcagatattatgttaatttcaggagatagagacttttccaatgctcttcacaaattgagtctgagacggcacaatattctcttagcacaccctcctaaagcatcagcgccgctaagtcaagctgcaacaacagtatggctttggacaagtctattagccggaggaaaccctctcatacgaggcaaagttaaaacctcacaacttgttgccaatgcgtcaacttctagtaatgtcatgagtagtcctcctcacaatcagtttcctgatcctcctagatcaggtcctttgcatgctcgtcagccttacctaaaccctgatccttttgtgaataacagagatcccaatgctgccagaccaggaccttctaatatgcggccactttgtcctaatgctatccgtcgtcatcgccaagagaagctggaacgcgctctccctctactgattttattggtctttatgtttatgatacttgcaactgtgaactcaaattaaatgctgcatgcaccattttcataataatgagctgtttttggctgttgccgtgaagatgatttgcttggagctgcagactacggagaacttaatcaactcagaagttaaatgctgcagccactatgtctttctctttattgattcttttctttctcagcttgtgttttcgagcttagttgtgtgagtatttaccctgatgtgattatacgcaattacgcattgttttatctccatgggagaaatcacgattttgaattccgacgaatgattttattgttatatatttttatataatttgtttaatatttataaccatccatatatttttcttgtaaatcctaattcatcatcgacaagtttagcacaagggaacttcttttaagttttagctacaaacattcatattcgataatgccagaagtaatgtacattgtcactcaaagaacaagaagtgggtacattagtgttatgcgtattatataatacttttaaacaacataatgccacaatcaatgattaaagtagaaaattttgctagaattatctcatttattaaaaaggacggctttccgaaatattaattttaaccaactattaagatgtcgacaataatcatttgttttatcaacttgtttcttattttcatactaccacgttaataaataggcttagcttaggaaatttgaaaaacaaaattcaccattttcaaatatttatatgtaaaatttgaatcaaacaaaaagtatatagaaaaaacattgactactgtattagataaaaaaaaaaaaaagatttcaagggaagttaggacgtaaacgtcgtgacagatggaaaacagagagaagtttcttcgtgaaaaacaaaaacggtgagtctttttcgttgaagttgaagtagaagtcatcatggtcaacgtcaactacaagagaacggacgtaaacgaaacggtgcacgagagcgtccactaaaccaaccacagtatcacaccactactcaaccgatgccaacaaggcataaaccacgactctccaccaatcaaaacgcttcactttttctttcctaaactacccttcccctcgccgatactgtagggacaaaattgtcaaagaacactcgcttcatcatcagggaaatataaagggaagaacagaaaaaccttttcggctaataattgaaaaatcccttattcgaagattcctttggcgattcgtagtagtagcttacggcggcggaagatcgatgtcgacgaactcggcgagtgatggggatttcggaactaattcggtgccggcagagatggctgaggctcagtacgtgagagcgaagacttcagtgtggtgggacatagagaattgccaagtcccaaacggtcttgatgctcatggaattgctcagaatatcacttcggcgcttcagaagatgaactattgtggtcctgtttctatctctgcttatggtgataccaatcgcatccctttgaccattcaacatgctcttaattccaccggaattgcgctcaaccacgtccccgccggtaacttcccccttttaaaactatctctattacttagtttctgtatctttatctgcttggttagatttcaattgtgaattgattgtttttcttttcatgtgtatggttactgtttcaggggtgaaagatgcgagtgataagaagatactagtggacatgttgttttgggcgttagacaatcctgcacctgcgaattttatgttaatatcaggagacagagacttctcaatgctcttcacggattgagaatgagacgttacaatgttcttttggcacagcctctcaaagcatctgtgccacttgttcatgctgcaaagactgtgtggctttggactagcctatctgctggtggaatccctcttacacgagccgaaagcttactacttgttgccaaccaaacgaccccaaagcctggttcagagattccatcaagccaacctctggattcaaattctgactccaggagagtctttgacaacaaatccaaagtcaaatatgttccaaaaccatctaatcatcagcctaacaataattaccgtcagcaacaacagaatactcaagggaaacagtttaagaaagccccacatgagttctttggcactagcgagccatctgtttccactagcagacctcctcctcccaatttaccctctagcaatgttaacactttccctggtaatgtcatgactaatcctcagaatcagaatcagtacacttatcctcctcgccctggtccattccctcatagacaaccttaccctaacactgatccttctggaataatgaagcagcatccc

SEQ ID NO: 31408 - DNA, 6762 bp, Arabidopsis thaliana landsberg
cctgcatgagtaatggatgatgagcatctttggaggatacatttttgtccttggactctgctgaggattcatctgattttgttgccagtagcggaacaagttgggtctccaaatttggtttaaatccatcactgttcactgtgctaaacaatacaagaataacaaaacagcatgaatgagcttcaaaactagtatacttccacttgatggaaaatgcattagcctaaaacttaactagacaagctcatgaaagaaatttaccgatcaagatgaatggccaaagtgggcactcttagtaatggccttttcactttgacaagcctatgaacaaacgagccatcactggctctcacaattgctcgccccgcaacactcaagtctcgatcaaaccatgtgtgccacaaaccacctccataagtctgaacattcaccatgagatagccagacttggatgaagcagacttcggtttaagtttaagacacgggctatcggtgtgagcagctatggcatgaaaaccattaccaggaacatacctacaaaatgaggaacaaatgtaggttccctgaacccaacaaataaggaatctaaaaaaaacacgatttttgtgaagaacccttcaattatcaaagcatgaactagttccaggattcattatcaaagccaaaccaaatcttataccatggaagcataattggataggaagactcacttttctccgacagcaaaagcaaccaaacaggacatgtttcgtgtaaagaagtaacggccaccaggtttcagattccagtcttcgttttcactgaggagatcaaacccagcagccaaaagctgtctcttcgcctcagctgccagcaaaaagaaaaagaccaatgagagtcgtcacttaaagttgaataccgaaaagaaaacactttttcaatataccagtggcgtgaaactgtgtccaggattcattaagataatccagaagatccccaacaatcgacgcattagaatcactccccggcgatctcgaatcgcgatgggaggtgcagaggattggagagacggaggagaaggagcgaaagggagagcgatggagataagtaggaaaagagagagactgagagaggaaggatgaaggattgaagatggagggaagagaatgagttagtggaagacgagctatggccgccattaatttcgctccggactctaaagatgaggtcttcttctgttatctctaaagtctaaaccatccgccgacgaataccatccgccggagatttgaagaccacttcgacttcgaaaaccggattttgtttcttactgtgtccccagtcttctaatcttgaggagctgagctgagggccatggcccatgaggattatatgggctatggtgccacttctatgggctttgggcccatgttctcttcacatgattttatttggaccaaagaacctttgccttttatggtccacacttgcatcattccaattttattgaacgcgtgttaaggacgtgtctttatgtattgggccttattaggcttcagtacttcgcccttgggccttattagacatgattacatgaaagatgatgacattaatttgccaaaagtctttatctttattgggtctccgtagactttaccaaaaggtgactgcaacgaagcttcgttaatgggttccacaacgtcacctacttgtttacttccttttgttttgtttacttcgttgcttgttactccactcttccttgccttttcttctctccacttatctctctctctttttctcatcggcctttgccatggcagatataatcggcagcgaacttgtgacggagctcgtgaggcagctctatgccgtttctaaaaaaccctcagatgcagaggcatcgccaaaatctcgccaccatgatcgatggttttcaaccaacgatcaaggagatccaatacagcggcgtcgagctcacacctgatcgccaggctcagttgcgcatgttctcggaaaccttagacacgtgtaggaagctcaccgagaaagctcttaaatgcagccggtggaacatggttagacagctactccatgttaggaaaatggagaatcttcagagtaaagtgtctagctttctcaacggtcaattgttagtccatgttctcgctgatgttcatcatgttcgagccgattctgaattccggttcgatcggattgataggaaggttgatagtttgaatgagaagcttggttctatgaaactcaggggaagtgaatcgttgcgtgaggcgttgaagacggccgaggctaccgttgagatggtgacaaccgatggtgctgatttgggggtgggattggatttgggaaagaggaaggtgaaggagatgttgtttaaatccattgatggggaaagacttattggtatctctgggatgagtggttcagggaaaaccactcttgccaaagagcttgcccgggacgaggaggttcgaggtaatgacttttctttgctggcctctgattccatatcgtttgttaatttgcttggtacatctgtgtgatctctatcgcagtggctttgtggtgtttctaaatggtatattttgttggtttatcttgatgatcatgcttctattgttttgttgtatagttgagttgctaaaattgctttcatttactgcttttatacaggccactttgggaacaaggttttgtttctgactgtgtcacaatctcccaatcttgaggagcttagagcccatatatggggatttcttactagttatgaggctggggttggtgctactcttccagaatcgaggaagctagtgatccttgatgatgtttggacaagggaatctctggaccagctgatgttcgaaaatattcctggaaccacaactcttgtggtctcacggtctaaactcgcagattctagagccacttatgatgtagagttactcaatgaacatgaagcaacggccctgttctgtctctctgttttcaatcagaaatcagtgccttcagggttcagccaaagtttggtcaagcaggtaattggtctgctttaggtgacacatgcatagtagcaatgttcttttttgctttcagtactcatattgtattgactctgtttggtaggttgttggggagtgtaaaggtctacctttgtctctgaaagtcattggtgcttcattgaaagaacgacctgaaaaatattgggaaggtgcagtggagaggctatcaagaggtgaacctgctgatgaaactcatgagagtagagtgtttgctcaaatcgaagcaactctagaaaatcttgaccctaaaaccagagattgtttcttggttctcggtgctttccctgaagataagaagatccctcttgatgttctcatcaacgtgttggttgagttgcatgatctcgaggatgcaactgcttttgctgttattgttgatttagcaaacaggaatctccttactcttgtgaaagatccaaggtacggttggttataaaactctttatgatctgatctcttgtagccactttcaacggttttattcgttcttagctaatgtaattaccatcgataaattttcaggtttggacatatgtacactagctactatgatatatttgtcacgcagcatgatgttctaagagatgtagcacttcgtcttagcaatcatgggaaagtaaataacagagagcggttattgatgccaaaaagagagtcaatgcttccgagagaatgggagaggaacaatgatgagccatacaaagccagagtagtttccattcacacaggtaaggatttgttacacgaccatcttctaatgaataatttggtttgttactagaataataaagttttgatgtggatttctgttttattttacaggagaaatgactgagatggattggtttgacatggaactccctaaggctgaagttttgatactacacttctcttctgacaagtatgtattgcctcctttcattgctaagatgggcaagcttagggcgctcgtgatcatcaacaatggtatgtctcctgcgcgtctacatgacttctccaactttaccaatttggccaaactcaagagtctctggcttcagagggttcatgtccctgaactctctagcagtacagtgcccttgcaaaacctccacaagctgtctctcatattctgcaagatcaacactagtcttgatcagacagagctagacattgcccaaatcttcccaaaattgtctgatcttacaatagatcattgtgatgatcttctggaactaccttcgaccatctgtggaatcacctctctcaattccatcagcataacaaattgtccccgcatcaaggaattgcctaagaatctgagtaagctaaaagcccttcagcttctgaggctatacgcttgccatgagctgaattctctgcctgtggaaatctgtgaactgccaagactaaagtatgttgacatttctcaatgtgtcagcctgagttctcttccggaaaagataggaaaggtaaagacacttgagaaaatcgacacgagggaatgcagcttatcgagcataccaaactctgtggttttattgacttctctacgccatgtaatatgcgatagagaggctttatggatgtgggaaaaggtccagaaggcggttgcaggacttcgtgttgaagctgcggaaaaatctttcagcagggattggctcgacgattaggttcgtgattctctccctccgagcccttagaagcatgttgtataaaatacttaattgctaatctgtagcaaagtcttgtataatattatattttatgagcacactcaagagtcaagagtcagtgcaaacttcgttcttgctctttctccagaaatttatctaactataaaatttccatacaagaatcagatttatgttagtatcattccagattcctttattagagtagcttttgagccaacgccataattgatttatgattttatttcaagaaaatgaaagcgtgggtgccaagacacctttgccttttattgccacaactccacacacaaatgggactaacacaacaaagaagtatccgttgaaacacaaacattacatcctctagacgaccacggctttctgattttggcgacatccttctgtaatatcttcttatggtagccagttctttgtatcgcggtagaaaagtcgtttgccataggtggaagaaatcatctccttgagaagaggatattgcaacatcaagaagagaagcgatgggaagctggcgagtggcttcagtgggtatacaagcgctggcttgtgacgcattgacgcggaaagcgacgtgataaatgcaacaagcattgatgcaatagagataaacagaatggattgacccaatatcatctttctaggaagtgatacaatgaagtcatcaaaagagtatcttgaggtcagaatgctgaggaatatgagcacagagatgcaggaggcgaagaaggcgagagtgtctgtgaaaatgaacgctctgaaatgtaagtcattaagaataagaggtgaacccgaagttccatcaatacctccaggaacagtgaatatggcttgaaaagtgacagttgcaatgagagctgccacgaagctacaagcagtggcagtgtatttcatccattcttctccttcttttcgtagaggttcgtgataatgttcgaatatttgtcgcggggtctttttgtcctcgtttttttgcactacttcacgttctgataccaagctctctacttccttaaaccattgagactctctttgcatcttgagagcagctccagaaatcttagaaagttggtcgggagtagagagacgaccggcgatatggagaatgttattatttcctttgtcgtaagatctaagaagcgtgacctttctatcatctaaaccatgtatgagattaaagatcttctctttcttgaattcaacggccagctgaaagaggtttcggccagaggtagggttcgagatccaaagaagttgagagtcacatttgataatctcgatgaaaaattccctgttcccactctccaccgcttcaagtagtgcttcatagactgtttctttccacctgatctcgttcttggccatgatatctcgtagtgatgtgctcattttttgtagcaagctacgagctttacaatgactatcttttagctcatatatttgctttattcctatgttaaaaaaaaaggagttcatcttatattgattgttatggaagccacactaaatagcagaaaaccctaatatatgataaaaaaaaacatatattcatcacatatataattaactcatcatgtgaatactgcactgagtgtgaccacatagttaaatctactaattaaactactaaatgcacgtttaattaacgtcatttcgaaatgatgcagacatgtcctgtctatgtgaactctattgtagcatagatcatagatgcatcaactttggataaaaattagaccatagttagacttacgtaccaagccatttaagaagactttggggtagtgtcatacaaaaaagacctgatgtaggaaatagatagaaacttcaagtcgaggtcaaaagataaagaaaaaaaaaaagatagaaacttcaatgtgtgtatatatagcaaatgtttaggaaaaaaaagtccaaattataagagtgtatgtaagtggcgtacgattgtctcggtttggtctcggattctcagatacacgtatacctaccaaaggaagaaatttaggatgtct

SEQ ID NO: 31409 - DNA, 1555 bp, Arabidopsis thaliana landsberg
tctatccattgattaaggcatggtaaccactttggagtggtaatatatccaaatgttggaagagatttttttctatgttgtgtcttttaaaagataaatcacaaagttcacgtgaattgatttgcattgtggagagtcaaaatggttaaatgttgtcattctaagattatttttggagttgatggaattggaaaggaagcttatgtatgaagaattggcggacataaaaactggtgtggatgttattttctataaggccatgtttagagcataatccatcttgcaaaactcttattgctttaagaggttcgactaaacaacacataaagctgaccaaatattaaaaatttctgatttttgatggaccatttataagttttagcttgaaaagatttagaaaagtgttagatcctctggttttgtgaactgtcaataaagcccacctttcttataagctttacttgtggctaaacttgttattaaatatatctttactggttggatgacttcctcccaaagcacattttttttttagattcacaaagatagttaaaaagattatttttagctaattctcctgaaattaaactttacaaactaatttttttcaatattgattccaaaaaatatagaacctttggttataagactcaaagattaattagtacattcataaattttcttgttatttgcacccctccaaattcacactgaaaactaagtaatataatgagagaaagaaatttaactttttgaacgcaaacaatactttatgattaacttgaagatacataacgaaaatgatggatgatgtagctatggtgggataactaaacaacgtgaaaaagaagcattatttacaaagtcgattgaaagagaaaaacagttaaacataattttgtgtgggaaaaaaaagacaaatatagtttggtttcgtgtataacaagaaacaatctatagtccccgggacggagccggaggcggcggagacttattgtcgttctgcatcatcacttggagaatggaagccacagtctgaatcaaagtcaacacgaggagaacaactgcggcaacggtggcagtaccggtccaaagatctttgaaataaactcgccgaagagtgccgacagatctgttgagacgattgtcgtagtgtttgttgaggttttcgactacatcgctatagtgagatccgaaatccacgagccctaaacatagcttgtttaccatttctgtcactgattcttgatgtcctaaccagttctttacaattcctttcaacgtaaaatttgttacaaatcttagaattgagagaagaagaaaaaaaaacgtcggtaacttataatatgaatatccaacttggtacctttcttggcgagcaagtcaacgtcttgatcggtattgatgaggaaatccaagaaggagatgtagtcacaaacaaaagtagttcgagggtaatgacattgctcgagtgccattaaatttctcacgaccctctcggtgttgtcttccactgtgaaacaaggcatttttcaagattccgtctttgaaagta

SEQ ID NO: 31410 - DNA, 1102 bp, Arabidopsis thaliana landsberg
atactactgtctaaacctgcacttgtattccaattttttgctactatgtacaacttgcaaaaaattgcaagtcccgaataaaaaatcatcccacaatagtaagttgtagagttttaaagatctcatcgttttaatgagaagttcaagcggtgaagaacctccaagagatctcttcctttctcaacatgaaacacagcatggcttggttcaatcaattaaaaggagttgctggatgatgttgctgcatcctttgaagcatccggcacccttgctgactgctctccacatgggttggttgctaaccaagtccatggtcgctctctctaccccggaacatcttcaagactcaccaaactgtatcgctgataagcgtgcaacctatgagttcggttaccagctcaaaagcacagttcgcaacctctactccccttgcggaagcacttgccgccttctctcagacatatatcaggatgtttcctaacaatcccttcttcgggacgtttgggtcgaaaactcttgatcatgacccgttctggaaaataaggcctattggctccagccttaccgataacagctcctacctgactattccatcgattgtcaagcaagcattcaaaggcccagccacgtaggtgttgttgcctaacagatatcaagcaacgactttcattttattttattttgtatttggatagcaacaattattcctgtcggatttgttatcgttttggtgcatttttcatggttatttatgtttcgaagaaaagtaaaccagatcttatttagatttctgcagttttctgaaggaagttttttctgtggctttatatatgtatcgagtgattcggatccctctgtacaaatattcaaccgttttagaattgcccacggaacactacaaggacaagaaagaacataacgaccaaaaacgaataagtccctagggtgagagcttaaagaccgtgaggaaggtttgtggttgcttctgtcattagagtctcctctgctccatggataaaccataaataaagaagaagaaattaaataaaatcaatcacataatggacttataacaaaaacaaaaattggtgggtttgtttta

SEQ ID NO: 31411 - DNA, 1383 bp, Arabidopsis thaliana landsberg
aatgagcaaagctactgaaacgaggacccgacgtcgcattggtacggatatgagttaaaccgactcaattcctttattaagacaaaccgattttggttaaagtgtaacagtgagctgatataaaaccgaaacaaaccggtacaagtttgattgagcaacttgatgacaaacttcagaattttggttattgaatgaaaatcatagtctaatcgtaaaaaatgtacagaagaaaagctagagcagaacaaagattctatattctggttccaattatcatcgctttaacgtccctcagatttgatcagctgcgagaaaactttactcatggaaacacctgaactatcatcaacactcgattcttcttcatcaaaccgtccctctttagctacagaaaagttaacactcgtgtctccatggttataatcattgaaccgtagaggtaactcaccgatcatgtttgtgctgtcttctggatcaccatcaacgacagcttcttgtagctgcaaagcgtattcaagattccacaacacatctcccattgatggtctatcgactccatagtcagctaaacatttctcccctgtttcaccgaactttctaagcgagtcaggtctgatcttaccccgcagtgacgggtcgatgatgtgttcaagctgtcctttcttctgccatttcattgcccattccgctagattcaccatttctctagtaagtgtcgggtctataacaggtctcgcgcagagaacctcgaacataaccactccaaaagagtaaacatctgatttctctgtgagctgttgtcttctgaagtattctggatcaagatatccgaaacttcctttgaccgcggtactcacatgagtctgatcgatctccggtccggtcttagacagtccaaagtctgcaactttagccatgagattctcgtcaagcaatatgttggcggatttcacgtctctgtgaatcacgggtttcgcgtcaccggtgtggagataatgcaatcctcttgctgatccaatgcatatctcaagacgttgcttccaactcaagctaagaagacctgaaccgtaaaggtgactcttcaatgttccattctccatatattcgtaaaccagaatcatctcgttattctcgtcgcagtatccgatcaaagaaaccaaatggcgatgacggaattgtgacaacatttcgatttctgtcctgaactctgcaagaccttgctgagacttaggattcgctcttttaacagctacttttgtaccatcgtgaagctcttccttgtacactttaccaaaaaccccccaactccaattgcttcgagtctttattaaaagcctattttgtgggccctctttaaacctgcttccctaaagggaatttcga

SEQ ID NO: 31412 - DNA, 6662 bp, Arabidopsis thaliana landsberg
taattaatttattttctgtaataatgtgtcggtccaaaccctgttagtttacgcaattaataccataataatcacaccacctacgatgagttaatccgtaacaccacaaattatatctcaaaactgtttctatctaattcaaaaatgaatcaaacatccctactcatagcgtacacaaatgattaactaagaattaccaaatcagtgaaaatcaactatatttaatagaaagcaaaactttttgaaaatgattgccaccgaatcacaaacaaaatcaggtttaagcttcctttggtttcccattgctgttgacaaacttcgctgcctaatgatttcacaaacactttctctttcacttacctttagtgggaaaaaaatacgaatacagagaagtgacagcaaaaacccactttctagtttctccatctcttcttctctttaatatcatcaaaccaaaacctttctcaaaccttccccaaaaaagcttcactctaatggcgtttccaataaatctaacccaaacccttctcttcttcttctgccctcttcttcatctctctttcgctgctttcactccaactgataattatctcatcaattccggttctaacaccaatacatctttcttcacaacccgttcttttctcagcgactcttcagaacctggctcgagttttctctccaccgatcgatccatctcgatttctgacacgaacccatctccagattcacccgttttgtaccacacagctcgtgttttccccgtcggaggatcatacaaattccaagtcactaccaaaggcactcactttatccgtctccatttcgcgccttttaaagcttcgagatttaacttaaggtctgctaaatttcgagttttgattaatgggttctctgtgattaacagtttcagtactagctccgtcgttgttaaagaattcatactcaaaatcgatgaccctgttttagagatttcgtttttgccctttaaagcttctggatttgggtttgttaatgcggttgaagtgttttcagcacctaaggattatataatggatcaaggaacgaagcttgtgattcctaactctgctcaaatctttagtaacttgtcatctcaagttcttgagactgttcatagaatcaacgttggtggttcgaaattgacgccgtttaatgatacgttgtggaggacttgggttgttgatgacaactatcttctcttgagagctgctgctagacgtgcttggactactcattctccgaattatcaaaacggtggtgccacaagaaagattgctccggataatgtttatatgactgctcaggagatggatcgagataatcaggagttgcaggcaaggtttaacattagttgggggtttcaggttgatgagaaacgagttcttcatttggttcgtttgcatttctgcgatatcgttagttcgtcgcttaatcagctctatttcaatgtctttatcaatgagtatcttgcgtttaaggatgttgatctctccacgcttactttccatgtgcttgcgtctccgttgtacattgattttgttgcggagtctgatcgttctggaatgttgaggattagtgttggaccgtctgatcttagtaatccggcgagagttaatgctctattgaatggagttgagatcatgaggattttgagccctgtgagttctgaagtggtatctggaaagaggaatgttgtctggatcgtggttggctcggttttgggaggttttgtgttcttgtcgctgttcttcttgagcgttttgtgcttgtgcaggcgcaagaacaacaagacgaggagttcagagagcacgggatggacacctttgaggaggtttagaggcagttccaatagtagaacaactgaaagaactgttagttctagtggctaccatactctgagaatctcgttcgcggagttacaatccggaaccaataactttgatagaagtttagttatcggagttggcggattcgggatggtttttagagggtctcttaaagacaacaccaaagtagctgtgaagagaggctctcctggttcaagacagggcttaccagagtttctctctgagataaccattctctctaagatccgtcatcgccatctagtttcacttgttgggtattgcgaagaacagtctgagatgattcttgtttatgagtacatggataaaggaccactcaaaagtcacttatacggatccaccaacccgcctttatcttggaaacaacggcttgaggtctgcattggtgcagccagaggacttcattaccttcacaccggttcttcgcaaggaatcatccaccgggatatcaaatccaccaatatcttactagataacaactatgtagccaaagttgcagactttggactctcaagatccggtccttgtattgatgagacacatgtgagcaccggtgtaaaaggaagctttggatatcttgatcctgaatacttcagaagacaacagctcacggataagtccgatgtttattcatttggtgatgttctttttgaagttctttgcgctagacccgctgttgatccgttgcttgttagggagcaagtaaatttagcagaatgggcaatagagtggcaaaggaaagggatgcttgatcagatcgttgatccgaatatcgcagatgaaatcaacccgtgctcgttgaagaaattcgctgaaaccgcagagaaatgctgtgcggattacggtgtagatagaccgacaattggcgatgttctatggaacttagaacatgtgcttcagcttcaagaatccggaccattgaacattcctgaagaagattatggagatgttaccgacccgagaacggctcggcaaggtctgtctaatggctcgaacatagagagagactatggagatggaacttcaggcataatcagtagcacccaagtgttctctcagctaatgaccaacgctgggagataaattaaagtcattgctatatagagcaagtatttatcatagtcatagagtacaatacctaaaccgggaaaccaaagcggtgtaccggtatctcagattcggttcgtgtttggtataattttgtttggtttctgtaacttgtagagctatgattgttcatttgatatggatgaatcataaaccgttaaaaccagtacattatttggttaaatattaaaccggttaagagtggagaaattaaaaaccggaatctcaaaagttcttgataaaccgtaaaccctgtgaagccacaacgctcagaaacatttctgtctctgtggagacagctgaagaagcagcagcactatcaatggcgtctctgagattgttctcaacgaatcatcaatctcttctccttccatcatctctctcacaaaagactctaatatcttcaccaagattcgtcaataaccctagcagacggagtccaatacgatccgttcttcaatttaatcgcaaaccggaactcgccggagaaacgccgcgtatcgtcgttatcacctccggaaaaggcggtgttggaaagacgacaaccaccgcaaatgtcggtctctctctcgctcgttacggtttctcagttgtcgccattgacgccgaccttggtctccgtaacctcgatctcctcctagggttagagaatcgagtcaattacacttgcgtcgaggttataaacggagattgtcgtctcgatcaagctctggtacgtgataagcgttggtcgaatttcgaattgctatgtatatctaaacctagatcgaaacttccgatgggatttggtggtaaagcattggaatggcttgtggatgcgttgaaaactagaccggaaggttcaccggatttcatcatcatcgattgtcctgcaggaatcgatgccggattcataaccgccattactccggcgaatgaagcagttctggtaacaactccggatataacagcgttaagggatgctgatagggttacgggtttgttagaatgcgatggaatcagagatataaagatgattgtgaacagagtgagaactgatatgattaaaggagaggatatgatgtcagtgttagatgtgcaggagatgttgggattgtcattgcttggtgtaattcctgaagattctgaggttattcgaagcacgaatcgagggtttccgcttgttctgaataagcctcctacgcttgcgggattggcgtttgagcaggcggcttggagactcgttgagcaagatagtatgaaggctgttatggtggaggaagaacctaagaaacgtggcttcttctctttctttggcggctaaatggcaaacggatcgaaccgaaccgaacggtactgaactgaactgaaacttcttcctcgggtatgtatgcattgaaatcttttgtacaggagctagagatttttgaagattttgtctcttttgctttgagaatttagatttgttcctaggacaatgtggaattctactgctagtttgttgctgagttcaagctctgattcttatgccttttgttcttgaggttcttgatttctgtttctgtaatctgtttatgttaaaattgagagtttccaatatatctcaagttcttatgtcaaatcgttatgatgagaacttcaatagcttagctgatcttatcagaacttttcgcgagtatgaattcggtagctactggtttggtgatgattttgctggcccttttgtactatgtaggcttgagtactagtgctgtctagcttggtattatgccatttgattctctaccttcttgatttatcgatatggcggtgtcgattaagttcccgaaatagaaatgattatgtgatactgaagctcttagagggcttagctgatagtagaaccaacatgatcgcgtatcataattctgatgctatttatacagtgataacccctcaaaactttttatttattggaacaaaacaagtatacatgctctttgaagtattatgataactgctaacagttctggtttaagagatactgggtcgtttggattggttcaccattgtagacaacccctcccgtttacttaatactgctttaaacacatgatcattagaaccacagcaacaattacgttactaggttcctcacttgtgtcagagacactgacaacaaaccaaaaccaaaacttcggatacgactctgtattaggggttatgaaaacttttttcgtgattctccaatttatgatgaatcactctcttgagttttgccgttgcaagcttctacatcattactctgactgctgtcggagtctgtgaatttcaagtagttctcgatgttctctgagcttacgtttctcagttggtcaagccaccggtgttggctattctgtttgggtctcggacggttgctgatggctatggcgaggtcattgggaaaaagatctcggaggacaaaggcgtggataatggtggtcacgagcagtgcgaacacgactaacgttgcaatggcacataggaccacacacatgatttgagtcatagtgctcttaaccactgttgcgtacctgatggtagcaattgcagctccggtcatcggaaaggtgtacgcccaccaggacagcgaaaatctatgagaaaaaaaagtgtgagaaagttgagctagcgaataactaaaaatcaaacagtaataaaagtaattttcttaatcttacttgattcccctgaagaaattgatccgaacagcctattaaataaagaaagggaaaatttgtattagtaaatacttttctgaagaaggaatatatatacagctaagttatatgtaaaacgtaccaatgagaaatagaggaaaatggcgataaagtaacaaactttggagccataatcgaaggagccagtgaccttagcccaagccatggaagcaacacttggagccgcaacgaagaggaagaagacaggatgaagatctttaggcaaagtctcgttggtcggtagcctttggtagagagtcacgaacagaaccaagtaatgagccatcccaacagcatagaagaatatagggccttctctaagccccatggacgcaccaagcaaggccccaacaaagttcccaacgaccgagagatggttggtcgggttggcgacccgggagagccgtcgttgaccaccggacatccactgaccgtagatcttaagctcaagacagatgaatggaaacatgaggaggtaccaaaggaaatgcggcaaatctgtaattatgaaaggtgggacaccgagggcaaggaagagtaaagaaatgaaaggagcaaagaagaagttgattctgattggatggtagtattcgcggcgtacggcttcgaagaaaaggatgatcttgaggaggtagatggtggcgatagtgaggatcaaagccactgaaatgaaccatagaccctggttgatccagaggggtacgtggaggaacttggttggctctgcagtggctagggttttccacattatggcttggctgctcactcctaggcacataccgaaggtggaaatggggtaacggagaagaaacggccactttttatcatttggtagaacgatctcttcttgaggctgcgacgtaggaaaaacaaaagaaagttataattgaaacatgtcactcgttaataaaagagagttataaaacgtgtcacttctgacttctagtaa

SEQ ID NO: 31413 - DNA, 626 bp, Arabidopsis thaliana landsberg
  unsure (1)..(626): unsure at all n locations
ctctctgtgactcaatccttctcaaggcacaatcaccaaacccattagagatcctctcaaagaaatcaccagagaagcttctactaccacaaccaacagatctagatctcaacactttcctcccaaacgacgaaccaccaccaccacctataccattcgttggcgtttctgaaaccactttgttaggactctcatcttcttcctcaactatcacatcaatgcctccaccaccaccgaccctcatggaagaagtctctgtttttgactctgttctctggttcctccttaaatggctaaagttatcgacttttttggtggtgttgctgatctgatgttttgaagagtagagatggaaaaaagaccaaaacccacttcgtttcctttggctgaaactctcaccgtaagcagcagcagtcgatttgcttctcttgtagataagattcgcagaagaagacgaagaggaagaagaagaagatgaagaagaagctgcgagcatgttcttcttcttcttagccagaagaaacgggagattgtngttgttagtggagtctctgccattgcttgccgatgagagagacagagcgagagaggtcgtggtaggagtgatggatttaggagaagaagaa

SEQ ID NO: 31414 - DNA, 1439 bp, Arabidopsis thaliana landsberg
gaagtacatagctctcattggacttgcaaatgaccatccccagcttctgttccttcctccaccaccatgacctttgttatgattatgatgatgatgatgttcagctgatgatgatgatacccatgatgatgaagatgaagaagaagacgatgacgtcattatcataaacccaccaaagatcccaccacatctcaccatctctctaacaccattactagggttactactgaccttgttacctttgttattattaccttctctctgtgactcaactcttctcaaagtacaatctccaaacccatttgtgatcctctcaaagaaatcaccagagaagcttctacttccacacccaacagatctagatctcgacactttcctctcacttggtgtgacttcaatgttaggacttccatcttcttcaacaatcacatcaataccgtttctgttactactactcccaccaccaccaacaactctctttgacattgaagaagaagctgacgaagaagacgaagatcccactgttgtagtctctgccaactctgtttttgtctcagtctggcttatgggttgatgaaagtttccaactttcttactgctaccatgttgtttcgaagagtagagatgaaaaaaggaccaaaacccatttctctttctcgggctcaaatctgaatctccgtacgttgtcttcgttttctttgtagattgacttctcttgtagacggatgagccgtggtcgaagaagaagaagaagcagtaagcatcttcttcttcttcttagctaacaaaaacggaagcttgctgctgttgttgtttgttgctccggagacagagagagaaagagacgctgagagatttgcggcagaggcagtggttgtgctaccaacagagtcagatctgaaggaaggagaagaagaagttgaagaggaagtgaggtgtttaggaagtgggaaagatgaagttacaagctttccaagcttttcttgaagacaaaaagcacagatcccacctgggtttttagtaaatggatggtttatacattgcataccatcacccatatcttgatcttttgcttccaccattgttgataaccaaaaaccaaaacttccttatagattcctctgtttctgtgtgtgagcttttgagaattattagtttctcttcttttgagagagagaaagagagattggtggagaaagagagaaatgaagagtgggttgtggcagaggagaggggtcgagttcccagatgcacgtgggatactgacttgtttgtgccttgtggcctatctctctatttcttatctattttttcttcaaatcttacaaaaggttactaacactaatcttttgagagccggtgctaactactcatcaacccttcttggttggtttgggatggactaaaaaggttttctggtctagtgtgtaatgtaacca

SEQ ID NO: 31415 - DNA, 917 bp, Arabidopsis thaliana landsberg
  unsure (1)..(917): unsure at all n locations
tctacaccaatttttcttttaatctattactagatgataccaccaccttcaaacgggaacctaccaccatccatctcctatatatatataatccattatgtacgcgcactacatcttccttcctaatccatacatgcacgcacccatatatataaatgactcatgcatgaatgatgaatcatatcataatagtaatcattcacaaatccaaaccaaaaatacctaaacttactctcaaatcaaatatatatatgcttctttcaaaatgttctttcaactattctcacttctcttcttaactctatttgttacttccgttacttccagccgtttcatctacgactttgatcctgtcccatcatctgccaccacgccacttgaaactaacccagttggcttcagcggagccgtcatcaaagtcggggtaaatatggccgtcagtggaagtcagattccgttagctagccttttgatacgtaatggcgccattttgaccagtaacaaagacgaagtccctctcattcaccatcaccatatcagtggtacaatatccaacataatcaaatgatcagctcgttggtacaactagtcaacaaaaccataatttttaaggaattgtttttctcaatacatgcaacgttttcttctagagtgaattcattatcgacttggaagattgaacatgtatcatcaagagttgtatctgtaatcatatcagttgacagtttgaatggtcttattgaactaaggggtgttaacaaagccaaagcaagtagatttatgctccaatgagcttattaagatagaaataaactagggacttgaatagctcatgcagagctttattgtgcaaagaagtaaagagaggaagaacaacttatcaaaagattaaagcgttgacanaaatataaaataga

SEQ ID NO: 31416 - DNA, 1392 bp, Arabidopsis thaliana landsberg
aattgccacaaattgacatggaaataacatcagtaattagtaattacattccatgccaatttgaccattatttcgtgttgttacaactcacaaattactatcattctatcagatcaacttggtgtctatatacgatccattttctaagtctcaacagtcgaattcatgattcacaaaataaccaaaccttcaatttataatcgtttccaatcccaaaatcaagccatggacgccaagaacaccaaagctgatggagccaagaattttggtacgagtggcggaagcggtggttctggtagcacttccgacatcggtaaaacaatggttgctcctggatctggtggacgacaaagcgtttagagggaggcttttgagagcaaccctaagaagttctttgatgatcgtaacttcaaagagaagaaatgaaccgtttaaatgaagagcaagttctcaaaaagtgatgatatatcttgtttcttattttcttctttgttagtgatcctccaaggctccactagttcacacatatggtggagtgaagtaaaataattatcaataataattaataagattcataatttctgaactttttcgttctttttcttttttcattgtggatgatcatttacgtgaattaagaactacgcatgaaaaaggcaaacgaagtaacttatatcgatattttccggcacacttttttattttaatggtctgcatgtcgtatatatcccacacaatagacatattataagtaatagcaaaattataacgatacaaaccacgtggaagtaattaaaataagtacttaaccacaaattacaattaaccggtaaaagaaaacaaacagtttcctaaagcaagaacataaattgatcacttggtcatatcatctgataacgcatcaaatgatgaaacgccaaacgcatattcatcagacgccagacgcaaattctctagcaaagttttaaacgaagaactttgtatagcatcatgagcaatcaaatttggaaactcattttgatgttttctcaattgattggttgctcatgatgttataacatctactaattttttttggctgaccaaaaataaaataacagaaagtgaatagttcactggagagtggttccgaacgccggagcccaatagtcggcaccattgtcgctgccaacttgtagtgtgcatgagatgggaacaagacaaagccctctacttctcaaatctttcatcggttcttcgttaggatttgatttttgattgtccgtcgatgacaatgaaactcctcttttcatgcaatactcattcacaagctgattaaccaaatcagaaaatatttcttcagcatagatatttaaaataatattgaaagtgtgatttagtgggagtattggt

SEQ ID NO: 31417 - DNA, 5268 bp, Arabidopsis thaliana landsberg
  unsure (1)..(5268): unsure at all n locations
gaaatcaatagtcaatatatcatgagaaaaactaagaaagatcttttgtaaagggaatcttgataacacggctttttagcccatttagctattgttttcttatgtttcagagagcatttgtggccatcttagagccaataagaggagaaacacatattctaggtgccaagaaggttttaagagttttgaagctaaaagtatcaaaaggtgatcattccggccgagttcttccccatcacggcaacgagatattttggtatgcactgaaagctagaagagtcaagattcacgttgaaattgaatcgaagcaatccgtgaagctgtttggaagatatgacccgaagattgaagacatgttaagaaccggctatttggaaataataagttcaaaacacattcggccgaggagacttgaacccaagcagcnnnnnnnnnnnnnnnnnnnnnnnnnnnnncacgcccaagtctttccctttttgcgccaccaccattaggctccttccctgaagcctactacacggcccgatctcttaattatccagcagaatgacgttcttactcctaaacctaattcttgggcctcaagtataaatacttgtccttagccctaaccctaggtgtgccttcatcaccagagaaccctagccgtcgccaagagctgcctcctagccgtcgcacctcttgaagcttgaagagcaccatctctctctctttttctcgtttttgtgtaagactctttaaggtggagctttgcctcttgtattctacatttaaagaagtaatctctaaaccctttttaagttttattcatattttagttatggtttactcaaccaaacttttgattagctcctttgccatgatcgagtagatctctagtttggtttgttggggtttcaaaggggaattcatggggactagtagatcgaaagtctaggttggcggtttctatggttttgtttgatcgtttaaactattctttctagttgagttgaatcttaatgcttgtatgtctggaacatcacctagtacttgaccttaggtatttccatctttagcaaaatctcggttgaatgcttgacctaactcaactgaataaagaactataaccgttgcacacccaccgagtgatagggccttatgggctagaatcgaacttgaacttaatgctttgatcttgtattttgaaaccatgatggcacatactaacggatagggcaactgagtacacaagatattagtgataatagccggctttcacctactaacctttagggttagctagtcttgatagagttttgtatgtccaaaaatttggaagtaaacaaacctaaccatgttatcacctagattgagatctataccttatttattgaaccatgacatccggagaaaccctcgaagacctaccgcttttctcttattgcttaccgtttagtttagttacttgtcttttattttggttactgtgggttctgaaatccacactagagatttgtcaatagatttatgagaaaggagggctagatcttcacaagaactttgagacttatattgctaagaacgaatggacttttgcattgataacagtaaagcttttacaatgtaaaatgagattacaagtgtaaaagtataagtgtaagtgtcaagctgaatgaatgtgtcttccaagtcatccttgcttccttatataggtctacgcacgtggtagcttcgtctgagatctagggagattctcatagatatccggcaggtcagttccgagatattaggtccgcttcgcaaatatctcgtagttagttcctagggtgttattcgcttatctcccttcatcaggtaactaggcttatcaggcccaaatacctaatctgttcatgggctccagagctgcgcaggtcctctacttggtgggcttagtgggctggcatggtatttttgcaggtggattcctggagagaaatccagctctaacatttgccatccagcccattgagtaagtaggcgaactcaatgagcggacacctaagccaagtaagattgcgaaaatattgtagataaggtagtagatacgataagatcaatcggttctgaggataaactcaatgaaaacggtataatcttagattcttaaaccgaaagatatcgagtagatacgcgaggtaaatcgcgggtgacgtggacggtcgagatgacgcgtctcttcagcgcaccgcatctaacggctcagatcaggcgcggggaagagatctctacaatctcaaaaatcgtggtgatgatggcttctttaaataacttcccacctctccacttgacgtcacgtcaactcacacgactctcaatgtaacttctctccatcttaattatttactgcgtttcgtttttagagattgaatttttttatctttcttctgctatctccatcgtttctctgctactcccttctttctcgatctaccctctttgctttttccttcatctctctcgtctttctccatcgaaatcaagagatgagcgacctagaggattcctagaacaagagcaaccacagttacgacgatgacgagagttcgtcagagactaggtcggcggcgtctccgccacaagtacaaaggcgctttgtaaccctaggcggaatgggtctaatccgtccgccgtcgaccagagccgaaaagccgaagaagaagaaagcttccaagcaaaaggtcggcacgccgatgacgaacagcaacctggtcgacctccagaggagatgccagattccagtgggggttactatgatactcccaagaccgctgttgcatcctgagaacgtgccagccggatggtgctgcgcttacgccaatttctttgagaaatatggcttatttttcccgattccgacgtgaattctcgagatgctctactgtctcagcctcgccttttctttgatgtgtccgaacttcgtccgccatgtgttggcgttattcacccgggctcgggaagtaaacagagaattcagctgtcatgacctgcttcagctctgccaggtcaagaccaatgctaggagtgaccaaggcacgtactacatcagtgcacgtcccggatctctggtcctcggcggtttgaaagcctgtcgagacaccaattgccgatccaagtatttctttttcagagtagatcgtcattcagttggcaattttgatcccgcgaggataataaggacctggtctacctacctgggtcagatggagacctgagcctcttgatttttttttgttgtttgggtcgaatccttgactgcttttgctaatcgttagtactgaaactaattgcttctttttgttgaattgcagcaaggaccaaggaagttactctctcggagaccaatcttgagctgttaacccttctctgaggtggtcagactgactggtccattttcagcataaatcacatcgtagttgctcttgtcgtagctccagcagttccagtagttccagcagttcccacattcgttcctccaggagctctgttagatccgattgaagaggtcccgcagattgtaccgaaccccgaggcagatctgcctataggtacgagttttttccctttttttttgtgcacgagtcattgtgctagctatgcacgatcaagctgttagataagaaatatcgtgctttgtttgttcaattcctcctgactccagctccacttcagaactcccgctcatttccagaagaagaataaggcgaccaagtactgcggggaacctgctcgtgctggtgatctgttggccgcggtgaccgcggctcaaaacagtctagctatctccagcgcatctgcctcagcannnnnnnnnnnnnnnnnnnnnatcaataccgggacctctgctgcagcaggtcaggcagataacaatcaggtcgctcaggtatctgggtcatctgcgactgttcgttctgaaggtgcaccgtcttctccgaagagagctcggacccagccggaggtgcacccggcgtgagttggtcgtgagcgatcagggggtcgcctctcctagagaggagagggtggaacatgcggctgctaacctggaggcagctatgtccgcggataggcggtcctcgggtaggtcccaaggcggaggacgaggatcctgaggtgggggcaagtctccgaaccggtcttaggaagtgaggcagacgtccaactctgatggagggtctgcaagaagcaggcctttccactggtcttacactcacgaccgtgatcatctgatcgttgaggataaggctgggttggcgaacctgcttcgccacatcaaagggaggaactcctagattctcggagtgaagaacatggccgaggcggcggcttatgctgacatgatggcgaaggagggccaggtaataatcgataactgtctccttctaattctattcttatgctagttataatttctgttttgcctttggcaggcgatagctgcaatgaacaagctggttgctctctatgagcaacgtctgagcaaggttccctcggcgaacgagctcgaagaagggaagaccctcatccaggagctgacagcgagtgtgaaggctagtcaggagcgcgaggtttcgttccaggtatgcctcggttatgacttgtttgtatatattttatcgatgatacgatgattctgacctgattgtgatttcaggcggagatcgagaggttggaaatgaagctgtccacttcgaaagacctcgagaaaggttatgctgagaagatcgggctcatggagatggaggtcgggggattgcaagctgacaagcagacgtcgagaaaccagattcatcgcttggagcagaggagggaagagctctccaaaagggtgatggaccttacttcgactgcacaaggagcaaagaaggcggttcacgatgctaaggttgagctggccaccgcgtattcgaagttgctggctgggatcaaggaaaaatgggtcgccaaaaaggagtacacagtgctggaaagtcaagcggtcgaggtggagtcgaacttggctttgatcgacctgatcacaaaggctcctattgatctgactgtggagaaacctcgattggaagcggggctcgatgtcctggaggcgaagtccaaatcgaaggaggtatccgactttactttgagtaagttggatatcccgcaggtttcggagatgtcggtggtacgtgcgatggacatcgacgagcatggaatgctgatcggcttggatgagttcgggagtaacaaagactcgttccgagaggtctcacg

SEQ ID NO: 31418 - DNA, 3693 bp, Arabidopsis thaliana landsberg
ataatgaagaaaaatatatataaacttgtttaaattcctgcagaaactaaaaaaaaaaaaatgttgacccaatggcccctgatcaagtaccattcttatccaatgtgcataagcttctctacattcttctaaagtagactgcactattttccctgtaaaaattcatagacgtcaagccagattcaagaaccatcaaattcaacaaagctgaaagatttccaaatctataagaacgagaatccgcagcaaacactcttgaactattaattgaaatttcttcattgataggaggcaagagtgaaaaaaatcaaggataaagaagagtaaattaggcttaacaaacctttccacactgttcttttagagaaggccacattgacataaacatccaatatacaaccttctaccgagtctctgcaatctcttttcaagtcccagactccctgggatcagccaaaggtaaaatttttcacatgtaacacacatcaaacaacaaaatattgatagcatttgatgtaaatttcccctacctctaccgtaaaataatctgcataaggcacatcgctgatctcctgtgatgtttcaataaccagatggctagcataggaaattacaatattagctaacagaggataagcatgcatgagttcagactagctttgctttgacgatatagaataaaaccaaaaaacattacaaaatttctgtacctatttctgtacatccgaaatttctgtgactcctggcagccaccaaactttgcacctttaaacgaaagccagagtcatgcatacatatatttgatataaaccgtaatctattttatataattacaccaaaaaaatatatatttgatataaaccgtaatctagtactgtttatctataggaaagaaaaaatattaccaaaataaatttttatcggatgttgaaatgagacattgcgggtgtgtccaagcttttcatgaggttgccaagaggtacacctaaactctgcaagtacaaatatctcttctggttaaaagaacaccgagaaagagagagaaaacagctaaacacaggagcaaaatgattccatcacttatagctttacctttgtctccacaatttttatggaaagattcaacaaaactgacagcaccatctgaaaaaaacaatctaaagaactcttctactggaatctgcaaatataaactaaagtctatttaggtatatgaaacttctgcatccagtcaatgcttatattctcataaatttgaatgagaatggttccataatttcctctagctgataagacaaagaacgagacattaccgaaaactttgcctctgctacctttgtaaagtcagatgacactgcgtgcaaggaacacaaatttgtgtggtgaatacaaatgagaacaagaaaagagatcacgataaccaaaagaaatagatgagagatcatgtatgcaaaaacgaaataaccggttcagtaatataggatctccatactgagtgcaagctcgttgggacaaactgagaactagtgcaacttgtgaagtagcaccaaaagacaagatcataaagctaagctaccccatcctgataggccttatttagcaaaaccattaagagaccgtttcccattgaccatttaaatttcaaacaatttatattgcaaagaaaacaagctaaaagatagacacataatgacatatacctagaaacagtaagaagttaactgattgtccactttaaaggaactttaaaggagttaggagaaacccaagcgtctgcatttttaatactctttaccaacaggttgacctgaccccagcaaaaaaaaaaaaacccgttgaatttactgaaaacactagcattcacatccttaaacagttgacttgaaaaagataatctaccacactacccaaaccaaccaaaaagaactaaggtaaaagcgaggaaggagtttaactacatttaggtgcatctgtatcttcaggcttccagttgaaagtattggccgccacaacatctacatctggttcagcgtgccgctgaacggatgaaggtggaacgccattctgactaatgacaggaagactggaactgctggaaagatgaagagtttcatccctgagaaggaagtatagtgagcgataaagcagtaagaaacagaaagatggaacaccatatggaagagataaacgcaccttactggaatatctagttcattggccaaatccatggaactgcgtgcccttttaacaactccatcgcttacctggattttggactcagataaggaaacaaggattaagcagtaaaataagagtgtgtgttgcacccacctgcggttcggtcaccagaatctcgccttctgatttgacagcactaccatattccaaccatccatcatggataagcttgaaagcttcatcgcgggaaagaaacgatgcaaaaaagtactgggagagaatgcggttcaaagatcaggacagacgcaccaaccaatatcgagtaaagagggaactagtggtaccttcttccctccagctaaaatctcaatggcattaggaaaaataccagcagtcttggctcgtttaacacaagatatttcagcaaatgggataattttctgcaaagagagttccgatcaatattgaagaggaaaaagggaagaaacaaaagtgagtggaggagagcaacaatggcggcaccttggtctcataaccaaagatgttggagtaaaagcagatataatggatgaagaggtacatatgaccctgcaacaaaaagtaaagatgattaaaagataaggtaagtattcgcaaagagagaaagataaaagtacctaacctgcataagaatactctcctgacaagcacagttaaaatcttgaacaaggatctacacaattcggaagcaatggtggagtcagtacttctctcattgatggaatttcaagacgagagaggcaatacttacttcgtcagctggaagccgaaacaattgccgatactcttcactcttggatatgacttcagactagaggagaataagtaagaagaaatccaggtcataaaccaaggaaacgaatagatcgaagcagagagaattcatcagatacctgattgtcaccaccacgactggggctcggagaagaagtggaagggtcatggcgatcaggtgagccctttggggaagatggtgggagatcggatacgacctccggagacgcagacgagtcaaccttcatggttcctcgaggaaggtcgacgctccccgaaacggaagcagtagaaagcatcgccatgtttagagagagaaaggggaaagtgttgttgtttgctgtttggcggtcgttgggtgcggcgtacaatgtcaacgtcagcggccattgagtcaaaaacgaacgatcggcctcttttgggctctcactttcttggcccatttcttacccttgtattcaatttggcgggccacctttgggccattagttaggtgccgtgtctgctcatgtattaaatgagaaagattgtgagtcctcacaaaaccacaagactcaatttaatcaatcctcaaatttacatgataccaacgtaatgagagcttaaaaataaatgagaaacttggacataatcagttgatggagtaggaacgagaacagacagtctggagagattcagtgaagagagatgagaagctggtca

SEQ ID NO: 31419 - DNA, 2389 bp, Arabidopsis thaliana landsberg
catacaccaagtaaatatgaaactaaaaattacattaactgaaaaaggtaaaatcacaaataataaatattatttatttttccaacaaatgcaacacaaaaaattgaaaaatataaactaatgtgcaaggttaaccaattcgtcgattatttcacagtaacatttttgaagtttttataagatagataacaaaaatggataggaactttacagtgaatatattaaaactgtcctttgacatatcattatcaaacataattaagggaaaactatgtggaagtggaagaacagatgataaattagagcttgagggaacaattttgtttttcatgactaaagaacttagtttcatcttctaatgttaccttctgctttccttggcttagcacatccattaaacagagagaaccgactcttccgatttctccgcgaacgaacaggagttcccttgacctgtttcgactaatcaaatccgcaaatgagacaaagaaaacatcgaaaaggaggaacagattcgagttattagcacaaaccttgcttcgtctatgagtcttttttgtgttccaacaaaataatatattacaaccaactcttcctgatcctgattcgtatcctcctctacacaaccaaagccaaacatgaaatcatacgttgattataaagatcttatttgttttttcttttcgggtttgtatcgatccggatcagagtgaggaacttacagattgtctctgttgtttccgaagttagtatcatgaagtaagcttggggaaataggtcaatgctgtcctcttgtaccggttagattctcgtgaagctcaccattgtcgccgattttcaaaagcttaacttcattgtttaactcatctacccattgatgtgtggttaggccagaagaagaaatagcagaagctacgttagtttggcgataagtatcttcttgaggtagaatctgattcctttcgggttttacccgtattatcgatccaggtgtgtctttgtcagcggtttgtaaccacgcggtttctaatctttgttctcggatgattgattctatcctttgcatcgggagttttgatctgctttccacgctgctaccaacttcaacatctttttcggcatttaaaccagcgatgttatttagatgcccacttttgttggtcatttctggtttccgggtttggtgagggacaacgagtaactcggtttcaggcaagagaattatcctgacctctacgcttcgccttagtaccatttcaatcgagtttgtgatactgcttagaaacctttcagctctcagtttgatatcgttttctccaaacgcgatataagcaactagaatacctgcaaatcatgttcattttattaggatcttttgaaaggagaaaaccaaaaaagtgagaaaagaagaaacttttaggctttttaccctcaacttcactgatagatataagtttcccatgagtatagagcagctgcctcagtgtctttgagtgacatcgttcaatacattttctccatatatcgttaagtttctctgaacttctttgattaagcatcatggtgcttgcgatgctattttcatgtgaggcaacagaagcttcgctctctatcatttggctagatgaggaggatttatagcagttattatcgataaccctggagaatggtttcgcttcatgggaatgattcccgttcctttttataaccgaagctggagatgctgacttactaaagcgaagccctcctattctctgtttgtaagccatcacttcccttgaaatgcttgatgggtcatcgtcagttgctctagagctttgccttctactacttcctgtatgtgtggtgccaggagaaggcattgatcccagctgaagcaaagtcgctgtgaaccatgttgaacggtcattagaaactctcagctgcttctcagcctcagaaagaagtttcaaagcatgctttaatccctccatatctgcttcagtcactaagaaaacgaagcaagaattttcgaaaatcaaaccaagtggtttatgactcatcgtagggagtaaaattgctcttacaggatatattagcttaagggtgttagaaaatatgaaacgggcaatgatctcaacaagctaacagatcataacgcttcactaaactacttttttagcacatatgaccaatatggattttaaatactttgctgggaactcacagtttcttccgtcaaagaaggcgttgctgtatttttcatctacgaccttgtatgtaccagcaatgatatccataataagactggcgagttgagacatcaagactattgggtcagctccaaggtccaacaactctctagctcgcttaacagtctctgctgtgtcagaagacaatgctaattcca

SEQ ID NO: 31420 - DNA, 6171 bp, Arabidopsis thaliana landsberg
aaaaccagtaaataagtgaacccacacagaatggtagacaaaacaaaagtgaactttagggaagcactcacatgtaagaaataacaaagaaaagacccaagaaatcacatagaaaccactttaaggatatcctattcacacggaatgttaaatgggagaagaagcaactaaagaaacaaaaaaaggcaaaaagtggggtctaaccagacgaccatattattacattgacaagagtgggactttagtattagttttaattttgggttctatccttttcctaggttgtaaggaaatttttttgaactttatattaaatcaattcaaatacagattatgctcacctgatgtaagactggcattgaggagcgtgcatccattggcaatttcttagggactgtacattctacctttggctgattaatctatttgcttatcaactcagcgcaacaaatccatacaagcataatgatccgccagtggatttcttattgatttgaatattctctggccttctttgagtaatcctgcacggttacaagccgtcaagacactagtgtaagtcacacggtcaggctcaataccttcgtctttcatctttgagagtaaattcagcgtttcaaccccgtctccgttagctgcaaaagctgtgaataaagtgttataagagacaacatctctttccttcatttcgtcaaacacccgttttgcttcccacaggtttccacccctagcatacatgaagatcaaagacctgtatcctgaatcattaagcttgatttggttcttacgaatgtaatctacaatgcaatcacccaattctagatcagccatgtgtccacaagccgagagaacactaatcattgttacttcatccggtttggaatctccataatcaatcatatcttcgaaaaactcaatggctagtgcagcttgcccgttgtgagcatacccagctatcagagaattccaagaaacaacatttcgcttaggcattgtatcaaaaagctgcctagccgaactcatatccccgattctagtgtatccagatatcatagcattccaagtcacaagattcctctgcgtacctaactcgttgaaaattcttctagcagattgaatatctctgcacttagcatgcatatcaagcaatgctgtcttcacaaagcaattcaaacggactctcttctcatcaatcagttttactagtgaacgagtgagggaaggatcagcacggaaagaacatgcggaaataacaatgacccatgtggtctcatttggcctaactccaagtctcaacatatcgttaaacaatctcagagcatcctctgtaaaaccattttgagcataacctgaaagcatagcgttccaagaaacaacactcttctccggcatccgatcaaaatacttcctcgcattttccaaatccttaacctttgcaaaaccagtaatcatcaccgtccaagaaaccacatcattctctggcatcatatcgaacaacttacaagcttcctccttgtttccccatttccaatacccagaaatcatcacattccagtcagaaccctttctctgagaaatttgatcgaacactttgcgtgcactctccactgactcatgcttcacatacatatccattatcacattcctcacataagggtccttaaaaaatcccaacttctcaacaagggcctgaaacaaaatcccgaatctcccagccgatttgatcacaacagggaaagaaaaagcgtcaggcataatcccacaacgagatctttgttcatacagacgaagaacatcattcgccatatccatcttcgagaagtatttaaacatggaattgacaacgaagacattagggaatgtcactgaatcgaaaatgagccgcgtgtagtaagacggcgcacggaggcgcgtgcagcagctgattatacgcgaagcccagtagctttgtcgaggaagagaattgaatacaatgagctgagcatggatttggtttaattgaggaaatgttagagcttgtgaagctatggcggcaagagatacagtgagctctcgagacatatatatatagcttcacgttctcttcctcgttagtgtttccgtgtttcgtattcaagtggaagaagattttttaaaaaaatatttgagtttataactgaacatgataagctcgttaaggcccattatttagtattaggcccattaaatgtaggacgattggttaatgtaacaacaacattaagcacattaatcaattggttaatcattaagaaaaaggtagtattaattattgaattaataaagtatcactaatagttaatcatgatattttcataggatatgtacatactctttccttctaattacaaaaaagaacaggaccatctatgatattattaatcagtcgcttgactttgattcctccttgggtattctctacatgactacatgttatattatccaaaataacatggagacaacgtttgcttacaagactaatgaatcaatttgagagccagaaagaaaacttcgaaaacatacaaaatagtgggcatgtgcatattcaccgttagtttgtttttgcatgtatgaattattataatgcatgattaaaagaacacaaaactataaggacccaagagctttgttcatatgcatgtaaatacacatatttgtgtgtactatatattaacacgatcataaagaggaaaaaaaagcaaaagcaaaactcttttaataatgtaagaaaatataagtattctaagaaaaacaatggcagtaaaataggcatgtgatgtttaattcgtttttgttggacgacatttcaaacggaccaaacaataaaacagatcagacgtgagatctaaagactgaagacatttgtcacagaaaagataatactcctatatctatattttgttatgaatgcaactaaaagaaaaaattatttgttctcccaatttattttgggcaacaaaaagaaaaaagacagtgaagactgaagaggcgtgagaagagtgaagacttgttttagatctgacacagagagaccagaagaaggagaatcccgagcgtcaccgctccttccgacccatttttcactttttcacatttcttttcgtgtctttttttaattattttattcattcttttatttttgtttgataaaaagcaaatcaatcagccaatcaccgtgaattttttgaatttcttcagtaatctctttcttcatctctcccactctcatcctttcgctctcacatcttctgtttcttcttaaaaagattcttggtatcacctgcgcaatttccggtgtgactatactaaatagttcggagaagattagtctaaaactatgtaagatttgttttctggagagaaagaaagaaaaatgtcgggtttaaggatttcggatccgagcaaattgcatctgaagaaggagcttactcatatcaggaaagttgcttctaaaggtttacgcgatcctggaaccacttcctcatggaaatctcctcttacttcctcgagattcgtcgttgagccgccggcgagcaacaacgtcgagattctcagtaacaatcagttagattctcagtttccgagtagtcgagtctttgggaataacgggaaggagaaggagaagaaggtgtttttgtataattggaagactcagagaacttcaagcgagaagactgagggtgaagatgaaacgtcttggatccaagctagtctcaatgatgatgatgacgatgatgatgatgtgagtgacgcgaggaatggtggagattcgtgtcttgaggaaactcgatctgcttcgatgattcgaaagagtggttttatcaagaagaagagtaaggaattggatttgagtatcggaagaaaaagcactgcgaaagctaggaactttccaagtcatcatcttcacgttgcatcaggtttaagtgtagtgagagatgaatctgatgaaacagaggattttagcaactctgagaatttccccactaaagtatcatctcctttgcttttgaaactaaagcgcaagaactggtcacgttcttcttctaagttcctgagaggtactagtaagagagaggattcttctcatacttgtaacagtacacctgcattgtcgactagctcatataatatgtatggtatccgtaatcctagcactgttggatcttgggaggatggtgatgatgagttggatgatgataacttggattttaaagggagacaaggttgtgggattcctttttattggactaagaggaatctgaaacatagaggtggatgtaggagttgttgctctccttcgttttcggatactcttaggaggaaaggaagtagcattttatgtgggagtcaatctgtgtatcgtagacataggcattcctctgggaggtttaataaacagaagcttgctttaagaagtgcaaaaggtgttttacctttgctcaaatatggtggtgatagtagaggagggtcatctataggaattgggtatagtgatgatgatctttctactgattttggagagattgatttagaagctcagagtagattagatgggaggagatggtctagttgttgtaagagtcaggatggagaaagagaagaagaggaagaaggaggaagtacaccggaaagtattcagagcttgagccaaaagtacaagccaatgttctttgatgaactgattgggcagagtatagttgttcaatcactaatgaacgctgtgaagaagggtagggttgctcatgtttatcttttccaaggtcctagaggtactgggaagacatctaccgcgagaattctttcggccgccttgaattgtgatgtggtcactgaagaaatgaaaccttgtgggtactgcaaagaatgtagtgattacatgctagggaaaagtagggatttattggaacttgatgctggtaagaagaatggagccgagaaagttaggtaccttttgaaaaaattgttgacattagctcctcagagttctcaaagatacaaggtttttgttatagatgagtgtcatttattaccatctaggacttggctatctttactcaagtttcttgagaaccctctgcagaaatttgtctttgtatgtatcacgactgaccttgacaatgttcctcggaccattcagtcaaggtgccagaagtacatcttcaacaaagtcagagatggtgacattgttgtgagactaaggaagattgcttcagatgaaaatctagatgtggaatcacaggcgttggacctgattgctttgaatgctgatggctcgcttcgagatgctgaaaccatgttagagcagttgagtttgatgggaaaacgaatcaccgttgatcttgtaaatgagcttgtaagtttttttgtttgttctatgtttcctttcctttgcattgggtaaaacttggaccaatgagtaatgtaaatgtgactactggtgtttgtgcaggttggtgttgtttcagatgataaattgcttgaactcttggaattagcgttgtcttctgacacggcagagaccgttaagaaagctagagagttactggacttgggagctgatccaatactcatgatgtctcaactagccagtcttatcatggatatcattgctggagcatacaaggctttggacgaaaaatacagcgaagcctttcttgatagaaggaactgtgagtatctgaaacttcaaagttgtttagttctcattatcttgaatgaaacagctaagtattgttctgtttttgttgttttttttgtagtgactgaagcggatttggagagactaaagcatgctttgaaacttctttctgaggctgagaagcagcttagagtttctactgatcgttcaacatggttcatagctaccttgcttcagcttggttcaatgccttctcctggaaccacacataccggtagcagtagaaggcaaagctctagagcaactgaagaaagcatttcaagagaagttattgcttacaaacagagatcaggccttcaatgtagtaatacagcctccccaacttccataagaaaaagtggaaacctcgttcgtgaagtgaaattgtcctcctcttctagcgaagttttagagagtgacacttccatggcctcacatgacgatacaacggcaagcaccatgacgggtcttgcaga

SEQ ID NO: 31421 - DNA, 5391 bp, Arabidopsis thaliana landsberg
attaccagacatcatgacaaagcctcttcatcctggtccattctattctctccttagtcgactatcggtttcaagcctctttaatccttcagatgattcggcttgagggggggatattaacatataatgtatagttatatatgttgttgagttagttatagtattaagtctcctttagcttgatactatatatactctattgtatgattcattttactttaatgagaaaatcactttgttaatagaagcaaacgatgtttataaagtatatgacacagaaataataaaaataaaccaaagaaaggatgcaaatggagaaaaagaattaagaagctagtaactaattataacaagttgtgttgctgcaacacgaggatctttgttgtttgtagtggaatcaacatcttatgtttctacttatgccacttttcttcctcttcatcatcatcgtcatcccatagcctctcgtcctaattatcatcatcatcccaccgccttctcatcctcttgatgtgttcactcaaatctttgatgatattttatctttacatcctaattagtaatttacgtatccccctaccaaattaatctaatcacgcaatcaaaactatttaaatattattaaattactttgaccaatctaagattctttggattagctaaacacatttccaattaaatttcatcttatttactgtccaaaaatggtaatgaaaaaactcgaatttaattataagctagcgtttgtttagtaactctattaagtattaacattctctaattttctttagacctactttttcttagacgccaaaagaaaaacacagaaacagtatcataatggaaaatatttatgttcttcttataaccatcccttgtgttgttgcgcttctcgcatgttgtgtcgtctacgccgtcaacggttgcaccgatcacgatgagatgcagaccaaactagttgacgtggaaaagggtataaccgtcacacaagatgttttagagtcgaagaagtctcatgtcgccggcgccaattatggcacttttcttcttcttcatcatcatcgtcctcccatagcctctattccttaccatcatcatcatcatcatcacagtgccggcttttcacgttgaagaccaaacaaagtaccagactacgatgatcatgcatatatggagttgtgtcttataatcaaaagcagaatatagtgctggaagtgttacataatcattgtataccaaaacacttttaaatttccaatatttcttgagaacagagatccaaaactaatatctttacaacaaaagttgcttaacctaacaagtaattacatattccccacccaattaacctaatcactcaatcaaaatcttgagcccagcctctagagagcaagaaccatctactttaccaaaagatgttatgtaaagttgtctgtatcgctattgtttgatcttggacttgaatagccttcatgctttagaaacaatgcataaagaagctcattccacgaatcaggaactccagggagacaccaatggctgcagtcttgcctgtggaatggcgcaggaccagccaagcccaggtagtacagtgatgggtgaccatcgtttctttgagcagccatggctgttatgttcaacactttcagtttaaccgtctctgatatgttcgagtagtaaagagacgaagacaagacatcttgaaggagctttatatgatcccatgtctctgctggaaccagagaagctccaaaatcaggcagtgtctccatatgacatgttcctccagttctccaatctcctcccctgaatacaagaaaacatcaattaaaaggagctttaagattcatcgaagattcttgttttggagatatgtgtgaccaacctgaaatgcacaggggcaaatgtccgaaagaaaacctgtgtcttgtttgcatcaacctcttcttgtatccatttcattacagtcttcatagctcgtctatacgcatgctctatcttcattctcattcttactttttctccttcttgaaagtaacaacctctgcagtaacaaattcaagttcagtcaaggaaccaaaccaatctgattaatatttagaatgttaaggggaagaaagaagctaacccgcgaatagttttctcatagttccaccaatgacccgtgttaaacactaatatatccgcatctctccacttatcagcagtccattccatcgtctctagcttaagagtggtctttaccttctctggtgatccttcaggtggccggctttgaagaaccaaaaacggtgctctatagtattcaacagtgcaattgtagtcatgaaacctgaacacaaagaagcccatgtgctttgtgatgggtctattgttcacttcataaaccaaattcttgttactgattgcagaagctagcatacaaagaagagactcccattggtttcttccaattgagtctcctacaaacactagccgcttgttccttagcttctccaacatcaacttagcatcaaatctgatacattccataacaaaaatgagtaagctttaagtaactgaattcaaaagtaacacatatggttctaaagttcttcctcctaacttactctactcatgccatacaatatttcctaaacataacatttctaatcccagaacatcaaacaaagagagaaaatgaaacatttacctgggcaaatcacaatggttaggttgccatctccacttagtatagaacaaatcaggtctcccaaactcagtgcatctgaatccttcatcaataaaggtacaatctttagactgatacaagggatacgattcgtcccaaacccatttcccattgaacaaatcacaaccattcccactctcttcaagaaacccaactttggtgttgttaacttcaaacccatcgagctccttgagccaaaggaatctctccgattgatccgaaaagtcatgacttttagttttagccacggttctgtaatcgaggtagaagaagctgaagactaaacacaaacccaccaagaaaaaacccaagactcctagtgatggctcgaacacgagccttaaacgcttgaatctctttattactacttcagagattggcatggcttcatcttcttcctgagatgggttcttcgacatctttgaggttttaagaagaagcttcagaagttgctaactttattaatatctgagtagaaaaaagtaagctgaaagagacagctttacttggtatattagattcgtcaaactagtatatgtattagcgaacaaatacaaatccaaaggtgtaattagcttaagattttcggtttcaaaatctaaaagagaagagtctcaacttttttcttgaccgtcttgtttcgtaaagggagagacttggagagtgtgaatcgtggggtccttttaagtggcgggtcccgtagatccaaacttgtcacacgcgcgatcatggcgcgtgacaaaattagtggggctaaagacggcgtagcttttagttactttttagtgcgcattaaaacggttaaggcgtttggttcatgcaccgaaaatagcgttttagtccaaaaatgtgtatatgtgactgatgagtaattagatggaggaatattctaatgagtaaagaagagtaattagattaatgaaggacgagagtccgacttaaagccgtccatgccggagattagcatgaacacatcacatgttatttgtctagggacaagattcaatgaaagtcagagagtgagaaccgagaaaaggttgcgtaccggtcaagatcaaattagtacctttaattgtcatattagactcccaaggtcgttaaaacgctttgtttaaataatgtcaagagaaatttgtttaatgatttggtccgactctaaaaccaagtactagtagcagtgtaagagaggatggatctcagatacgttgttgcttcctcttgtgcttccagccacagttcaacttcagccaatgaactttgattgagagagcagtcacaatggcctttgtttgtgatttgcatctggtaatggagctcacgattgttcaaggtttgcatcagtgaagccattttcttacagaccagagattgttttaggttgtttataaaggatggttcttaaacactagtgttttgtaacttcaaactgattaaggcaatcggtactatactgagatatgattttgagtgattgataaaaacaggccatggttgatagttaacagattgaacttacggttgattaagaagaaaattttgataaggttcttcttccttacacactttgatatgtctgaattgaaaccgattataagactaccttttctcctcccacccctcgacattgctattgtcccacctcgcttcttcttgttcatctacaagatcagatagtaagaacaacattaataaacactcaaagttctgtaagttagaacttttaagactatggattccgcaacgactaagaacataagggttcatccacaagatagagagtaagaaaaacatagcgaacactcaaagttctatcatggattatgcaatgactaagaacataaagggctcaatgctcattgatccaagaaaacacactatttagtaacaaactgaaagagaaagagttttcagttcagagaaactctaaacggccaatcatcttctcgtatcagcaccctgcaactcatgttttcactaatcacacatttacgtgaatcacaatttatgttctagcattatgcgatttttctccataaatgattcctaccaatccactccataaatttatttctgcaatcatacattgtaaccaatcggaacctgaagcaagatctcaggactgtagagtaaaaagattgaaactttctattgtactagtgccaattctcgaaaactttaacttgaatccgaacaaagacaggttttgaattactaaaacggtaaaaccagattagcatcttcacaaaaatctctaacgcatcatgatattggtcgagacacattggtaacttccaaagtcaaatagataatccatcaatcgctcacagcataaatctatctcttctgaaatgaaacagaagcagaacaattaagagcaagcgattgagagagagagagataacacaagaccttgttgttgatgttgttgagaagactgaagagatctttcgtattgttcagccttttcaaggaaaggcttgtaaccaagctccagtgacaagtaaccaaaggccaatgatcccaacaccaccaccgatgatcgaatcgcgttgtccatcaccgtccgcttcatcttcttcctctctgtctgaaacctccgactctgaaaaaagttgcttttttttcctctttcctataaaataattaaataaaaacgaaac

SEQ ID NO: 31422 - DNA, 1445 bp, Arabidopsis thaliana landsberg
tactcggctaacttaaatttctttttcatgatcaaagatgtgttggattcatgatggcaaaaatggtacttcaagaattgatggatccattaatctttgcgaaattgaagtctttcctggcaaaggtattattacttaggctacatagtttgatgttatgaattgtatgttgattttcgttaaattttcttctaaatatatatctaggggaatgatccttcctcgctgcgggagttttttgtgacgacgctcaatacaaactctgaatctggaaataccggagtgcaagtaagtaatcagctaagtgctattactagttctttcattcgatgtgagatttagcaaatgttttttttctctcagatacttgatagaaactggggagcaggttggcaccttttatctttgttaattgctaccagaccttctgaaagaataaggtaacataacattagtgcacgatagtattaccaatctataggctaaacactcagaagctacatttataaattctgttggggtttggtgcagttgcttggatgctcttaagcatccctttctatgtggaccaagatggcgtgttgccccatcaatggatatcatcagatggggtcttggatcaaccgcagtaaagatttcagaagaatacatttaccgcatgcctcaggtgtgtatatatgagatattttgctgtcggtttaaaatgtttgaacctttactcacccgctcagtcttctaaccggaaacgattcttatacagcgccaaagacttgcccacttcattggactgatggagatgctaaatccttatccaaagccaaacgtatgaattaccacctctcatgattcttgagctttgatatatgtattgcttattctagtgtgttatgtgtgaaaacaaaattgttttaatctcttgtttaacacagtgttggttggagcttttaccgggaagatggcgtcttttatactcaactggaaagcacataggtctaactctgcgtcagccttccacacgtgccttaataggcaacgttcacttaacgataactcgagcttcagaatccataaacaacacttcactttcctttacctctgatatacgcttcactgccataaccagcaaagactggccacacaacaaaatcggagctgctgggaaattacaaacgctctctcaattcagactaatagctggaaaaagactttacctcaaagaagagaaaaagaacattggtaagttctcaatgggtgaaccagatgctgaagaaggtttagccgagaagcttgaaaccgagaaatggaaaaaagtcgtgcccttcaaggagtttccgtcgagtcttcctgtagcaaaactcgtctctggagaaaccgaagtgaccctgaacatgaatgatcatataaattcacctgaaagtgtgattggagaaggttagaaagcaaat

SEQ ID NO: 31423 - DNA, 1990 bp, Arabidopsis thaliana landsberg
  unsure (1)..(1990): unsure at all n locations
catttttctattataagtcctctaaaagaaacgtaaaataaacctctacaccaactttagctaacacatgttcacaaaacattatgaaattataattaggctttgtttttatttgcttgataaaactaacacttactgtgcttgagtattctcaagacatataagcttagtaaccggatgatggagatctcctttgggactcctcacggcagcttcaatagcaccaatctccatcgtaccgtcttcctcattcttcaccgtcctcggatgcacaccaccgaggcttgaaacgccgccgttttcatatatatgaatgtgagagtcgtctccaagaatcacttcactccctctctcatcacaatggaccaacacgcttatcagattccccattgtccctgacggaacaaacatcgccgcctcttttccagcgatctcagccacctctttctccaaacgcagagccgttggatcgtttcccaaaacgtcgtcgtctacttccgcgtttgccattgctgaacgcattgactctgttggtttagtcaccgtgtcggagcggagatccacggttctaattgtagttggcgtcaccatcttgatttggctcactgcgttggattataaccaaaacattaaataaaagatcccattagaatgaaactcatctaaataaatataaagtcacttgagttttacttaagcatacctagattctgttctgttaggctatgctttttgttttcttggcgaagagataaaaagagatgtgcttcgggtgactcaaatggttgagagaatgagtgatcaaatcaaatacgaaatgacgacagggaatcttatagaaagaagatcggtccaaccaaataagtgttggatgcattatgacaaattggtaaagtaaggaattcctaacgtttttgcctaatttcttaacttatactgtactagtttccttgtttttcagtctatactttttagttgtatgtaagtaaataattctatgataactatcaaaataaaagttatgatagttaatattaaataaatcaatccaataaacatattaattttttatgatcgcaagaaacaattgttatgttattggtgtaatgttttgtattcttcattttatatattcatattattaaacattattctctatgaattttttatatatatagaaaagttatgatagttaatattaaataaatcaatccaataaacatattaattttttatgatcgcaagaaacaattgttatgttattggtgtaatgttttgtattcttcattttatatattcatattattaaacattattctctatgaattttttatatatatagaaaagttacatagtgtaaattatatattagaccgttgttctagtatattctaatctggttaataatgaacgtttgcgtggcctaatggataaggcgctcgccttcgaagcgggagannnnnnnnnnnnnnnnnnnnnnnnnnnnnnnnnnttgttttcagcaatttgcttatttcgttgaaacttggataacaacattcatatgtggctcttagtcgacgaatatgtatgcgtcggctaatttggaaaatctgatagcggcatcccaataactatactcgtaatttagcaagatgattacatgcataaccactctgacttataagagcgagacatgtaacagcacgagatcgagacatgtatatagtgtagagtgtacatacgtaagcaaacatcaatcaattttgtcttgattggtgatggtatatttattttttatgtagcatctctagatgctttcggataaaggtgatatgaatatgtttacaagaaagagacagaaaatgatatatttctgaataatgttttcttggataaacctcaataatgttgtttcgaatctatgatctctacaatattattaacatatatactacaaatttagcatctatacgggtagcgacgatcatatattaagggatcatgagca

SEQ ID NO: 31424 - DNA, 2449 bp, Arabidopsis thaliana landsberg
  unsure (1)..(2449): unsure at all n locations
agcctctggaacaaagggccattactggatagctcttcatatgttccttcctctttcactgtgccttcatgcacaagtacaattctgtccacttgtgataggaagtggagctggtttgtaacaagaactctcgttttctgccccagttctctttttatgcatttttcaaaaacctgaaacaatattcctagaaatcagactgacagtattcccataatgaccagacacaaaaatgttagataaattcaaaaatgaaatagactagccttatcaaagagaatcaatgagttagtacctgttgaccaacatgagcatcaagggcacttaacgggtcatcaaagatgtacacatctgaatttgagtaaacggccctagccatggaaaccctctgcttctgtcctccactgatattaacacctctttctccaatctccgtgagatcaccaccctattaagcaagagaaagaggttgaaacaaacttagcaacacgagaacaggcaagacaaatccttgttatcaactccacgaagctctcctcaaaacttacaggcagtaactctaggtcatgcttcagtgaagtcacatcaatggccctttcatacttttcacggtcgaaaggagaaccaaacaatatattgtcgcgtacctacaaatttttataagaaaatgcatatcagtcttctgttcaaaatagcttagagaatcaaatattgaagaaggtttccactaagttggtgaagtaactgacgcatttgagaacacatattgttctactataaaagacagaaaatacatttaacattatgtacaacagaaaaatttgcaacgtcagcccaacttaaaagtcaaagaaaagaagaacatactgttgcattaaagatccatgaaacttgtggaacataagcaactgatcctctgagagtaactattgcatcagatgttgcaggaagttcaccaaggatagcagatattagagaggtttttccttcgcctgtactaccaaccacagcaactaggctgccaagaggtacatccaagttgatatttgacaacgtcggcctatccccctgtagatacatagggttagctcgatttttgtactttctatggataaaggtaatgagagaagcgaaagaaggaacatggtatagaatagccaagcgacaccttagaatcccaagagaaatatccatttcttattgagatggctggctctccaggttcaatgggaggatttggtaagagaattctttcttctgtcgccaatacctcctcaagacgttttaaggatacattagcatttaccacctacaagtgaaaactagtcagcatcggcatctgtttctggcaccagcaaggataccctccagcatgtaaattcgaaatataagtcatggatttgataaccaaacgacagttactacaagcactaacagttctacttaatacacatgcattgcaacaacatatttaagaaatcacctgagttataatgtttggaagcatgaagagagggaaacgaagcacagcaaagagagagagtgacgtaaatgctcttgcaggggtcaggtctcctccaagtaatgtgaacacaccaaatgaaacaatagtcacaagaacaggaatgctattcagtatgaacatattcaactgcaaaccaagacaagaccaagcaagagttagaaatatacaataattagaggaaaaacaaaagtaactacgctgtagtcataccgctcncaggagctgtgatttccggaaccaagataattcatcatcacgaacagtttggaccttggactggaaactgttttcccaagcataacacctgtagcattttggtttagtacaagtttcctgcaaattaataactatgttaacaaaattggttctagaatttcttactttactgtatccattgcagctaaaacttcattcataaggccaattctcttgtcagtacgctgcagaccttcctttgtcagcttctgcattttgcttataataacagtctgttttaagaaaacagagaacaagttcaggagacgaagaagaagtagcctttaggagtacgaatgaacaagctaacagtatagagaaaaataagctacaaaggaaaaaaaatgaggaaatttagaagtcatgtacctgtaaagggaacataaggaccaacaacaatgcaccaatgagcgaggcaacnnnnnnnnnnnnnnnnnnnnnnnnnnnnnnnnnaattatacgaaatggagccgaccacatggtatgaagtgattggcatatttgctgccacagaaaatggaaaaattagtacaaagtacatctggttgattagataacaatattgataccagacacagttaagacgaaaacattaaacaagacccagtttaagttggcataagaaacaaaataaaaaagaagaaagaaaaattcaatgataacaaagtg

SEQ ID NO: 31425 - DNA, 6508 bp, Arabidopsis thaliana landsberg
gccatcatcaccaaacaaatgatctaattccaaagaaagaagaagcagaggaaacagagacagtacctctcacttctacatcaacaggtaaagcatcaccacttgcacaaagaatccaaccaaaatctctttgaatcttctgactttgcctccatccgagaagtcgaagctgtacttactagtcatgttatgatgcaaaagtccccaattcctaatcccttgcttagcatctttctcaacaagctcaaagatataaacctctgaaacaccttctttcctcaacggtgttccacatccacttctcagatgagtcaacaaagctttcaagaacatctcactatacaacaacgtcgcatctacttcactagtatcaattccagagctaggccaaccagtctccgccacaatcaccggaagattctcatgacccataacagccatagagctaatcacagcatcaaccatcatatcaaaaagattccggtatcttactccggtggtcagatcatctctgaaattgaacgggaactcttcaaaaagagcaaatccaatcggaatcgagaagctagaccgatacatattgtagggatagagattgatcaagaaagacgaattcgttctttcgaggaattgcaaaatcggtctgatgataacttctccgttaggttgttgaaactgcgccgacgaaggtggaaatgccgtgggtacgatgttgaagaaagagaacgtcgttgatacagagatcttgtagattctcagatctacaagagatagatgaacattctgcatcgcacggaggagaaacggagatacgtccggagaatacgaaatcacgtcgttaccgacggagatgattgagatcttggtgcgaggataaaaaggaagcacatggcgatagacccaacgcatcgcgagagaacgatttgaagcgaggagaggaactagtggatttggtacggagaggaagagagatacgtttgtgtaagcgaaggcacgaatcatcgccggatttgaatcgaggagtctcaccgccggaatgttcattgaaacgactttttcggcgattctgtccggtgagagttgtacggtgccggagattgaagctggagtcgagtatgtgactccgatcgttgtggcggaggttgtcgtaggtgtagccatggcggttaacgagataaggaggaggagataagaggagagagagtgcattttcttcattctctttttctttctttctttcttcgaagttagagagagaaagtgaaatcggagactgagaattctgatcaagagagactaaaggttgaagacgaactatgtgagagaatgggcgggaggattctgttagaggagttaatgttcctctgtgctacagtgtatgtttgtaactgtagacatcactcgtaacctagacgttgatgtgactacacgtgtcagatgtttgaccacagtcttacggcgttgaatagtatagtcaaaaccctctatattacttggaggcttctgtctagagaaacacagaaaaaacgaaattgaagatttagaaggaaagtttcagactttttatagataaccaaatcaccacacaaacatagaattttaggagacatcaatggaaataagaacatcaaagcatagattacacacacgctctcacaaagagaaatcaaactgaatcagtatggcattaacttcaaattttagactagagaggagaaattattggattttaagattcaggaacggaggctgctggtacccggcggcgactgctgcggctgcagagcgtttgatggaagcggatttgattaagtggttgtaacttcttttctccttgaagagctgagcgaaatggtgcttgcagtacaggattccttcaagagctgcgtagttggaaggtgaaattgggcaacctccatgtgagcacttgaagcaggacttgtgatatgtctggctctcgactgttacctgcatatttcagaatcgaaaaagacggatatttgtgaccaaatagcttttaaagatcccataaagagttttcatattaagtctcctttataggtttaacatgcaaattaaagtaacaagaaccgatatctccagggtctatgcatctgtgcaaaacatttggtttccttgcaagttctcggtaactgaggggattatgtatctatcctcaacatgaaatagaaaacacaggagaattcttgcaaatgatggaactgtgttttagagtaatactccaacatagaccttagagtgcagaaaggtgattccaaagcttcagttaatggaaaatgcatgagtgaaggaagagcaatgaaagattaaacgagttataaccttttcaataggatacacagttttactacaagtggcgcatttctcttgtgtaccagagaacctgccagcaactcggctaggcgtccttgtctgaaaacaaaccaagaaggaaatataagagaaaagttcaatcagagaaatgtatccaaagagcatctgaccaaaccagaaaagaaacatttaccagctcaggagttgatttgtcagccgattttgcagctgtgaggaaacaaagttgcaagactgattaaatcaataaccaaaagaagggcaagcgaaaaaaaaacatgaatcgaagcagaaacaaaactacatacgtgactgaaagttcttgttgaaactaccactctccttaaagagctgctcaaaatgaggcttacagtacaaaacaccttccattgatgagtaactactcagctgtaaaaagacatttactttatcaagagctgcttatggttacaatagacattcaattcatcatttaagcaagaagatgggtaattcgtaaactcattcctctaattaaagcagcatcattaacatgaatacaaagatgagagaatcagacctgaagcctgcttttgcagtgagtgcatttgaagcaagacttgtgatatccaactccatcagcagagagaagctcaacagcataaacagtcttctcacaagccttgcatttctgttgagttcctgtaaaagacatcctcaaagccttgccttcacttttctcaccttcttcttctttttctcaccctaaatttcaaaaaacccagaaaaaatggtataagaggaaacccctttggaaaaatctttcctttttctaaatattcgaataacaaaatcgatccattgctaattgaaacaagattgtatctatacgaagccgatctagatagaatgagatcgtaaaccttgagaaagtttatcacaaagtacggatctaatacctctccttgagctaaaccctgtcacgatctgatcctcaaaagaaactgcaaaaatacacgaatacagattaaccagagaaagatttgagagatgtaaggatgcaaaagtcaacttctttgtagagagaagagctgttacgtatatctctccccaattaacgaaaaaggaggatctatgtgacgatgatgaggacgaagtagaagaagaagatgatacagcaaaggaataagaatatcggagattttgggtaaaatccttttcttttttttaatctttgagaagacagtgggtggggttccactttggcttgtcctctgtatattttttttattagaatttaatacaaatgtaactgaagattattattggttacagaaaatatttgtcttcttatctttaccaaataaagagtttagattatctgttcatataactttatgctcctggaatggaatgtgttccagttttctaatcagatttgtgttatattagtaactaccaaataaactttggccatactcattaagaaacaccaaagcatagaacaaattagaagtcataataaatattacatacattgcacttgatcaaactactctaatattgtaggccaattctttgattgtcccagcttatttatatattttatgcttagtatttgatatatctaggacatatcagaaggcttcttaacggctcggagctgaacagagttgtcaaaacagtggaagaagccaaagtgagggaacttctcataccaagtttcttgtggtacatgtgtgtcccagtgttcaccgctgctgctttttccgtatttgtgaacccatcctgatccgttgtgaccttctccccagcttcggttccatctgtcgccgtgcttcccttcccaccaagtctcaccttgtttcactccttgagcgctcgggttaaagttctcgtcccatttgtctccccatttgtcccaaccgtcacctacccaccgttccgcccacttgtctgtgtactttgtgcttccgccttgcccgtcatacttctctccccacctggtcaaaaccaatcaagacatatttagaaacactctacattccctgttatttggtcacagcttgtctagtgtcagttctgttttgataacagttcaacaaagctcgcagactaagcttctaaatgttaatagagcaccttaaagagtatgaaaaggcaatgttttgctactgaactgatttgatgttcaacaatataaggtgtaaaagttaaaggacaaacattctaacttgtgttaaagagattgattgatattttaaggactgaaagttaaaggataaagattcgattatgttattagtgtttcgttatgtgaaaagaggattttgagaatacctctcgtgccagacatgagcgtggccagcgtcaagaggcgtgttgcggtcaatgctgcaccacttatgagcccatttttctgattttccggtagcatcgtaatgctcccaccatttctcttgccattcatcaccttgtccactctttccccatttgtctgcagttttctccatatgcacaacaccattctcctgtaataaacaattcaaattaagtctcaaatagtctatagtgcgttagatttactacggcaactactttacactaacctggctcattgactctctccagaactcacgccacacgtttccagtggcatcacgtcctgatttctcagaaccaagttccttgaacccaaaatcatcagaagcctcccaatacttatcttgccactcaacaacaccatcagcagtaaccccacgtatcattgtccacctgcaaaccacaccatcaggtcttttctccacacccgtttgcttccaccacttcaatccatcttcgctaactccatgcgttgaagattcatccaaactatcaagaacacgagctacttcttccgcgtttgctgaagatatgagatcaaggtcatgttctgtcgataaagtctcggagctaggcttcgtctcagcctcttttcgaacctcaatcaaagactcaaaaggcgggatagtaaagctatgtctttcagaagaaagcatactctcatatggtatcgaaagagaatccgctgatttatctttctccaatacaggatttggcaaagttggaaactcagcaggcttttccacagcctgcaagtccacagaactaatttcactaccttgaggaggtgtccatgaccaaaaatctggtcctggtgtctcagtccctgaagtttctgaccgtggcacatacactgttctgctccacattcctaataaaatttccaataacatagccaagtaaggtgactaatactatcattaactttggattgtgctaacaagtagaagatttgtaccaagtttagcatttttgggtgtctctgtgacttcacttgtgacagtgttgtcttcatttggaaatccttctttgccgtcgccggaattgttagaggcgagaatagctctagctgcggagattgcggcagcggcacgatcaacgacctgcattcgctgaatccgatctctttcctcaacggaaacctcgaggatcttctgaaactcatcgctcttcttctccaagtctcctcctttctccttctcaccatcaacagctacaacattctctgcaattttttcaaaggccttctctttcttctcgcgatcaacagcgttcttccacatatcgaggtacgattcgcgtccttcatttgaaaccctaagaatcctcacaccggttctactaccccttaagctcctccggctcgtaaccggtgcggtgaaattcacagaagcggagaagtcacgttgtcgtactcgttgtccgtcgtcccaatgagaggaacccaaagctgcccctatagaaacacctaaacgcaaagccatttgtttcttcttcttcttcgcttgcaattccaattacaaggaagaatcagttttaaaaacttgtaatcaaagagaaaggcgaaacctttgtgagatcgtaggaaaattaatcacaaaggaaagatttttgttacctcaagttgagctgagtcaaatcaagatctgtcctcgaacgaaactccaaaatacacggaagaagaaaatgatgcaagcaaggaatagaatctcgaggattgtgtttaaggacacagtgagtgtgggattgtaacttgtgtactttggctctctttttttttcttatagtcggcacc

SEQ ID NO: 31426 - DNA, 1761 bp, Arabidopsis thaliana landsberg
agttgcggcgagtgtcgagtcttctgaagctcagaaaaacatcaaactttgggagggtgtttaaagaatctgacatttcattgattctaaagagaaatggaatcagtgggattaataaccgtggacgtgtaaccgtgtgggaggattttacatagactccttcttctgcttcagagacaagttaaatttcctcgcattttcttatttgttatttttgtcagcttgtaaccaagaaaatatcaaagtcaactcaatgaaatgacacaatgcagtgcaatattttagattaggcttccggccgagagactttgccggttttcttgccgccggtaaaaccattttgtgctccgttttccttttctgtttgggcctccttctccctatttgggctgggccttttctgattgttttgtttttctttgtttaatttcagttaccatctataggctttagcccactttgttgttcccataaaaaaagtcatgaaaacgggtccatgagacgtaaaagcctgagaaagaagcaaacaaggaatcaaaaagcataaatcggacgaaggatactggcagacagatagagaaattgtacccattcttttgtctttctcagacagaaaaattctacagtgtcagtgagagaaagcagaagaagacagctttcacgtttttgggatcttcctcttcaaaagcttccctttctctgttttatcttgttgttagtcattttagattccaactttgagctatgaactttagttaggtataagtttgttgtgcatatggaaacatcaaacccaaaactttaaaagaaaaattgtatattgtattagttagtctattcaaaattacaaacaaaatactccaaaaaaaaacaaaaacattcatatttcaaaaccaaattaacttcttttttttcacaatttcctttaagattaattaaaccaaagatacaaaatcacaattaagcaaacggaactctttgccaaggaactcgcttttacacgagtggaaaggaaaacaaagtaataaaaggataggatggtatcccaaacgagaaccggaaggttatttggagaggcttcaaacttaatcaaagccacattcccttaacttaatgtctatttgcctatgaaaagagatttagcttcacaattgattcttaacacttcccccctaaccagatctaccacttagacaacctaacaaatttgttgccctatagtaaaccaacttgaccgcagcagaaatgtctctctttttaaaggcgaattgtcggaagagttcacaaactttctggaatttcaaaagctccacttcgtagacaagctttataccagcagaaacaaacagatgcttgtcttgtgtagtgatgataacaacacttcccggaccaaacccgttgaaatcctctgcaagagcatctaactgttcaagcttataaacatcatcagccacaagcaaaaccttttggtccttaaggttatgttaaattccttgaatccttatcaaaaactattagtgtagatgcgataagtgacgaccatgagaaatccttttcacgcttcccaagaaacaatggctgtcaaagtgttaacagatgtcttgataaacatatttagctaaagctgatctaccattgtatcctcttgcccaaatcccaaccactctcaaacttttgttgaaattcaaatccaattttttgttaagagccttcatgtgtgtatcaatcccaaccaggttattcccaccccttacagttgta

SEQ ID NO: 31427 - DNA, 1919 bp, Arabidopsis thaliana landsberg
tctaacaacaacctgtcttctagagagagctggtttttgtaggtgaagtcaggggagagtgatagttgcgtgttggagatgattctgttgttgggtggagagacatggttggtttcttgaagcttaacgccgtgagcacgtttctttgatgacttcattagtcgatgaagccatacaacgagttcgagtacatatgaatcaactattggtttatccgcatgatgaagcgtctgaagtcgtgttggattcccgttgttctcgccttttccttttcctttcccaaactctatcctgtattccaaattaccaattcgtagtttgctagatcagtttcaagattcaaaattcaaaacttcagtagctgatagagacttaccttgaatttgcccattcacctacccatccgaagccttgatgtgctctgtgaaaattgaatgtgaccaaaatgaacaaggagaaacatattaaaccaaaaatgatggtgaaggaatacttacttggtggtgttttcagcgaacgggacaagccattgaagcgacttctccatttcagctttgatctcaggtactgaaagctgcagaaacactcaagttaggtaacaaaacaagaaacagaaccaaacaatgcctgacgatatacttgagaaacagagatcttttttggacaaacctcttcctcctgatcaagagtttgtagccgaggacgaagagctgtcttgacagtagcgggtaatgcattgtacagcgtgtcccttacattagaaggaagtgacgatggtcgagacgcctagaaatttcaaggatcagtttcaaccagagaatatatatcagaataagactggtgagaatctggaatcttaggcttacaatattatcgatttgttgtattagattagcatagtgtaacgaaagaccggcttcacctaatcgttctcttccctgctccccttcattgtctcttagacctattgttggttaagaaaatgatagttgaaatttggttttccagaagtggagtcattataagaggaccagcggtacaaagaaacattaccattgttgccaaaaacttccacaatcgtctgccgtatataacttacaacatccacaagcttctcaattatctgcaacaaaagaagatattagaataactagcatatgtaccacacacttagacacagcaattcaataaccacttgcctctgccagattctgggaccatagggatttcttctgtaagctcttcacgagtttcttctgttgttttagttcattttgtaagatgacgataccctctcctacatgtagaaaaagaaaatgaaatcgggtgttcttgaaagagctaagactgatcaaataaatagtaagaccaacctctccgagggaggtttaaagactctacttctgcaagctttctcctgtaatcttgttcaaacctatccaaagcttgcaactcgtgatataactcctgataaagccaatgcaagttagtttcaaatctcccagaaaaagattacaacagctcattgaaacttcaacatggaaacatacagaagtgattcttgcaagagtgacgagctcttgcatccttgcctctgcatcatctttgagcagtttatgctgtgagttctctgtgtcaagcctgaaacgttatagacccgtgtacaatgaaaatctactggcatgtaagtgactaaaaagcattagataaggacttgttcaacacaaactaaacttacttcataaaatatcgatcgagattgtgccactgcagatctttgcacatattaccaaacctgataacctctccagagaaaagatcgagttcctccctacaggaaaaagaaaataaatcaagaaagaaaacgaaccaaagacagaaacaaatggggataaattatgaactcacccctatgtcag

SEQ ID NO: 31428 - DNA, 711 bp, Arabidopsis thaliana landsberg
taattttatttaatttttcccaatgatagtgaagaaagactatgatccaaaaatattattgcgttttgatttgtgtacacccttgtatttaataaaatttgcaacacgaatcaatgttggcttgtaaccacccgatgagactaatgctatcactcgatactatttgggtttcaaaatcttttttatagcttaagatttacctagaaaacgtcgacgatattacatagccttaccactcttttttacttacaagtttgtataatcataagttcatagtatttttatgttaccatatacgagtatttatttccactcaaagttatagtgtagactgtagagttctctcgctaattacataaggcctacaaatgtgtgttgttgatagtgaaacactattacaacattcaagcttcgttgatgaagattatgtggccgcgttacaagacgaaatatagatgtgatgtattattgattggaatcatatatagtctcacttctctaactagctgatagaggggtaaaaaaaaacttttttgaatcccacccaacaaaaaaataattaaaatagtgcatatgattattgtacggacaaatccttgcaaagcggagacgagatatgaaagaatcgaatttcatcaccaaaggttgaactaaagagtgaaacataattttagaaaaggtaataggatgatattaccataaatatgcggg

SEQ ID NO: 31429 - DNA, 9032 bp, Arabidopsis thaliana landsberg
tttttctagtgtagtagtgttgcaatgctatataatgtatgtggtttgagccagtcaaattatgactttgtttgtacaatatggaaatatacatatcttaattattaatggtgtgattgatatcgttaagccgtaaaataatcgtttagcttgctaaattacacacaaaacataaagtaggcaaatgaacatatacgatagtgaatagtcaactcgtgggtcacacaattgcttttttgctaaacctcttaaaagaaagcgtttcagacttctttttgcaataaaatcagattctttgaaaacttttgatctttgcttcttaattatagtttcattttagttacaatatattattgatatttctcaattttacaaaattagtttcttaaatcttacttttataaatcaaaatacttctacttatttagaaacatgtgacctctatacaatccaaacttattaaatttgtttatacctatattaaaaacttattactaatatattagtactagtttactagtactaattagccgctatagttttacaaaaagtggtttagttttcttattcctcattattgctactacacttaacccaatggattgaaagagttaactatgggtagagatgacaactttatgagctgagaggatacgaaattatggatgtgtagaaaagcaaagccagtgaaacagttcaaaaagtgggtttttcacatttattatgacaactaataaacacgtaagtacaaaatcttaaagcaagtaagtaacaataatttttgctctttttgtaactcccaactctttctgacacaaaaaaacaccatatcataacttaagtaacccaaaaccaaactcttccaaaacaaaccctaaacgcaaaaatcattactcaaaaaaaaacaaagtctctctcttctaattagagagccaagaagatgcagagtacttgtgtctacagagaatgcatgcgcaaccacgccgcgaagctcggctcttacgccatcgatggctgccgtgaatactctcaaccatccaccggcgatctctgcgtcgcctgtggttgccaccgcagctaccaccgtcgtatagacgtcatatcttctcctcaaatcaatcacacgcgcttcccgttcacgagcttaaggcgcgtgaagcagctggcgaggctgaaatggaaaacggctgaggaaagaaatgaggaggaggaggatgacacggaggagacttcgacggaagagaagatgacggtgcagaggcggaggaagtcaaagttcacggcggagcagagagaggcgatgaaagattacgcggcgaagttgggatggacgttgaaggataagagagcgcttagagaagagataagagtcttctgtgaagggattggtgttactcgttatcattttaaaacttgggttaacaataataaaaagttttatcactaactaattaactaatatccttaattgagataatactataatttagttccaatttcattttcatcccttctgtgttaatttctcctccttgatcgcttattttaatggattattattttatcattagtgggtttaatgtgtttgatttggacatgtccttaattactaactggttcactctttaattggtctttatgattcttctttttacgtcggtgggatttgagttttgacaagacaactagctgacgttttatttatggtcaatactgttcgccaatcagaatatttatacgtaataatattgaagtagttgaatagtagtactaattattatgggaaaggatggcaaaatgacattttgttttgatagaaaattgtaaagattacatatctaattctaaaatttgtaaataattaatggtaagatatatttcacgtaatgaaaagacaattagttacggaaataacacaacattgtgttttttcgaggtttgttactaaaaattataatgacatcatcaaagccaataaaagctgttatgcttttttttgtagaaatagtcatttcaaaaataatttttatactttttgcttttttataaagtcgtaaaaccatatacttaaaagtatataccaataaaattgtgaactaattgattcataaaattgtaactttgctaccattataccaagcatcccattcccacgaaagtttcaactttaattgggcttttgttggcatttcaaggccaataagaacacctttgagaaaactaaaaaacatagctctagtctacaattattctagtgtttacctactgatttagaaaatgattaggatttaggaccaggttaactaaaaccagagacagtcttgcccggctcgatctgaaccaagcttgcccgtaatctcaatccaacgtacaaaaaacaaataaacaaaactgtataaaaaagtttcaccatacaaattgtagacatgattacttgatctagattcaaatactcgttaagatttgcctaaacacagattacaagtgtgttttgtgaaatcaattcgacgcgtaattcttctccctgagacttttcttgccagaaagtcctagaaatcactgatgtcggtatcttcgctgtctgagctaccattctgtgaactgctgtcacctaaatgctttttcttccacacgaatggtaacaaaacctttcttgcataatccacaccgtacacgacggctatagccacagcaatagatccgaagatcttggcgagtattacacaaagcctgcaaaaataacacaacaaaatatgattcatcacctcacctcccaaagtaagtgtataacaaaaaaacatgagtctgtccttactctgactgtgacttcatgttattaaccatctcatcaaaggagctctcttcactaaacactattaaagactgttccttggatttttgaatcatgagattaccagctttgtctctaacagcctatacaacagtacaacagaagagggaaaaaaatgtaactgaactaaccgctaaaacgccactcttgcaggatccacatttcctgaataaagaaacaagtcaaaaggaacacttcctttacctcaccaacaaaagtcaaagaggtaccaactttaagagcctgcccaaagataacctaaagaaaaacatcacgttgttggtttcaactttcaacacaaggaattagaggttttctagggaacaaaacagagaaggagaaaacaatgaaggaacaaagaaccttagagccttctttgggtgaacaaagacttttgaaggattcaccaagtgattttacttcatacggtcttacaatttcattaaaacctagagcaccttcagctcccactacattcacccgacccgtactgtcttcctaattgtgtgtgtgagacacacagagagagagagacaacaaatcaagaaggcaggcttaagtcgtgggtgggggggggggggcaagaaatagcaaatgagttgtattttaccagataccaaggagtctcctttcgttgtagaagaagatttacagacttgtttatcaaaccaccatcttccaacttgttctcataaaccactttggcccgaagacagtatatgtgttatgacttatgactacacaccaccaaaccagagaatttaagcacacatgattgccaactttacaaaaaaaacaatcttaccgtattctcaaaaacaacacccaaaagatcaccatctttggagttaaaggttgttgcagatgcaactcttccggataccaaaacaagaagattcgttgttttttctttaagcaaatcatctgaaaacacaaaaataatacaataactggttcacattgtaacctgaaaggctgaaaccaatacagaatgaagtaggctttgaattccatactaagagaaacatacctaacttttttaagtcaataacgcgggtaatactgttaaaatgttcaaatctcctgcaccatcccaaaagcaatcatacattgattgattgatttattaaaaaaaaaacattcaaatatgcaaaaaggattgggatgagactactaaactctttaatgctctccccccaaagataaaatactgtggcacatgtaacacatatagcaagtccttcaagcatttgaaaaaaattcaaacaagatttttgcatcaaaacgataataacttcctccacaagttctgcataacatgatcacaaacacaaaacgttacacaccctaacctaatcgaacctctaaaagtcccaccacattcccaaaaacaattatgctagttgagaataagaagcaactattttaaaaacaataacaaacaatgattacgaaacaaaggaaacgagagacgtactgtcgaagattaggaacctaggagaaatagcacgagagatcaattgcttaaaccctagtgtctctcaagtctcaaacctccgagcaaaaagtgtctttttcctttctttctttttttctttgccagcgaaatcatcaaaatcgtgttaatccgtatttataagaattcgatttcgatttgaaccaaaccgtaataaccgatctcaaaaccgaacagaaccaaaatatctaaagatataatttcactacaacccgaatccgacgaacaaaccgatccgaaaccaaatcaatgtgttggatggaactaggaagtgttagagaaaaggaattctaggagagtaagtaatctgtataaaatatacacacatgacacatccacacaaattgaacaacataccaaagaaaagatgaaattaaaagaaatattttgaagctactataacaaattaacaactcaacataacatccattttctactcttctattaccctgaagtatccgtcacaagtcaactcaaagtcacacacatacgaccactaattgtctacggttacttgatctgtatcagtaactcctccttttgattacattcatctaactcccaactcctactccatctcaagttcttgtggttgaaccaactgctgcctaatgagacttagttatataacggtgaatctggttcagagccgcaaaccgaagtgtatgtagagacagagtcttcctttggtattgccacaaagttcaaaggagctgttgacagtcttcttacttccttgaaatatccgttttggcgatggcttgagtatgatcttggggtggtcattatgtcgttatttgttgctccagctgagtttctgcggggcgtaggaggcacagatgcatccccattgtatccgttggtctttcttacactgttgcttcttcttggactcggttttgatccataaattgattccctccgctttattaacagatcctgcatcttcttttgatcctgcagagaaaatgaaataaaattgtttaaaaaggcaagcagtattacaaatcttcaagggttatgtaaaagagagctttttgacaaacccggtatcgtctcttttcctcttcctgttgtttccttgtcaatttataatcttcaagtatggataccaatcgaacctggaggaaaccagtaaccatatttaaaggatagaccttgtggctgtgtttactataaagttactttaacttacaccatcatatagaaatgatttccgtgtttcgtcctcccatagaagtgttttcttgatgagattgtcaaccattgctacagaaaacaataaaacaatgcaacaataagctaaagatctcataagaatatttggtggaaactacaagaacatacatgggatcttgtttactgtgatccgggcgcgttctgcatgcttgaggtttacatgtccacctcttccggcactataccgggtttcatcctaaaaccaaggaaggaatttctcagttacatcctccaacaaacctatttgcctacaaggaaaatttacctgattgtattcttctagccagttttcctcttcgcacgcagataaccagcggtcaatcctatcgattatttctttccggctatgtgcttcttctttgattttgtttatatgcaattcaatatttgtaagaagctctgaagggtccactaatcctgaagaaacatgaggaaatatattagcaagaaaataagctactcatatttctgagaagaagaagataagctctatcacttttagtaccagaatcaatcaaagcagttgatttctcaagcgatgtgcttgtgtcagcctcaatgtgagccaatctgcaaagattctctaactcagtccttcttttcatcacaagctccttcattctgctagctttcagcttattaaaacagtctacttctgcagacacctgaagtccaagggagaaacaagaactcagagatcctgaataacattaatggcaattaaaagttgggaaaagaaaagagctgtgtcctaacctgttcaattgtttcactagagaggatatttggctcagtgatatcagattctgatgatcttacaacataactgacacttgcaaatttcgttctttcttcttgagatgtgtccattagattccatagctcaaaaagtgaacccgctacatcctttaactgcacactcaaaggcgaaaatgctaaggcatcaaaatgataatcagttacaaagagaagaatagcattgcaggcatgtttatctaccttttgaaaccgaacgctcctttcggttttcagcttatgaatcatgtggtgtagaccatccaatgtatcatcagaaatgtttgtagactgctcatggtcagtcctatgtaagctcggatgaacctcactaacagtttgaccaaagtcgactccaagaacaccacatagagtgtgcacctcattcacatagtccaaaaccttgttcagacgatccgactgcataaaaaacaagaacatatgagtaagcaagcagcttgacttaacaaagtaaaatctgagttcatcttcttattgtattcatgaaaacttccttaccttctctttctggagcgagcggagatgtgtttgatactcgttaagcttccgaagagtcaggtcgtgttcatcaagagccaaagagccgaccatcgttttgttgagttggtcactgtatccagatatttcaccactcatcttctcaatttgtgcttttatatccacaaattgcttcattctttcatctttttgcaatcttaagtcctcaagcattggcctcacagcagcaagtttttctttcaatgattttgaaccttcctttgctttcatctgtaaccataaaaacacattttaaaaacaaaaaagatggaaactttcctttcattaccaataaaaagaaaccaagtagactagctcataccggtgagtggctgttgaacactccaagagcagccagtaaagaagcaatttcagcttcaattgataccaatgactgatgaagctgtgccttggaattagcagcctcgtccacttttcttctgtagatttcaagacattccttctccaattccattagcatccggtctttctcagcatcactctcaccaatatcaacccatattttctgctccaaaccaacaaattttgccattaaaccatgaaatatatagatactccaaacataaaaatcagatacttgtagaaaaacaggtcaagagaagtctcagaaactaagaagaggtaccaaaattcacagtaacccttaaacctatagttgacagaaaaaaaggagaagactttacctataaagaccctaaatttgtccttgaagcatcattatcaagaaaccctaaattttccaagaaacagagaagaagagggtgaaagaaaaacctgaagctctcgaagcagagcattacaagtagtgtttgtacggaaacagagactcgtagggctttcaatctccagcatttcagctaatttgtcctctctctgacttgcttacttgctccaaagttagaatcttgaactagagagaaagaaagagagctcagcttgtgacaatggctgcttaaggtctcaaagaaaccacacaagatataaaagactcacaggaacaaataatagcagatctaaagcttaacatagcaaaaagcttctcattacttttgcagagagaaaacaatagatcagcaaagcatagaattccgagcaaaagtttgcaagaaaagagagagggttaagttggaaacactaaagaaagaagaagaatgtggagagaaaaaaagtctgaataaaactgagcttctttttgtcatatttacactattaaaaatttatactacattaatgttatttattattttgttattctcttttctaattttcttttgtcacctactttatcttgttattctctgatattagtagtatttattcgtcttcatgaaaatacgataaaataaagtaattaaagtgacggattctcgggagcgcgtgggttttagaggagcgttggtaacacgtcccaatagaataaagagaataagatttgtcttctttgatgatcagatgtataaaagtatttatagagtactcaattgtttaggtatatcgtatttgtacgttgcatgacgaccttttggaccaaccaaattttttagaattagtcttatgcatccaaaaaaaaaaattgtaatttaaatactactatcgacgttgaaatgaacctttaatcatgagaataaagaggtaaatcacttttgaatgatgaaatgcagaaatagtatttgttttgagtgaagctaaaattaatagaagatgtgtgtatattttacaagaaaaatatgccaaattggtctaatcaaaagcaaggaagtggtggtggccaatgtcactccactccactaatttcattaagaataagttgaaaatcttatttctatatttaatttaatcagcaaaaaaattagtatcattatccaaacctttcattattgcttgccacaactgctaattttttttttttgttgtctgaattttattaaaaacccaaggtagaataccatttgaaatacaaacgccgccagaccaactaaatgtctccaaaaactaagccaaaaagaggaaaactaagcctcaacggaacggagaaacggtttattccggcga

SEQ ID NO: 31430 - DNA, 1376 bp, Arabidopsis thaliana landsberg
  unsure (1)..(1376): unsure at all n locations
aacttcctgataaagattgattttttttttagggtttgttaagatttgagttgaatcaaaaagattgaatttttttattgtttgatttgaatcgatgctaaagtttggattttttgttttgtctctgtagtgatgatgactcgaagctggtggacaaaattgctaacgagatatcaaacaagaagacgatttatgcaacaatatgatgagtccagacgagaagaagaagaagaaaggagaaggcccataaggactcgcaggcccaatccaaagtatgtccaacactaagtcatttgacttagtctttgttttcgatttagttacaataagcattgagtcttccacgattccagtttccatctttcccaagtttgtaggagttgttactccacgtttgtttccagttgtaaggaggtgtactccaagtatttatatcaatgaaaaacaaaacaaaaggtagtcttaactaccaccaaacaatcgtttatcaattctaagaactagaattctctttggctttgaagagggaccattacaataaacaatgggaagaatctagttgggttgatacacacatgaaggaactaaaccgattaatgcatatgaattgcaacaaagttactgtaagaatggttggtatttgggcaagaggagatcagctttagctaaatttgtttatcagaacatctgtcaacacttcgaaagccattgtttcttggaaagtgtgaaaaggatttctcaggatcgccacctgtctcacttacatgaagagtttatgatacggattcaaggagaatgcttgagtaaattaaggctcaagaaccaaaaggttctgctcgtggctgatgatgtgaataagcttgaacagttagatgctcttgcagaggactttaactgctttggtcctgggagtatagttattatcactacacaagacnnnnnnnnnnnnnnnnnnnnnnnnnnaaaacttgtttatgaagtagagcttctcagattccagaaagttcgtggactcttcagacaattagccttcaaagagaaagacatttctgctgcgttcgaggtgtctttgtatagggcaacgaatgttgccatggaatggttaggttgtatatgtggtagatcaggttaggggaaagtgttagtgttagaatcactttataaagctgatcccttttttcatgtacattaagttaagaatgactaaacttagtaagatgtgattgtggcttagaagtaggaatgttttgtctatttttggagtgtgttgctggtgtatagaagaatattattctttgattggattaaataaaatacaaatactatttcaagtttgtgttttgatgtttccatgtgcccaacaaatttgtaaagga

SEQ ID NO: 31431 - DNA, 1358 bp, Arabidopsis thaliana landsberg
ctataaggaaagaacagtatattacaaacaactgttacatttttatgtaaaaaaatgtcttaaaaactaagggacaaaaaaatgtatattacttcatccaatgaagagtgacatttttctacaccccaagagcaacccactccaaaaatagacaaaacaatattatttctaagccacacaacttattaagtttacttaacttaatgcatatgactaataagggattcaacttaattaaactaaatctgtcactttcccataaccagatatactactactttgacaacaaaaacattccgtggcaaaactctttgctctacacaaagcccgctggaacgcagcagctctctttttaaagcccaatgatcgtaagattccacaaaacttcaaatgctcaacttcgtagacatctgttataccataagaattcaacaaccccttgttgtctgtagtgataataacaacactcccaggaccaaaactgctgaaatcccctgcaagagcttctaactgtttaaccttagtaacgttgtctgccacaagcagaaccttttgattcttaagacattgtttgttagagtcttctcttttaatatttctcagaaactcgtcgtgtagatgcgctgagtggcgaccctgagaaatcgttttcacgtttccaagaaaacaatggctgtcaaactgttgacaagatgtctgataaacatatttagctagagctgatctaccatcgcctcctcttgcccaaatcccaaccattcttacagtaactttgttgcaattcatatgcattaatcggtttagttccttcatgtgtgtatcaatcccaactagattcttcccattgtttattgttgcataaatcgtcttcttgtttgatatctcgttagcaattttgtccaccagcttcgagtcatcatcactacagagacaaaaaaaaaaatccaaactttagcatcgattcaaatcaaacaataaaaaattcaatctttttgattcaactcaaaaaaaaaatcaagttacgaaatttcaccctgaacaatcgccggagagttgcgcaaaattggtcaatgcttgcctccatttaagcactttctcatgatcttctctactcccatgtttcttaaactgttcagcgagtactccggtctgccacctcacatgattcggttccacgccgtagaagatgggcatcacggtgatggaaccctttttttcgaaatccatgatcgttacgagctcatcgagacaccaagaagacgcagcataggtctctgagacaacaacgacggcgaatcttgacacctcgatggtgcgtttgagctccgacgaaatcctctggccattctccagctctt

SEQ ID NO: 31432 - DNA, 1219 bp, Arabidopsis thaliana landsberg
tgagtcagagtttgcagcagatgagattgaacgtgttgtcaggatacagcccacactctcaattgcagagttgaagaaatggtggaaagaaaaaactggctatgagcttcaaacttccaagatgcgggatgggaaactggaagtaatcaaaagagtatttggagatgaggatcaaagtttcagagtcatgcccaagttaatgtctgcatttcactcatctaatgggcttctcgtggactggcaatatgatctttttcctaatcctgattttgcatccttccgtggcgtgttttggtcattttcacagtctatcgaagggtttcaacactgtagacctttgatcgtcgtggacactaaaagtttgaacggtaagtaccaattgaaactgatgattgcctcaggagtagatgcagccaacaaattttttccccttgcctttgcggttactaaagaagtgtctactgatagttggcgttggtttttcactgaaatcagagagaaggttacgcaaaggaaagacctttgcctcatctccagtcctctccgggacatagtcgctgttgttaatgaaccagggtctctgtggcaagaaccatgggctcatcacaagttctgtctgaatcatttgcgctctcaattccttggcgtttttcgagactacaacctggagagtcttgtggagcaggctggatccacgaatcagaaggaagaatttgattcctacatgaatgacatcaaagagaagaacccagaagcttggaaatggttagatcaaatcccaagacataagtgggcattggccatgacagtggtctgagatatggaatcatagagatagatagagaagctctatttgcagtttgtagaggctttccttattgtacagttgcaatgacagggggtgtgatgcttatgtttgatgagttgagatcctcttttgataagtctcttagttctatttatagctctcttaaccgcggtgttgtgtacacagaacctttcatggacaagcttgaagagttcatgacagattccattccttacgttataacgccgttagagagagattcatttaaggtctcagagtcctcagaaaaggaggaatggattgtccagttaaatgtctcaacctgcacgtgtgggaagttccaaagttacaagttcccaagtctgaacgctctagcagtctttgagaagctcaaaatcaaccctttgcagt

SEQ ID NO: 31433 - DNA, 633 bp, Arabidopsis thaliana landsberg
tatttgaacagaatgtatgtgtcacatatccaattgcttcttgggtctgttgggtcctctgtcttttcaaggaactaccaagattttctaatggcgatgaacaagcagcaggatcaataactccttcagatgtcgatttcacttccaaatacaactccacaagtttaatagaaggataattgcttggaacctcaagcatagtctccaaactagagtcgttcaccaccggaaaatgtaaatacgtaaacagatccggtgaaagaactgcagggtacctaccaaagattgaaatctttgatctttgcttagctaatccaaaaattggataaagcccattcaacagtgtgttaaactcagtattgcgcttaactctgatcttttcaggactagatccttcatagtatacgccatcaggaccatacttaatacaagcattcgtataacacagcaacataacatgttctctcaaggtttccatcgccatgaccacaacagtcctgaagtagaatcaaagaaaaatgaaaactttttgggcctaaactcataacatacaaaacactagaaaactccatatctaaaaacaaaggctaaagctttttagagacagaagcagataaacccatttatgaaaca

SEQ ID NO: 31434 - DNA, 2734 bp, Arabidopsis thaliana landsberg
  unsure (1)..(2734): unsure at all n locations
agtaacatcccgaaaatgctaacgaaagtattagccaaattctaaagcatcaattgtgattacactcacgattgtcaatttaaaaaaaacaaaatgtttgttaaacctttttttttttgtgcaccaacaataacaattttgttaaacaacagtgaagaaacattttaatgttcatacttcatatactgtataaaaaaaattgacgcatgtgagaccaaaaaaagaagttaattaatacgatggtctggtctttgagagtagaacagacctgtgggacatgtactgtattgtgggccttaaaactttagcaaagcataatcaccacctttgtctctaagtaattgacctacttgccctctttatgccacaagtctattggcatgtgtctcaaaaaactatatgctacaatctaaacattgtggattcgtgttttagatggtttgataaaactatcttattagaaatgctattatatggttgggaatgatataattatttattgccatattttgtccttcaacgaaagctacttttatcggacaatgtttcgtattcgtagagcaaaagcttccttttgtcatttggtatcgcagaagggcagtttggtgaattaacaagacatggaatctaatcacacacaaaaatcaatgtttaaatcttataaacaaagtggggaagaagagacatgtgttaacggcatcttctatgagtcaactaaagtcacaaagcatacactaataaacaagtatcatccaatcagtaatcatgctttatctataccaaatttaaaatcaaatttcatttgttttctcattatcttacagaaaaagagatttccagacaattggtcataaaaaggaacaacctttcatcaaattgagtgcacattttttgctttatgattgtttttcgtgacccacattctaaatttactgtttctttcataaagagacgaagaagaagaaaaaagattctcagataaattactgaagctgccattaatgctgctcaactcttttgtcattaatgctcttatcatcttcttctctagcttccctagtttctttctcgtctatgtgttgaatccgacaaacagactcacaagaataccgacattctcctccacgatttctgcatttgtcctcactctctcttattcttcttttgctttttgtttcctgacctctttctcagggattttgattataaaccaattcagttccttggagtttgctccagaggagcgtctgggatcacgagcttggtttgacttgagttgactagaaaacacctagatgggtctctttcattttcctctcagaatccaagtctgcttctagttctagggttctgtttcaattcatctttgttttcttttcctgcaatggaacaattaaaggttttacctttgctctttctttcatgggttatgttcttacaaagcactcatcaactgccgaactctcagactcaggtcctgtatcagctcaggaagcatctggaattccctaaagctctggaatcttggggaaattactatggagacttatgtcaaatccctgcaactgctcacatgagcatcacctgtcaaggtaattccatcacggagcttaaagtcatgggggacaagctttttaaaccatttggtatgtttgatgggtcttcacttccaaatcacactctgtctgaagcattcataattgattcttttgttaccacattgacaaggcttacaagcttgagggttcttagcttagtgtctctaggtatctatggtgagttcccagggaaaatccatcggttgaattctcttgagtacttggatttgagttcaaattttctgtttggctctgtccctcctgatatttccagattggttatgcttcaaagtctgatgcttgatggaaattacttcaacggtagtgttccagacacgttggattccttgaccaatcttactgttcttagtttaaagaacaatcggttcaaaggtccatttccttcttcaatttgcagaattggaagactgacaaatcttgctctatcacacaatgagatttctggtaaaatgcctgatctcagcangttaagtcatctgcatatgctggatctgagagaataccactgggatttctgactacctgtcatgcctataagattagttactgttctcctgagcaagaactccttctcaggcgaaattccaagacgttttggcggtttgtctcagcttcagcatcttgacttgtcgttcaatcatctgactggaactccatctcggttcttgttctctttgccaaacattagttacttggatttggcatctaacaagctcagtgggaagctacctcttaatctgacctgtggaggcaaactcggatttgtggatttgtcgaataacagattgattgggactcctccccgttgcttggcaggagcttccggcgagcgagttgttaaacttggtggaaactgcttgtccataattggcagtcatgatcagcatcaagaattcttatgcgaagaggctgaaactgagggaaaacagttccaaggaagaaaggttgggattttgattgctgtcattggtggagctgttcttgttcttgtgttttttgtattagtcatcctcctcctgttatgcacaaaccgctgctctagctgttgttcaagagaaaagtcagtgccgcaaactcggcttaaggttgtgacagataactcacacaccagtcta

SEQ ID NO: 31435 - DNA, 7373 bp, Arabidopsis thaliana landsberg
atctcccttcttcttccttcactcttctctccccaatcgctaaaggtactgtttcttctcttcctcagttccccctctccctctcactcccgcaatcttcattcgtttgaattcgatttgtctggagaaattttcaggatcagagagtgttgtttatgaagcgattctcgatggccgaagagtagcagcgaagaagcctatcttgtctacttccgatgaccttgacaagttccacaggaatttgcagctctcatggtctctctttcattttccatttccattttaaatttcgtaccattttcaaaatgttgtttttttcttactttgctgtggattggtgaagcaatctcaatcatcctggtgtggctaagttactagcagcacatgcgaagcctccaaattacatgtttttctttgagttctacgagtctgggactttagctgagaagttgcacgtcgaggagtggtctccgagtattgatcaagtgttactgatcacgcttcacttgggtatgtgactctacttgtctcaaaggaaccttcttttttgccattcgtgtgtgactctgacgatttcttcttcttgtcataaacttttcaatggttactaatttgaatatctgattctatctgtttcgtttttttcagcaaaggcattgcaatatcttcacaacaacgggattgttcatagggatgtgaaaccagcaaatgttcttgtaattctcttcttccattctctagattctctatcttgttatgtgcttatttcatataggataggtacttcttctgtttctttatgaaatttgtttgtgatgcttaagtgagcttttgttgttgcagcttgacgagaagcttttcccatatctggctgactttggtttagctgaatacaagaagaatttgcgcgaagttaatctgcagaattggagatcgtctgggaagccaactggtggattccacaaaaagaatatggtcggaacacttatttacatggcccctgaaatactgaggaaagacatgtatactgagaaagcagatatttatagctttgggattttgatcaagtaagaattatctttgagtagaaattgtaaagttttttcttcgtattttcttacattcaacttttctttagatcttatatttcgtttggagtatatttagctttcttcctaaaagatccctgtggttatgaattttttttccatcttacattgcagtgagcttttaactggagttgttccatatactgatcttcgtgcagaagctcaggttaaaattttctttcctcatttcgcattttgacattattatctctgggagaagcctttatatacgatatactgtattttcatatattcaggctcctgaattgcattcatttgccgttcaatgatattgctatatcttggcatgcccaattcttacgatttctgtgataaatatatatgattttatggacatatagcagtttatatgaatgcattcttgttcttttcattcatgacacatagtttttccctttgcatatcttgatggcaggctcacactgttttagagatgaattacacagaacagcaacttacagttgccattgtgtcttctggtctgcgaccagctcttgctgaaattggattgcaccttccaaagagtttgctatctctgatacaaaactgctgggaatctgatccttctaaacgaccttcttcggacaatgtggttttggaactagaatcaatttgggaacaagtgagaggaaaacagcaaggtcatctccttgagaaaacttctaattcccagagtgatacggatggggcggacatcattaaaaattcaggggattacagggacaccgttaattggtttagtcaaggggagtgtttatataagaaatcgtctgtttccactgtctttgatgtgaaattatggtctagttcaacagatgaaccttcaagatatgtcccagtaatttcttgtgggtcttttgcaacatgtggaagaagagaatccatggaagatacacacttcatcataccgcacatgtgtaatgaggaaagcatccacttatttgccatcttcgatggtcatagaggtataccaactgccaattttatccaggacgcattaaactccaaattcttacttgtgccctctctctttttactccaaattctttagcaatccatcaaataggatataaaatagcatcttgaatgacatgcaggcgctgcagctgctgaattttctgctcaagttttgccaggactagttcaaagcttatgttccacaaggttaatgctcagttcaatcttttcatattctcagcatggtttgttcgaaaaacccattggcatgtttcattttcagcgctggcgaggcattgtcacaagcatttgttaggacagatttagctttcagacaagaactggattcccatcgtcagtcaaaaagggtgaatcagaaagactggcatcctggttgtactgctatagcctctctcctagtagagaataagcttttcgttgcgaatgttggtgactccagggcaattttatgccgcgccggtcacccttttgctctaagtaaggtgagatgagactaccataccgaaagtgagctaagtttgtattctattggtgccctcttttccatctccccgcataaatcaacttcgccattggtactcaggcacatcttgcaacttgtattgatgaaagaaatcgtgtgattggagaaggtggacgtattgaatggttggttgacacatggagagttgctcctgctggacttcaggtttggtcgttatgtacttgatagacttccttaaaatgatatcaaagtaatagctgagattagaggaaaatccaaaatgatgttggtccattttttgaaaatcctgctttgtaacaggttactcggtcaataggtgatgatgacctgaagccagctgtaacagcagaaccagagattagtgagacaattctatcagctgacgatgagttcttggtaaattgtatcttactttcgtgtcatatatatgcaactttgattgtttattagacggttgagaataataataggttgaatgtggtaggtaatggcaagcgacgggctctgggatgttatgaacgatgaagaagttattggtataatcagggatactgtaaaagaaccttcaatgtgttcaaagagattagcaactgaagctgcagcacgtggtagtggtgacaacatcacagtcattgtagtcttcctgcggccagtgtctacagccgaaaggatctactagtagtatccaattcttgcacattattattcaacattcaacttctttacatataaattaattcatgtgtgttatcaaaatgaaccttatgttatcgtcccacagtattatatttgctctcaaccagaaagtacatagaccatgtaaactagaaacttaacttgagtgtatatactcctgattacatcagttacattataattgatttttttttgtatagaaacatttggtacttaaatgtttcagaataacatgatacaaaaggggatcagaaagaagaaaaataagaagtattggagtggacggcttactctgctcgtcttataatccatatgctttctaaggtattgatagttagcctacagcttgcactatggtcatcttggcagtaatgcacacttgtacctatatataaacacctgaaagttaaccttatgagattttatctctttggttgtcgttttcctgtcttctattaatcgatttcctcaaatttcgcaggagcatcctaatcttggcgttgaccctttgctcagtgcatcttgcaaaagtgtctggaagctctgcaggaacgtatcccattcaactgttgtcatgtccacgaaggaaactccttttgattcatcatggtttggactgatcggtgggctcttgctcctcacggtgcatctttcttgcttgcctcctctcttcttttcttttgcacttttctcttgatgagtaatccgctggttttgtgatgacgacatggaagcagttacattgttagggatggtgtttgcacgtggccctcttggaaccaaaggtggtttagatacatgaaatacctctgaaatctccgcttcacatggtgtatctccaccgtcaaacttaaacattccacactgtaactctgtgttcacttcatttccttcatgactatagtcactgtcttcgcttgttttgccaaagacacttgctttcgctttggtgcagagggtctctaacagactgaaactctcttcacccttggagaaatcccgagtcatcttctcgcctatctccgcgagacagagccctgcagctgctgcttgttttaagaaaactgtgcagacgacgaggacccttatggcagattccggcagagagtgtagttcagttctcagaagttctgcgtctttgaaagggtcaagattggatatataatccagttcagtgtcagagaatggaaccaaagcttgaggccagtttagccattcaaagtaaggatcatctaggcattcagggaggcagagaccatgatcaataggcacaagctcagcagtcccaagtcgattataagcttcctttttgtcacatctcttcactagcatatttccagcatgtctgtcaaggttcaggagtctcacatcaagtattccaatcctatgaaccgaagtagccgtgaagcttcctggacccaattctcctgcatcaaaatcatgacccacaaatcgctgcaaggaagcaaccttatagggcatggaggagaaagagaaggcatcactgacatggaatgggacatgtgagatactaaccaatgctgttggtggaacaccagaaaagccttggtaatccaaaaggtaggcagctagttctctgatacccgtctcgccaacaggaattgactgtttcattcccggttgcccgagcatcaaatttccagactttttaggattattgaaagctagaggctcttcatcaaccggtttagccacagcaatgttatgtccctttccggtttgcaagagataagcacctcccatgccacttggtaaaagcaaaggctgagctccagaaaccatagccatggtcacctcagccacaagagcacgaacggtgggcactctctgtccaccaagaatctcaatccgtggagccgtggttgctttgagatcttcctccatattagcagacgcagctatggaaaagcaaggagaggaaacactacgatggatgttgtcatcttcaaacgtatgattaaaggattgcgcgaggaagttgaagtcaaggttggtaagggattgaagtctgcatctttgagaggatcggttaaagtaagggaacttgtcactgaaaggatcaatagccacggccatatccgagatcaatgtgggcttgcaggtgatgattatggtcgtagccaagcaattcatgccaaaactctttggcactcctatttatatatttacacaactaaaacaaaatttcgtattgtttttcaaatacctacaaatcaacttggatctatatacagccacaagatggtgtgtcctttgcttcgcttgaatccattgtgccctttaagtattcgctcctccaaccatgaatcgccgcaattttctgcagaaacaaaagagaagaagatgattcacatggaagcaggccttaaagaatgattaagattgcttggagaagaatcaatagacgaaccctgaatacggacgaaggcattcagggagagacggagaaagattgaaaacagagaggagcgtcagagacaccgacactgtcaccggaaaaaaattctgtcctttttttcctgagactcccctctttcgaaacgatacttcttcctcctttctttttttttgttttcttattttttctctttcttcaaaacccttttcctctaaatttatttctgttatgctataaatgtctcttctttatttacgtttctgatattcccgcgtttttcggttatgaaaatcagagttttgctataattaaaaaagaaaggttaaaaaaaaaaaaaaaacttaaaagctaccttcttatctaagttaacaccgaaaattgaggattttattttggacaggaacaacaaatacagagttttatgtcttatggacaatgatgttgagagcttgtactattttgagtgataatgataataactaataagcaacatatgtggaaccaaacaggaaatcagaaggcttattgctttatgggtttggcttagtcgagccattggctataacttctcctcggcttttgttgatgtcttcaccagaaacattagcaggaacagatcttccactgctggaaacgaggtttttgatggttgacttcaggtcagtgtcctttagaagcgagtccaaagtcacgtgtacgcctatatgcacaaaaaacagtcactggtatagttcttaggattgtgtgttagttagtagtaaatacttacggtatctccagtagtgtttggggtttgttggatcattgattgtctcctctgttgcaggacgagtagtgtactcttctttcagagccatcatatcctaaattgttccagaggaaaaaaacaaacaacacatactgttattgagcctcataaaaagttctaataaatctgagaagtcggacagtggtgatgattacctgaagcgggaaaatagcccacattgatggagcttcaacatgttgcctcagaatgaaatgagttatctctggaatacactgacttggagggattccatctacaccaatcacttccttgaagtactgttgtcttctctcttcgtcctcttcccaccaagctcgcagtgtagagcagtcgtggcatgaaggagcacacacctgaaatattaagacgatagtttgaataatgcagtgaatcactcacccattacaaaattctcagaaaatgaacggtaggaagctataagtaagaaagacagaagtctgaggaaaaatatctaaccgtcatatagtcataattagacggaatcccaaacttcacatcggactcacttggcatgcgctggatgcgaaggccaaccaatcccagttcttgcataacctgagtaactattaattttagcatatgcttctacacaagttttataaagaagttggatgaaccaagagaaagaaaacagagcacatacaggatgtacacaagatggaatgagacccagatcctccccacatgccagcatattagatgaattcaacagagcaggcaaggttttcaaagcattttttctccatagatcctcttggcgttggaaatagtagtcatagtatagccctcttcagaacatttttgctgtatgagaaa

SEQ ID NO: 31436 - DNA, 2467 bp, Arabidopsis thaliana landsberg
aaaacttcagatcctaaggtaaaaggcatttcaaatgaaactcacctgcaacgttcttagcctgatgaagtgttgaatccagaacctggggcttactaggagcttacaacccatcactataaaacgaagatttagctttctttacaaacgtatcgtcacgcgagataatttcctgtgacttgaaaggaatctcatcagaagatactaccggtgccggtaccgatacagatcgaggcaaagcggtggtggcgttgggagaaacaatgcaaaaagaagctctctgaatcaattcgtcgaacacaacgtgtacagattccagatcgagtattttcgtagcttctcttgtctgttctgtgctctggaaacgaacaagacttttcttcatctccttcaacacattgaaaagctctaaaggaacctcagaagaagaggttttaacaagtttatcaatggcttctaaacgattccgatcttctttttcaacgttttgtatcagagaagttgccgtctctacatcttcgatatctggtctcaatggtagagatctatgaattctcatgatttcttccacaaccatctccttcgaatccattttctacaaaatccaaattcaccctcaaagtgagagatgagaaaggagaaggaagaagaagaagaagatattcaagtttccatattttgaatcggatcttgttttctctttcttcgtcttctcattctttcttcgtcacttcttttcttcttcttcttcttcttcttcgtctctttctctcaaactgcattaaataattcaaaaatattagtcactatctatctctatctctcgcgtccttatctgtttagcttaatgataattttgttaatgtcaagcattgacgtaaacaatgattaagtatttgatacggatcacatataataaggagaagaagaaaacatgatcatgttctgttaggatttttcaaatcgaaataaatctatattaataataacaatgatcatgtagtgcgagttatttagtttaggacaagttattagatatctattattggcttacacgtagtaacacatttaaagaaacccttgttcgaccaatagtctcctgactaagttagtaaacaccatcgtttcatttgaactatgaagtaacaacagaagaaactaaagcagctaagagttgtggaattgcatctcctgttgttgaatcctgtcaatagcatcctctgctccagcttcaagatcagacatttcgtcttcttcatcttcttgtttgtagtatatgatgttagaagagtgaccagtggtcttggaacggtgaagagtggttgcagaggaagaggaagagaggctgaaactctctgaaacaccaagtgtcttgctcgggagcttcctcgctttacctttcttcaatttgatgtctttgtgccacttcttcaatgcctttgccatttgctcatcaaacactgctttcttcatgtgtgaacccatctgctccacacaccatttcatcatctctctattttctttccttcaatagaccattcgactaaaatatcgatcgaaaactgttgtttacaagttaattacctgagtaacgagggcgtacaatgggagagtgatgtagctgcataagatcaaagctcctaggctgcacatacatacatacatacatcctcacatgtttttaaatacttttcctctataatataagtaagtttatgaataagctttttaccatagaaagagtttgctgactacaagattgaaatctttatggaagcatgattttaatccaaaagaatactgcaaatgccagtaatatatgttactcagtaacatcattctataacaccaaagtaagaatagatgtttctttacccatatccagaagaagtgtgttatctggaaagcattctgcataacacagaggaaataaatttaccggttagagagagaaacattactagaagaagacagaatctgcgaaaacatgttagttcaagaatgaaatcaaggagaagatgttttcataattacctgaaacaaggcaaagtggataagatgaagaagtagttgaggacagtcgaaccaaaagtatcgatctgaaccttgcactaaaggcatcccctgaactactgcatgtgtctctacgatttctagcgccattgttgccataattgcttgaagctttgttccaacagctaggattatctgcaaaaatacttattgttcatcaagaaactttcaagaagatgtattagagggagagattgtcttacgagtagaggaggtatcgatgcccaaaacaatgttatccagcctagaattgaatagaaagacttcagtatgtgaattgaatttaaatttaaagatataaatttagctcaccattaacattaaacagcaagaagattacaaatgatgcccaaagaactggactgcagagcaaaacaatttgttaaaactggta

SEQ ID NO: 31437 - DNA, 706 bp, Arabidopsis thaliana landsberg
caaaaaacatatccaactacttgaagctgcgaacctagattccctgttgtcttcaacaaaaaatggcagaagtcttgttagagtgtacatctcttcttgggaagtttcagaatctctcccattcttgaagcactgttttgacgagtctgaagtctaggatcctctgcttctcgtcttacttcttgtcttcttgaggattgacctacttcaaagactgttattaccatgattaggaaggtctgctcttgttggagtggtactagaacccgatgaccattgttgtcttgcagtactagattctccaacatgtaaagtatgagtatctctaactgatgcatagtatggatacgcagctctcaattcttcaggattcagctgtggttgagcaattcgaggaggcggtgtcacaggagcaggaaacgaagtctccgtcatctgcgattgagagttcaggcttgacctatgaacactgtctctgaaggcagctctttctctggctatgctgtgaggacgtggtctatagggacaataagctctgttgtgcgtaaacctgaagcagctgctacagattcttctgaggcgttcgtattgaaatctgatggttaccacttctcccgaattaaagatgattcgttggaagaatctgagcctgtctgtgatgccaaaacgcactcctacacggatataagttatttgagtagatgtc

SEQ ID NO: 31438 - DNA, 2094 bp, Arabidopsis thaliana landsberg
  unsure (1)..(2094): unsure at all n locations
cggggacttcaaatcaatcatttatggtttgctgaaaaaattttaataatttgtaaagctacaaagaatgaatgtgaagagcttatccattgttttatgagagtatggacatatctcaggacaagtgattaacttggaaaagtcagctatcacctttggagccaaaattgacgatgatacaaaaagaatggattaaaaacagatcaggaatccaattggaaggtggttatggaaagtatttggggctaccggaatgcttaaggggttcgaagaaggttttatttgagttcttaaaggaaaaattacaagacagactcactggttggtacgctaaaactttatcctagggtggtaaagaggttctgttgaagtctattgcgatggctctccctgtgtatgcaatgacctgctttaagctacctaaatctctatgcacaaagttaactggtgctatgattgacttttggtggaatacaatgcaaaatacgaagaagattcattggattggggctcaaaaattaatattgcccaagtctctaggaggttttggttttaaagaccttcagtgctttaatcaagctttattggccaaacaagcatggagaatctttaagaatgaagatagtcttatgtccaagatctttaaaagcaggtatttcctcaatactgatttccttaatgcctctaaaggaacacgtccttcgtatgcttggcagagtattttgtatggtcgtgatttattgcagaagggattgaaaaagattattggcaatggcaaacaaaccagtgtttgggttgataagtggctttttgatggtcagaatagaagaccttcgagcattcactctttgatggatattagcatgaaagtgagtcacctcattgaccccatttcaggaaactggaatctgaatcttatgagtcagttatttccatggtcggatattctgattatgctgaaacaaagaccgatggtaaatcaaaatgattcttattgctggtctggcaataataatggcatttacacggttaaatcaggatatgatgtgattagtcgacaagctcatccagagatttttcaagaagctgcagcgaacccttcattaaaccctcttttttgcagtatatggagtctccatactgtgtctaaaattaaggttttcttgtggaaagtcctaaaaggagctgtggcagtggaagacagactaagaactcgtggtatcaaggcagtggatcgatgcttaatgtgtaatgaggagaatgaaacaattaaccacattttgttccaatgtccattggcaagacaagtttgggcgatgtctcttctgcaatcnnnnnnnnnnnnnnnnnnnnnnnnnatctttactaatatggatcatgttttgaactattgtcagaagttgagtagttctagtaatgtgagttatgctagtccttggataatctgggtcttatggaaacatagaaataagattctatttgagggagttaattttgtgactcaaagcattgtagacaaagcttatgtggattgtaatcaatggtgttcagcttaacaaggtgtttgtatcaagaactcaaagtcaaagttgaaatggagtcctcttccatagaatgagcttaaatgcaatataggagtggcctggtctaatcgttttcaagtttctggtgcctcttgggtagtgagagatgctatgggaaagatgttacttcatagtaggagatcttattctcatgttcattctatgttggatgcaaagattagaagttgggaatgggctcttacaagcatagcacaacatcattttgacagagtcacctttggagcctcaacacatgatattattaaagctctctacaaaccagaggaatggccagcattattaggccatacaactcagcttttgaacttatcgcaaaagaaaagtggctggtttatggctttggaaccaaaattgtgtaatacaggagcttatgagattgctaagagtgttattactgggcacagatggcagtcttatgtttcacggggttttccctattggctaggagatcctttgcttcagaaatgactcagccaggaagaatgtgaca

SEQ ID NO: 31439 - DNA, 992 bp, Arabidopsis thaliana landsberg
ataaatataaagcatttgagttcgaagatccgctagcaatataaacttcttcaatatgttctttggcataatgtaggtgtatccagtatcctgtgaacaacaaacaaataaagttttagggacttaccttattaatttgaataagcaagtctgagcaaattacctttatgtcatctgagttcacgtaaatgtggttgaccctgaggtagaggttagtagctgaaattgcgcgcacacgccagtctgttttggatccgaatgcagattgctcgtacggactaatggtggtgctaatcaattcatcaccatgaacatttgtggttcttgttgtgactgcagtaagctggctcgcttcctttgcctgcaggaggaaacatattctttttagagtagccaaaataaatctaatttctgaatgtccctgtttcaagaacccttgagagaagtgacagttacaagcacctgtttctcaatctcagctatctgttgcctctgctgagacggtggagtaatctccgctccaagtattatatctcttatctctgattgtgtcagagctgatgtatttacgttgttcttcttcgcgtagtcggaaaggatgagatctctaagagcaacctccacctgaatgtaacaatgaatcatctgatgtgagtaaggaaggaggataacaacttcactaaacaaagaaaagagttacttgatttttattcaaaaataagtagaaactgcagatgaaaagaccaagcggtctaatcagaaaatacaacggaacactacttgaaaggtggcgcaagggttaccttcatccattggtcgtcagtgagagaaggccaaatgtgatttggctcagtgacaacagacatgttaggcttcaaaacatctttgccttctcattgttacgggaagagcacgaaagatcaggatgagtctttgaaggcagtgtaccaagaaacagtcatcaaccaatcatcatagatattgaagagggc

SEQ ID NO: 31440 - DNA, 1330 bp, Arabidopsis thaliana landsberg
ccaaggatatagtcccacatggtgtgagttttgcgatattagttatgttaggtgacatgcgataaatatgtgaactgtatatggttccccacattgattaaatcgaaaattgttttatgtatgtatgaaaatttgttttttttctctccatatgtatgaggcgtacgtaaaaatatcccgacgaatgcagatctggatgttgacatattctctgaatatacagttacattgtttataaaaactcacatagatatattgaatataaaggacaaaaggacccagagatttttactacttgtagaagtaaaacacaaaggttggtgtccagaattgtacggatggattgaaaatgtgcgaaataatatataaatgctacttatctaacaaaagtaaaacaatgttgatacatcttatatctgacaatgtcaccatgggtgcaatgaattcgaattcatacccaactcgaagctatatgtaccaaaacaaaatcgactgaggttattcaagtcattttttatttaatcatgtaactcaatttgttggaaagttaatattaatttttgaatagagacaaatcttttcagtctaatcattaacaatttgcaaactcaatatacaccatacatccaaaaaagtcttaagcaaaagagtcatcacgatcgaggtcaccatcctcctccattttgctgaactggaggaaatgagtgggtcgatggacttggtgatagtattccttgggggttccgagtttcaagctgtagtttatgctcaccgtgtgattcgctcccatgaagttgtagttccagggtccgttctcaggaacctatcattcaacaatgtctcattatttcagtgctatataataaaataatatctatcaatcaagggcaaacacacaaaaatcaaggggttactgtgtgttctcaccatgtagaacccgaagaaacggtcactcaagagcatttggaccttctcgtagtgggtgggaaggtaaccgtggggattgctgcctgtgtctttgttcagccgtccccattcataaccggcttgcgtcagcttatatgacgtcgaagagcatgagcccggagtgaaactacatgtcaggatgatgcattgttctgcgtcccattgcttgttgttctccagaacacgagtgtgaaaagtcacatcctacagcagcacaaaaaaaacccagttattacgtgtaaaagttcgtaagaaagtataaatatatatgcatacctgtggtgacaactgaggaagctcgttaggctgtgtgtgtatccatcccaggggctgtaaatcatccacgaactgatgttgccgaaga

SEQ ID NO: 31441 - DNA, 1245 bp, Arabidopsis thaliana landsberg
ttataaccctaatccaaccaatggttctttttttaggggaaatttttatatttgtggtctctgtagaaactggtcctctttatcaccatctgtctcaaacttgggaacctcctatggaactctggtaaaaacacagaggtttgtatacctcctgtgggcgtggatcctaaagaaaagagatccaaccgaatataaatggtatcagttttcgggatagcttccaaaatcaaaatcgaacaaaaacttttgagaacctaatccgtttttttcagagagtttttaaatctctatcttatctctcccaatcaatcagctgcaatactcagagagatcttagaaacaaagcacgatttcaaaatgctaaaaggctagagaagaagaactaagaaagtccctgaccaggtctaatacaaacggaatctcccaaaacgatgacgtttgctgaatcatcaagcatcttcgcgattttagatccgagatctggatctgaagaagcttcaccacaaacgctaacaaactccttatccgggatccagctttttcccgtttctcttagcttcgatttcacaatctcgaactgcgccgctctaagcagcttcttcgtatccgccaccgtcaaactcgtctccctctccggaggagcaagtccgtctaatcgaatccgatccttgcttccatcaatctcacggagtttctcaatcaaactctctcccaccggcatctgcataatctccgccggcctaatcatagcactgttatgcatgaaccttcgcgacatcgccaaatctccaggctccggtgcgattttggttgtatctgttgaatcattcggaactctggttcgtacggctaatgaagaagacgaaatgcgacaattcataagactctgtgaagcaacattcgtgatattgaagagtttcttcgataaaagcttcctcatcgccattgttgctctcccaagaaaaactttgagagagaaaaataaaaatcaaattcggttttattttacgactgaataatgaaacaatagagactaaaagggtttatatactgtttacaaataataacattgtttttttaaacctaaaaataaagagactcgtacacgtcagcgtatatcggaacgtacacgagaaattaatattacagcaggaatattcgttttttttacgaaactcttttggtttttctcgcgagaaatgtggaagtgatgagagacggggatcctctagagtcgacctgcag

SEQ ID NO: 31442 - DNA, 1099 bp, Arabidopsis thaliana landsberg
atatagatatatctatttaagaaaatatcatataaatatatgttataaatctatatatagaaaaaataaagcccagaattttgtcccacattctgtcgataagtactcgagcttaagaagttgttctttctaattaaattttttcccatgccccttattcaaatcaactctaataaaaatatatggaacctaatgaagttgtcatgtatttatgatatttctctttgggtcggcactgtatttgtgatgttgattatttatctagtggcagaaaatattccataagtctctctcaaaccatttgaatagttccaaaaacatcttgtcactaacactcactcttgatgagtttttttttttttttatggggggtcaaagtactcttgatgatgagttgatattcttatttaaaaaaagcttattacttatttaagttatttcaaaaagtacatcgacacgagtgccacgctttatatatatgcataaacatatataattatgcatggaggagtagtagcttgcaatgtcttgaaactttgatttatcttctcctagtctttcttttaaatgtttaatatgaaaacacaaaatcatacaacggtcgtctaccacagtttctcagtcagtttcatattcagatgcatcagagttctcatcaagagatctatcagtctattgccttaaactcgacgacattcttttttttttttttctttcttatttcttacctataggttgtatgtaaatctatatcaaaaaaagaagaaaaacaagatgtcaagaaagccatgttgtgtgggagaaggactgaagaaaggagcatggactgccgaagaagacaagaaactcatctcttacattcatgaacacggtgaaggaggctggcgtgacattccccaaaaagctggtatatatgtgctttattattatgtatatattttaaaacactttttacatatatataactataattgttgtttttatgacaaatgatggtgtttaggactaaaacgatgtggaaagagttgtagattgcgatgggctaactatttgaaacctgacatcaagagaggagagtttagctatgaggaggaacaga

SEQ ID NO: 31443 - DNA, 913 bp, Arabidopsis thaliana landsberg
  unsure (1)..(913): unsure at all n locations
ttgctacacagggtgtagtttctcttcttaaatatttgaaatgtcatactttggataggataataggataaatgtctatcttttttgtggtgatgcctgtatttcaaaagttttggaccataattgttgttggtaggcctcaccgggtgaatttgctgttgattatgccacacaaggagcacatggggcgtttcctggaaactttatgaatcagaattctcaaggcggttattctcgtttcagcggaattaatgatttcatgtctcaggtgtgtttcactggacttaccgttcctattaacacagtttttatactaacaccttcacctgagccgttttctttgcatatgtaggagtatatggcacatggaggtcaaggtcttttcacccaagctggctttatcgactcatcccaggatgatggacagcagaatccttatggtgtgaacaatccaaatcttcagtctcaggtttgtccttctgatgtgaacaatccttatccttgattcgttgtttgcgtcaacatattcaattaacaaacagttgaggatttacaagtattcactatctttatctatatatacacatgtttctggtcaaaagatgctaatgactcttgtctaaaattcggctcagggtctcccaaattcgctctactcgcagccattcgcacactacaacacacagccactaaacctttcaggcccacagcaatctcaacctaaccagagctcacaaaacccaaaacatccttacaatggctgagggtgagaaagacaaaacttggatgcaacgggtttataaactctttttgcaattcaccggcttggttccatgctgttcacggctccaaacanacatctggtgacttccgggtgcttgaaagatacacgcctttctggctcgcttaacgc

SEQ ID NO: 31444 - DNA, 703 bp, Arabidopsis thaliana landsberg
  unsure (1)..(703): unsure at all n locations
atagcattaaattattttaaaataactttatatattgatgatttaagtaaataaaaacaaggtaatgagaggctgtattaaatatattaggttaattaccacatagctaattaagccgagtcctatccctgaggagattcttccgaagttcaaccacatcacatccttttgtgttccaaacataatataaatgattaactaattcttgggtttcatgataaacagtttgttaatcttctaagtactaacagtacaaataataagtttgcggtcccaaatttgtggtaaggaatatttcacataccttagcgaaagcgatggagaaccaaccaatgatacagaggagatcggacacccacattgtctttaattcgtgaaaagcaatattgtcattagtagcaaacagatacgaaaatatacaaaaacatatatacgaaaaattttagtcagaaaaggtaaaatttgattatcaaaccatacttaagaatatgaaagagtgaaaatgtaattaaagtacttttcttctgccaaggatgatcgccattttaccgctaaacaaagctccaattgcagctcccaaagtggataatgaagcaaatgctgaaaactgtaaaaaaaatattaactcanagacaaactgcagaagttgagtttaatcttttttttttattgcgatattaatttctaaaaaaaaaaaaactta

SEQ ID NO: 31445 - DNA, 906 bp, Arabidopsis thaliana landsberg
ccttagatttagccgacgaattaccacctgccaaacacgtgaagagaatgtacaagtgaagaattagtgcttttatgtctccatcgaagattgacaagagacacacaatggatttaatcacttgttccaatatgatatacactcaccagtggtaagcttattatttgcagcgagccaaagcaagaacaagtgtttctaattttcttgtagtgaacaaatgagggtctgaccgcaaataacaaatttacatgactatagaagacacttatttaaatatcatgaattattatattctcttgtttcagatttcatatcggataaagtttcttcattcattttttaaaaaaatcgtttgtatccttcatcaaggtattgtatcattttctttacccgatgatacattaacataatagagatcaaattatactttataaaaaaaaaactatgcattgaaaatataaaaggttttttagtaataataaaatccttcaactaaagatgaatcgtgagaaaacctatcaattatttatttagtgaaaaaactctaaacttaaaatttgttaatgtaaatcctcatccatctatattgtcgtgaaaattggacggattacaattaaaataaaatgtaatatttttcacaaattgaaaaataataaatatacacttaaacaataaaaattgtaaataaaaacaacaagatgttcttatttataccgaatctaaattttctaatttatttaagctctaaaatttagaaagtgaaaaatgagatttttataaggtttgtgtgttgtcgaagtcgattcattttaatttgaccctaacccgtctaatttttattactaaaaatgaagagagaattgtattaacagaatttaaattaaagggtatttttacaatcatctt

SEQ ID NO: 31446 - DNA, 4093 bp, Arabidopsis thaliana landsberg
acaagaataagtgaagatactctatgttaccgattaagtaggttgacatatatgactggctggaaccagcggatcttagggatataatcaatacttattgactaaaattttcccaaaagaaagaagaatcaaatgattactctatgtagtaacccaaactgatcctaacaaaattgtagaaatgcagatggtttaaatatgtggcgctctcataaaactcctacttcaggtaatctttttacacagtttggagctatcgtagctcttaacattttcactccagcaatgactagaaccaacagaacaatgagagattggcttctatccatagaaagcttcaacacgaaaaccgaccaaaacgaaatgttaaacccaagccttcttcaagcatagctgtatcatattctatcttccttgtaagagttccttttgttaaaaactaaatactaaatccgacttaaagaataataatcaagaacttcaaaatagcaaagtaaaatatacacacgcacaaattgataagagttcacttagcttgcagtacgagaactaggcaggggcagacctagcttaagagtgtaggtgtggcaggtgtttaattatatagaatttactttgtggcactaacatatttttgttttataatgcaaaataagatgttaaatttgattaaatttatatacaatacaagtttgtgttctatgtaaaatatttttctagatcaaacaaggtctagttttaaacgatccatgggagtataaattttatctttttcactctaccttgaaaaatgcgcatgagataaaatcataggtacatatacatacgtgaagaatagcatcagaaaatattgttctaactattccgataactaacaaaaccttaggaaacctcatcaagactagttcgaattaaatcataaggtttaggttgagagagtcaaagagggaatgatataaatagaagaatattttttgtttaagaatgatttttagacaatggaaagaagaatatgttaaggtggtatagacgacgagcaataatacaacagccacaaaagtggcaaacaaaaaggacctacgctggaaaaaaaacacgtgatgttacaatcaccctttcattctcaatgatgaacaataatgtttattattgataagaaaaacaataatgtaaatttatactttctcgttaaccagatttgttttttcattatgcgtttgcagtataaaaatagtaaaatacgttttaagtattaaactgtttgatagtttttttttatatatatacctaacagaaaccaactatttaaacaatacaaaaatatctgcaaagatatatatataatacaatcgaattcttaaaagttatatatatttgcaaacgtccctttagttattcccctccaactctccatgttggatcaatcattcaatttttttttaataaccaaaagttaaatgtacaaatatgcaagaacctacaggtacgtttacgtgatatataaattaaaatattgcatctcgtaccgaagcgcattaccgtatttaaaatacctgaaagtaggaaaatatagtactatacaaacaccacttttcggacattattttcatagaaaagttacgaattatcctttttaactattgatctatttaaataatttactaaccataactatcttgttacgttttcacaaaaaaaaaaaaaaaaaaatctcattacgtacgtgtatatatatggaatagctcataacctcaccactaccacagaaataatgccttttggttcttttccataagcttataacatatattttttttaaaatctactctgcgttaaaaaaatgaaaacacgtagcagcagtgtgggtaagatcaaagggtgtttctcgatcagtttcatattcagatgtatcagagttctcattaacagatctgtttctttttccttatctgattaaacaatttccttcagaattttacttttttgaacatatatagtttttctctgttcctatatcttgagttttgtgagaggttaattatatgaaattttacgcattattgttcatctatatcgaaaaacaatgtcaagaaagccatgttgcgtcggagaaggcttgaagaaaggagcatggaccaccgaggaggacaagaaactcatctcttacatccacgaccacggcgagggaggctggcgcgacattccccaaaaagctggtttatacaaatctatacatacactcatttttgtacttgttgtagaaaattgttctgataaacatattgtgtctgattagggttgaaacggtgtggaaagagttgtagactgcgatggaccaactaccttaaacctgagatcaaaagaggcgagtttagttcagaggaagagcagattatcatcatgcttcatgcttctcgtggcaacaagtacgtttctatgtttctatgtgtgtgcgtggaccctcgaatgtgaaatgaatttcatgaaaaagttttcatataatatttattatgtagacataatcatcattttaatcttggtctccgatctatcttattttctttaggtggtcggtcatagcgagacatttacctagaagaacagacaacgagatcaagaactactggaacacgcatctcaaaaaacgtttgatggaacagggtattgatcccgtgactcacaagccactggcttctagttccaaccctactgtcgatgagaatttgaattccccaaatgcctctagttccgacaagcaatactcccgatcgagctcaatgccttttctgtctcgtcctcctccatccagttgcaacatggtttccaaggtctccgagcttagcagcaatgatgggacaccgattcaaggcagttccttgagttgcaagaaacgtttcaagaaatcaagttctacatcaaggctcttgaacaaagttgcggctaaggccacttccatcaaagatatattgtcggcttccatggaaggtagcttgagtgctactacaatatcacatgcaagcttttttaatggcttcactgagcagattcgcaatgaagaggatagttctaacacatccctgacaaatactcttgctgaatttgatcccttctccccatcatcgttgtaccccgaacatgagatcaatgctacttctgatctcaacatggaccaagattacgatttttcacaatttttcgaaaaattcggaggagataaccacaatgaggagaacagtatgaatgatctccttatgtccgatgtttcccaagaagtctcatcaactagcgttgatgatcaagacaatatggtaggaaacttcgagggatggtcaaattatcttcttgaccataccaattttatgtatgacaccgactcagactcgcttgaaaagcatttcatatgagtcttcatatccaaacagaaaggtttcaaactattcgacgacttaaaataatggttctgtacccaaggttagtcgattactaactcgctcgaacgagatattgtgtatgtattaattagtatttgggttgtttactatatgtccaaggcgtgtttattacgatgttaaacaagggttaatcttaacacttaagtttccccaagaataaataaaatagggtttgagttagggtttctcttacattgagaaccatgcatgtaacctcgcgaatcaattggtaattgatttgtgcgggccacgatgtttatactaatatttctttctaaagcttgttttatttatcttatttcgtagtagtacttcccattataatcatcagtgcccataatagtcatcaattatgctctttttggtttttatgctcttctttatatgattaaactcatttattgtttacaactttacatggcatcaagtcatcaacgattcaacgtagtggtatagtgatacctttcgttggatttgaaccgaccacaacatctctctttccgataaatccaattactattattgtagaatttaataagaaatgcgtgaaagttatgaaaaataaaagaaaaacaaacaaaaaatgctcaaacgaaaaagacgttgcaataatagtgtatttgcgtgggccaataaacaat

SEQ ID NO: 31447 - DNA, 1181 bp, Arabidopsis thaliana landsberg
  unsure (1)..(1181): unsure at all n locations
tcggtatttcttttgtaacatgaaacgacttgtcgtcgacattagatttttgtatacatggacaccgccactttgatataaatttgtcatgtcttaccaaatcatagattcaatatagctacttaaactatacattgaaatattttaaaaatacataaaaacaaaaacnnnnnnnnnnnnnnnnnnnnnnnggatgtttttttatttgtttcacgggaaaagtttgtagaatttaagcatgctacatgcaatgttaaaaactgttgtatattgtaatttatttacaccattaacattttatattgtgtaaacttaatgatttggcaccagagttgagtttttcttagagtcatgtttacggaaaatctgattcattttggataaactcgtaaacgatagctcattataaaactaaccaaactatcattttattaaagtaataaaaaagttgaccagtaccaatatacgacctatacagagtaggtttgatgagatctcataatctcttaaattaaatacaaatttagcattacctttagaatggattaggattaaaattatttcattngtttcagccgaaaaaagaaaatggtccaccacattatctagtcatcatctgatctactaccaaaccctacattaagaagataataagaggattgagggtaataatgtcatttacatacacctttatattattttattgccaaaattagaaaaatagatcgtaagaaaacgtgtatatgtgcatttggtattatgttattcggtttttatatttttcttgtctctcattaaattttcttctctatccaaactctgtatagcctgtccccaaagagtctcgagtccttatcgtgaacttttttgttcattcatctgttccacgaagaaaacaatttagatttctccgttgaagtttttcgccggcgatttagtgattctcggagaagaaggtgagtagcaaaagtgtgatttttttcttttgggtttttgtggaaaagttttttattttcgtttcgttttgaactgtttcattcatgggtacagattgaatttgtgtgaaaacgtgttcttgagctgtttgttttcgggatctatatgtgggaaaaatctcaatttgtgtttgatttggtctcgttgttttctgaatcatctttgggtgggcatttgttggtttg

SEQ ID NO: 31448 - DNA, 1769 bp, Arabidopsis thaliana landsberg
cttactagaatcgacttgggatgggtttttatatagttttaattttgtaagaatatgcaatacacatcggtatgaattcggatgatggcataacgacaggaacacaaatcactaaactacatgtttcgtttcttaaatttgatgtcatgcgatcaaaaagttatcatttggtacaagaaacttcaccttactatatcaaaagattatcatcaaccagtgagcatttatagaggagtcaatgttgcactaagtggaggagacggtgcttcaccttttcgtacagggttttgaggcaatctttgggatagatgcaaggaaagtaattggaagaatcttcgatgcatcacaaatactcgagcgtccatcataaattttctgaaacatctttctattcccttcggatgatcgcgatcgttaataatagaactagtgatacaatttagattaataataataatttctaattacctacttaaatactatcaatgcatttcttctatatcgaaattttttcaaatatttttatttgagagtttttaattaatttttatttaatcaatcaaactttacttgatacatgtgtattttgtaattggtccattgtttaacaaaaaaataactttttcgcaatacataaaacatccattttcattcagcatgctttatatccaaattatatgtaaactcttctgctgacctaattcgtgtgcacacgtggatttattttgtttaaagaaggatcatttgaagattatacaatttgaccaaaaaaaaaagaagattacacaattatgtgggaggagattcacaaatgctggaatttaataatgaatcttgtttgattgaggacaaaaaaaactttaagaagtaaatatcgatggatatcttttgatttttactgatttgaatgaatcttttttccccccaaaagtatttttttttttaaataatgacattgccttaatattttaccaaattaattgttacaatcttttaacttctgagacagtgagacgtgtgagcttatcaaataacgtagagtactagatatatgtgacaaattttagattaagagataaaaataatgatattcagctgtgatatattatatatatatggtaattatctgttatcctcaacagctacttataactacagaatccattatttctatatcaaaacttttaaaagattttttatttatctttttacatttttagttacctttttattttcttttaatcaatcaaacgttacgtacgtgtttaaattttagtaaaattggtaccacacattgacacatcacagatgtaatcattggtccattaagggaggattaggctataaattggagatcaatgtcaccatgagatgacatattttctttgtcaaagatccttagaaaacttttattcattttgatatatcatattcaatcctccaaaattatcaacaaacaagcaatccatttcatctgtttctttcatatgtccaatttagttacgtgttactaaaaaacagtttaactcgaattccattttattcaaacctgattctcctatatatccacaaatatgaagttggtggttctcttctcgttcttgctcatgttttcattgtgttcttcaggtaatctcaagttaaataaataaaatcgatattttaataagaacatattgattaagtttaaataataacaactttgaatgccatataaaaaaattgttgtttgatttaaaaaatgatccatacaagtagtactggtgcca

SEQ ID NO: 31449 - DNA, 2236 bp, Arabidopsis thaliana landsberg
ctgccccttccccactatacttgaaagatctttacccttgcagcaaagacaacactagttcaacatatcaactggaccatgataccaatgagccaaaagccgaacttatggtatagattttcattacaactgatagactagtgaaaaaatcaaaaattgttaactcttttcattcatatattggttgtgactgcccttcccttgattaatccaggtcaatactatgaaggggcatatacatgtgatgcgattcgttgatttccgtgagcttgatgaaaaagcaaagtgcaacatctgtcggacaaaaatacgcggtagcccatgtaaatgcgagacgtgcagcttccaggcgcatagtttctgcgcagagctagggcgaccattgaagcatcgagttcataagcattttctgacactcttaccagatgcccctgcaggcacagatgttactatgaattgtgacatttgcagagatgatataaaagggttcaatctcttttgtcgcatatgcaattttgtcatccataccaattgcatatttagaggtaaacacttatttacggagtcacaaagggggcaaaaaatcattggaagctgtacagcgatgagtggatgcattcagaaagagcatttgttggatcaaattatggtctcaaagtcatactccatggcttgcgatatatgtgaagaggtggtgtgtggaaaagacaagaccatacatatgtcatcgcttaggctttcaacatttgtgtatcgtctgatcaatgaaagctcacttgtttcatgtgtggtgtgtaaagatgtatatcatcccttgtgtctggaagttaacaggcaaatgagattctgtcatccaattcatcctgatcactaccttccgctttcatttgtaagtggatccaagtgcctagcctgcaagctggaaattaaaaagtatggctatcattgttccacttgcaacatcagtttccatattaaatgcagcaaagcggtaatatttccactacagacatctcacaaccaccgtttctatcacttttggattgctgactcgaagatcactcgaacctgccgtgtgtgcgctaaaccgtgcggtgtgtcgttctacggatgtattgggtgcgacttcaacgcccatgcagagtgtattgcgtttccagacaatgtgaagaaccaaaaacatgagcatactttgaagctaataggtagtcgttatttcgagccagattgctttctctgtggagagcgtattgtgggtaaatccggaaaaagctccaatgtgctttattcatgcaagcactgtggcaaagagtttcacctcaaatgcataatgtctacggtaaaatttagtcaaccatcttgcagaactttaaccattaactttttccgttttgttttcggttttcaaaacatttaaatgtttttttccgtgtcatacaggatgaccgtgaagctgcaacagaagaggatcaatatggagacatatatcttatgtaccttgagcgtcatctcttggaggtgttataaagtgagtcttagtttggtaacgcaacttttccgttattctgaagttatgcatcaacttcttctcattttattcttgtctttgtttcaacagaggatgacgaagacagtgattcatctgagtttggttttcgccccctccatgtgtaactaataaggagactacttcctcatctgaggttatgctctttgcttgatttgtgttactttttcagagtgccaagtttgatgctagtagtgcctgtgccactgtttttctccaagttgttattaccgtgtactacattcaaaaaacgtttgcatttttaacgcgaatttcttcctatctttcgtctcctcagggtttaactcaatattggattcaatgatattcttaaacaaacatgaatttacagaaaaacagtgactaccacagtgcaaaattagttgaatttttcttccgagtctggttcctctatgatactgattctcgaatgaagtctagaaccctgtggaatccctagcggcgggttttcacaagaacaattatcaacagcaaagagttcccattccttaatcccacatttctccaatgctgactgcaatctctccttgtccttctctgccgggtaagaaccatccggtgtcacaagcacagctccggtgtaagactgtcctgcttcacgtgctgctccatggtaatggaacagtccccaacttagatcatcagatt

SEQ ID NO: 31450 - DNA, 1162 bp, Arabidopsis thaliana landsberg
ctctgggtgtgggaatatgtattcttgctcattttacgaacgtgaggtctatcttgatcttggttgtgcctactgaagaacattatcacaagttggtagagaaatgcttcagtacagtcatgaacatttgcttcgaaggtgtaaaccacgacaagacgctagaggctcttgcctactttgtgagctccctttgtctccctcttatacatgctacggttgtgtttcctgttacttgtttctccacgagcgttgcattgatcttccaacagagagtcaacatcgcgtgcatccgaattaaacaccctcttagaggccttgattacatatgaagtggtggtcgaacattttgtggtgcgtgtagggacaagattgaaagtgtcccgattggttgtctagaatgcggtttttacattcacatgaggtgtgcagattctttattgcgcagtctgatgcaatgaaacggaaagtttcaggaatatttccaaccaactaacaaacaagttttccgctgtttcatgacaaagctccttccctcgaaaactcgtcatgggaggcaaattaaggcttctcaggaatccttgcatccaattcgaggcaattctacgtttctgtagtacaaaaagagagaatgattctttatgtgtagtacaaaacgtcaggcaactgcagcttgttctcaagcaagcatctcccactgtattcacacttacaatataattcctgaaagcctgttcattcaatatggagaagactcaaagtaaaatcacgttcctgacgttttgtcggaaattccagatagaagcttaagcttcacactatatctatggttttccgaacacaaaagcttgattatgcgaaaaacaaaatgcaagtattttctcgaaaaagcaaaaataagaaagaaacaacatcaaaacaacaatattccacacaaacaatcagagaaactcactattaaatcaggtatacacacttgaaaatcattcaaacttggcaatcagaaccacaaatccaagatccaataaataaacatgttgcaaatttagttcaccaaatgactaagttgaagatgatagaattctgaaacataactttagttcactgaagttgcatttgagagagggaggcataacaaataagactcatcagagccaagtcttcg

SEQ ID NO: 31451 - DNA, 3467 bp, Arabidopsis thaliana landsberg
  unsure (1)..(3467): unsure at all n locations
tgttgctgtccatgcattccctggaatctgacttgttgagccgcctttttcagtgttggactcacacacatcttgtccacttgccttaattcattacaacacattttaagagatgactgttgttgaggccccattgggttctcatcgtcctcaagatcgacatcaagagtgannnnnnnnnnnnnnnnntcgtatccgattcttccttgttgagctctcttgcggatccattgcttgcaacctcttagttgctgatgcttcataaactccctctggcacttaccttgttgtgggttgctcacgtcatcatcttcctcgaactccaccactgtgcggtagatggatgcgttggctaggaggatgaagagggcaagagttgcgaaaacgagaatgagcttagccatagtttcgattttttaaaggtttcaaggtttttggcgagtgatggatggatgaagtgaagtgaaagtgggaatgaatatatttatggaggagataggacatttgcatggcaatcacgtgtaataagcatgaggttgcgcgtgagcatttggaacataacacgaatggagttttgtttggattaggtgttcgaagttcattaatgtgtgcatgtgtcaagtgaatgatggagacgagtctccgcatctacaacagcatgcatgctcttgacttgtatttttatttatttattttgtttgttaattccaacaacaaaccttaatttatattacattacaatggtataggtatatgtcaattcgtttattttcttggttcgattttcatttgaagttctttttggtaattgacatctacttcggattagcttgatcgcggaagtaaacgcacaactaatagattgatttagataaataaatcattgtgatcttatcctaatgcgctacatgtacgtcccaagtatataagctatattatcattaattctcaatagtttcttaggtcatagatatgacatattacatataatccaagaaaagtttttgttaaaaaatctaggacatgtccgatggtattctatgacgttccaagatcaacgaagtttcttttcttgcatatttatagttcaagactataacctttccgttttctaagtcaaacctcaaatcctccgtgcgacatttttttatgagtctacgtaggtgatccatattcactacttcctctccgttcactttcttcacctgtttacaccatatatatataggcatgatcaatgtagaatcaaatccagagaacataaaccaattggtattgaccggtttcttcaacaccagctaaaaaatgtttaataattggagttgggattatgtacctgcgcacaaaacaacaaaaattgatattagttaaaccttttgtttgcaatctcaagaaaaatatatgctataagcaaaagtaattgagtttgccacaaatttaagcttattgtgacgattttaggtactaaataattttttcaatttcaatgtggcacacattcatactatatatatagtttaactcacttgtcagaaggagaatcattttcaaataccacaccagcaactttgttgcccatgaccactggaccaccactctttccaccgttaatacacgcatctgtttgtatcgctaatatttcaatggagctgtgagcatacttttgaggttcaactctcgttacaataccttttgtgacagatatgatatcaccatctgtatttgcgcataacataactataattattagtcatttttttttaattgaatcatgattgctttcttttctcaataccacatatgatcagtacgaaaattttaaagcattgtccaagacgtaccacgaggataacctaaagcgtagatagtttcaccaataaaggtatatctccgagctccaaatatcctcccaaaactcttcactatcaatacctcagatagctaagtcacatccctacccaaacgctttaacttctgctttgtacttagtgggtgaaccatgttttctcacttgcaggtatgagtgatcacccacaacatgagcgtttgtaagaatcctcctcccggagattgcaaatcctaagatagatattccaaagccgaacaatataataccatacggttttcttaactttggaaatctaataaagaaatcacacgagagagagagaaagagagaaatgtttatgaataccagagcttgagtattctttctcagttgtttgccaaggttgaacaacatttggctctcttgaaaaggagaagatcttcaccaccgagtcttgagccagatcaatatcgctcacagaagaacaacaacgataaatcaaagaagcattaaaagacgaaccaccacgaagaagggaaagagaatacaaaaatagatgaaccggagtgctcgtggagttgctgaacctagccacaatatgatgttcttgttaagtactatgtttacttgtattaacgatacataagatatatcatttacttgattactcatattttcgatccataataattacactacttccttttcctctagatttaaacttgctaacaaatctttttaaagattttaatggaaattgttaacattttatacaaggcttttatataatcaaatgaaactatagattttggtaacacataattaatctgttgtgctctctcttttattttactatgggaaaggtccaatgggcttaggcccaattatttaaacaaaaaaaaattctaactttcttctaatggaaaagaaaatttgcgatcaagcaattactctctctctctctctctttcttctgccatcgccaaaaacttgtcttttgcttctgggttttgcttcttatttttggtaagattgaatttttctttcaccccatttattatttcgtgcttttagatcgttgattgatctgtatcctgcagtgatcattctttaatttacgaaattgttttttttgtgtgtgtgtgtgtgtgtgattgataatgttgttggggactttaggtgccatttttgtcgattttgtggtttaatttacctattgtatattgtgattgaatcgattgggagggtattgagaggtggttgtttcaatctaacaaaatcaagtgcaaatccattttatagccacttatcttctgctagtagatctacttgagttttaagagatgtgtcttctttaatttaatttcatggcttaagtgaatgttttttggcttctttggttgctatagcttatctctgatttgattaagtagaatcctttgtactgaagtgactttttttgtatggatctaatgtagaatatagtcattggagatggctccggttggtcctcgatccggtgatgcgatcttctctagcattgatcgtgtggtaagttcagatttcaaatttttcgcctttttaatctgttcctctttgactctgatttatagaatttggtatttgatatggtacattc

SEQ ID NO: 31452 - DNA, 5537 bp, Arabidopsis thaliana landsberg
actccataacatggcaatcacgggtttgtggtggccaacaagtgtatgcttcaatgaaatgtgcccatctgcgctgatctgaaaagtacattctaagtgaatcagcaaacaggttgcctcaattggaataggtaacaaatcaaaacttgaacaggttaccaaaactcaattcaggcaagccttaattggtcagtcagaattacctcccatataattgcggtttgatccttggaagatgaagccaaatatttgccattatgtgaaaattgcaagaaccaaacttcatcggtatgtgactccaagatctgaaccattcacgtagagagaacttaacgaatgtgatttaagtcagtaagcacacatgcactgcaagtctgactaaactacaaccagaaaaagatgccacacaagtaattagttaatcagaggaacatgggtacaggtgacagcaaaaagaaaagaatgtactacatagccaatgatggaaaaggaataaccgaaaaagaaaataggcatcagattgagacaattatcatcttctatatctttctcaatgacctgtcaaggaagtggaaacgtttgcagaacattgtactgtaaacatctcagctaaagatatgtaaatctcttatagtaccgacaaactcatgaatcagatcacgaagaaacgatccaacaacaagaaggaaacggaagtaacattcacagcagagtgtttagtctaacctgagcagtctgagaaggaatttggtgcttcccgcattgatgatcagaatacaaagacaaatctctatccaaagtattatggaaaacgcaagaatcccgctgaatatgaagtgaattctcaactaaacactccaacctcttttctgggattataacagaagcaggaagcaaggtttgcagttcctccaaaaccttagaccttgaattcacactttctttacctggagtcgaagtggtatgtgatataaagcttgaaggtgatataagggaggaagcgagctcatgaacacgctttgtattaatacgaagaggtgccatctcattccttaaggtgcgtagcgcatcagctatcttttcaactttgagaagctccaagaacttttgctctaggagcaagaaagacgcagccttgacagccttctcatcagggaaaccgattctgtgcaatgttttaacactttgatcccatttgccgtccttaacctgctgcagaaacagcttaatggtggaattgtgcagagagataccggattcttcctccaacatagccccggttttatcatatccaagagaataaagagccctagtgataatcctaacgaattcagattttctaatgacccctttggagccgatagtttcgtcatccccttgggaggtcagaggccttgccatcaggtctcccaaagagttgctgttcacactactacctctaacagacgagttcgcggagaagccgttcggttcgtcagcaagcctcttagcacgtttcaaaggaggttcagtatcctccacaactcccatgaaattcctagttcagcccatataaatcttctgtaaacgagaaaaagcgttaagtgactgcacattagatccatacaaaaaactgaaaaattcaaaattcacttcatttgaatgccaaaaacatgaactttagccttgaaataaagaatggattaacaaattcccatgtacatctagtagcacgagatagtgactatagtaaggagattagcattcaaacatcaaaaacaattagacaagtgaatcaaacccaattgatcaaaacgacaagttaaatgcaatcgaaacaatcacctctgaattgttacaccgacgaagcaaaaaaacaaaacagtgaatcgagatacgcacaatcatttcaatcaaattagtcagtagcaaaactactcaataaacacacaaaattgacacagtgcacctacaagaaggatccccaaataagattagcagtaacaaaaaaaacaaatcgtcaaaatcatcatcaaacttaaatagaagaaggatcacttggggatgaagatcaattaacacgatctaagaaggacaaaatcaaaagggagaaaaatccaatcttaccaaataagaagcaaaacccagataaggtttggcgatggcagaagaaagagaaagagatagtgattaaggaacagcccggaaacaaaggagggaaggaagaccgctatagagatttaggaagcggtgaggagatgatagagagagagagagagagcaagttctggaaaagagaagcgttaaagaagatgaaaaggagagagagactcaataagaaaggcaaaacaaatattataaaagaaggcaatagaagaagcaaagggcagaggcgtggctgatcacaggctactctcgatctaatatatagtcccaacaaaatcttatgcattttcctttacatttactctattttcttttatcttcacattaatatttctgatacttacttaaaatacgttaaaacggtgtcgaatcagcagatcaaacggaacaagcggaataaatataagttttcgtttatagaaaactagttttgaaatgattgtagataaacaaaacagaaaaaagttaatttcaatgatatcggtaatgctattcttcgaggattatttggttgtgttcaacaagtaatttaatcatatatataggcggactagagaaaggaatgctttgaaaacaaatatttggtgcggaaggtatgtgatttggcagaattgtcttgtgtttttagattgtgttcaaatcttatgtaacataggccgtctttatacatcaatacgatgccaaagaaatgtcaaagcaaataatatatagaaatccaactaaaagcttggaagaaacaaatattaagggtttctttttaaaacctttatgcattgtatttggtaggtgaactttgaatgacaaaatatgtgacatggtaaaagatttttgatggcgatacacgtttgacgtttaccttagtccttaagctgcatgtattggtttaggctttacacgtttagtctcgtgttatcatacatatgttataatgcgatgcgtggtgcaaaatccgcattaattgaccggaaataggagaaaatgagctagtaggaaaaaaaaatgttatcatcagaagtttgtatatgaaaacccggaaagaaaaaagcttctccaaagactggtccgccacgtatgacgtatcgtttgtgattccgttggtagaatcgtaatgcaaaattatccaaacacgacaaagacgatacacacgaatttgcttgaacaataataaacaaggttctttgaagaaaagaaagtaataaactatgcacggcactaggagtagaaatgattgaaaccctttaacaaattgaactcatcttgttgccgaagttatacagataacgtatggaatatgaatgggtttgcgattactagtttattggactttcaggccctttttagagaaaattagtttcctcctcccgaaatagtcctgcattagggaccacattatgggcccatattgaggcccaccttaatggtacttatatactattttgtacggaactgattgatagacattagacacggagacattgttgtcgttcttcgcagacatttcgattttgaggacaaatcacaatgggagaagcgcctgcccagattcgacgagtttcgcccacgagcttagggcttgtcttcgatgccgcctcgtcaagacttacgatcaggtctggattctcttgtcacttgtgatttgcgtgtttcttctcttgcgaatatttttttgcctaatctggtttctccaacagtttagggattctggatgcgagaactgtcctttcttcaaaatagaagacgatcatgaacgcatcgtcgatgttacaactcccaacttcaatgggtatggcttaaattcgaatccttactttgaaaatttacatggcactgttcataagtctgtctctcgtacttgtcgttacattgaaatttctgaacctagtctatacttatgattaaatcgtatagtctatacttattgagaagacttattgttggtcgctaatctctcgtttttttgttgaatgagtcgttgcaaattgtgaaatcactgtggtggatatgaccataaagtttgctgctttacgttaaaatgagttaatagtaacagagatggtgctagtgttgattatacttgtcatttgttgatgtcacgtccatgtaattatgtattgatataatgaatgtttttgcagtataatctctatgatggatccacgcagaagttgggcagcaagatggttaagaattggtatgtttcagctctgtttcctgatcatcctcattgtcttttagagtttactatactgtgtagcttcttctttccgtttcctgttattcttgtctcaccattatactttataaatggggatattagtgctgaatttaactgtgttgtctgcatccatttgagcggtagctgcattctgatttgctgtgtgtttatggcttgatgacctgatgttgtattccctaatattgccagctttgtttcagacagaagagaaataaatctaacacattgcaatatcttgtttccagggaagtttgctcctggttgctacactcttgctgtctcagaggcactcccagaggaaatgcaggtaaacatatttacttctcttagaaacctaagaagggattaataagcaaatccttagctctgttttcgtattgactgttcgtctttttcacatgtatgtggcggaaatccgctggcagttcatatgccaacaagcacgggtgcagtacgttccacccaaacgtatttgaaaccctttgcaggttgcagcaagtgtctccatattagcatctctgcaagtcgtcagtttcaagacaacttagtccgatggaggttatgaatggaagtagttaagttttatgtactttgtttctgatttcaactaatatagagagatttgatcctcttattgttatcaaaaactcttatttgatccggaagatagagatagattacatttttttttttcaagtatggaatggatttcttttcctgtgatattcagtacattatttgaattacaaaatgaagaaactttaaattgagcacctagcagaaatgtgtggtaccaataattcacagaaaaaatgtcaactacgcagttgatagaagaagtggctccttaatcaggccaagagggaaacaaggagagatatttattggaatttggaatatgaccattgaaattcccaaagaaccgaagaaaactatgggaaaatgtataaaatgcctgtctttataccaaaagaatataagacccacaaattcatggatacaaagtacaaacaaacaaattatacacaagaatcatcttccgatccaaggtatattcttctgctagagtaaatcatggacgtaacatgcataattaacaatggttacttaacaacaagtagtaatgaaaaattgaagacgttcagtctatttgggc

SEQ ID NO: 31453 - DNA, 1920 bp, Arabidopsis thaliana landsberg
gcgtaagctggacagaacattcacaaaatactgtcaaggtttggatatttggagattttgttctgctttttttctctcatccgataagcccctttaagctaagagaaacatgttcttgaattgcagtgcttgatgtaccagttatgcaaaggcatggctttttgccatggtcatggagtgttgcacaggtaaaaatcgtctttgttttggaagaactatgacttgagataacccattttgacacagatctctaatcctacttgtcttggtttcattacagggatcttaagcctcacaatctcttgatggaccggaagacaatgacgctcaaaatagcagatcttggattagccagagccttcactctcccaatgaaaaagtatacacatgaggtatataagtctatgttgatgaaacattagtcctgtttcattctagtttttttttttttttaattctatcttagtgtatgtggagttataactcaggatgattttacccccatgatttcatttgcaacagattctaactctatggtatagagctccggaagttcttcttggagcaacccattactctactgcagtggatatgtggtctgttggctgtatttttggtacaaaatcttctcttacagtttcactggtttcagttcaatgtcactagcaagaactaacagttttgtttccttttgatgtgtagctgaactagtgaccaagcaagcaatctttgcgggagactctgagctccaacagctcctccgtatattcaggtaagtctttgtgttcatctttacctttaagacacaaacatgacattcgctaacttggttgttctgtttctttctttcctgtcaaactcaggttgttgggaacaccaaacgaagaagtgtggcctggagtaagcaaactcaaggactggcatgaatacccgcaatggaaaccgttgagtctctccacagctgtgccaaacctcgacgaggctggacttgatctcttatctgtaagtctctagtgtctaacacacctctcagaccttgcttgattagtagataatcactctgctgagactaatttgtgtttctatttgtgcacagaaaatgctggagtacgagccagcaaagcgaatctcagcaaagaaagctatggagcatccttacttcgatgatttgcctgacaagtcctctctctgaggctctctttataaactctcaataggatattttgttctatctctgtctttgcttgtctcaagcatttatctgctatcttaggatgattgaagtttcaatattccgttttgattgggtctctattcacaaattgtataaaccttctccagtttttatcaatgaaagaatatatcagtttctataatatttcaaagtagcaagatttgcaactgtttcccatttgtgtaagtgtgtgtgtgtggatgttcaggctacgagccacatgaagaatgttggccagacagtgagagaaactgaagccaaggcataactccagaatagaatcacagagcattcactttctcctgatccgaatagttgagtgattgtacctgccaaaaggtcaagtgagtttatgagaaagacagtgtgatgacatgttttggtagtatttttgtgagtctgaagaacgaaccaagattcatcgctgggggaacgacatactgaagcagaagaacaaactggtaaagcggttcggatgtaaccaaacccaagtaatgcgctcctcgtactatgaaaactcctaatattggcagcaacaagtaacgcacaaccaccacacccattatgactgacttgtttattcctgaacctctcagacctgtgattattataagagagagaacagagatttaaggttttgtcttaggaaaaaaagtttctgcagccatttgttattgtttatctac

SEQ ID NO: 31454 - DNA, 1574 bp, Arabidopsis thaliana landsberg
  unsure (1)..(1574): unsure at all n locations
cactgtgccctttctgcagagaaggaaaagctatttcttcctgaactttcatgttgcaagagattgctagggcattcttaactgcagtttattaacttcatattctgataagacgaaatatttcgatgaaggatgtgaaagcagaaagctactacaaagttacattctttatgattctgatatcaagttctactttcttttttgatttgcagtattattatttcatccgtctcatgggtcgtaagcactctcatgttgccctcgagtgtacactccagtctcatccaaacatggttcgtaactgtttcagtttcgaaacatagactattgattctgttggcatgttcatgctctagactctcattatcgtgtcatccgattgtctcaggtgatactgggcgaggaggttgcagcatctaagctcacgatttttgacattgctaaacagatctgtgatgctgttcaagcaagagcagtagaaggtctcgtaatgaaaaccatctatgattagattatgcaatcatgtattttactgtgtttactaaatctggtactatttcatttgtttgaaccagacaagaatcatggagtcatcctcattcctgaagggcttatagtcagtattcctgaagtctacgctctgttaaaggtaatgatttgatacttgtttctttcttcaatactgagatgtacttcttagtataaatcacgtataagctgacatttgtttgatgtaggaaattcacgggctgctgaggcagggtgtatctgctgataagatttctactcagctctcaccttggtcatctgctttgtttgaatttcttcctccattcattaagaaacaggttcaaattctttgaaattagaattatctttgttttccttcaaagcaaaggtgtattaatacatataagatggtcgcctttcttgctacagctactgctccatccnnnnnnnnnnnnnnnnnnnnnnnnnnnnnnnntaattatgaagaacaaacagaatattttggacctactatgttataaaaaaatggttggaatcctaaatgctctttttgctttctactctagattgagacagagaaacttcttgcgtatctcgtggagactgaaatgaacaagcgcttggtatgctccaattttatcattggtttctatcttttcccaatactgttatctaaataatggagtcattatttggcatcaagaaacactattgctaatgtaatgaaatctttgaatttgacagaaagaaggcacatacaaggggaagaaattcaatgccatatgtcacttttttggttaccaagctcgtggatctcttccatcgaaattcgattgtgattacgcctacgtaagtcactaacagtctgcaccacagtaccaatgcaacttcatagtttagatgaatattaacactattgaatgggagaatcatgcaggttcttggacatatatgttaccacatccttgcagctggtctgaatggttacatggcaacagtgaccaacctaaaaagtcctgtgaacaagtggaaatgtggtgctacacctattacagttgagtttt

SEQ ID NO: 31455 - DNA, 1836 bp, Arabidopsis thaliana landsberg
cattctctcgcggatttgttcggtataggaaatacatttttgtagaaatcgaagaagctacttcaaatggtgcggagtctcaaaaggtaggagaaggaggctatggtcctgtctttagaggctttcttgatcacacaagtgttgctgttaaagttctacgcccagacgcagctcaagggagatcacagtttcagaaagaggtaaaaaaaaaatctttcttcgtttctgattttatacaagaaagttttcatctttgagtaacatatgtttatgttttctcaggttgaagtgttaagctgcataaggcatccaaacatggtgcttcttcttggagcttgtccagaatttgggattcttgtttatgaatacatggccaaaggaagtttagaagaccggcttttcatgcgaggaaacacaccgccgattacctggcagctacgtttcagaatcgctgctgagatcgccacgggactcctcttcctccaccagaccaaacctgaaccaattgtccacagagaccttaaaccaggaaatgttctgctcgattacaactatgtgagcaagatcagtgatgtcgggctagcgagattagtccctgcagtagcggaaaacgttacacagtacagagtcacttcagctgcaggaactttctgttacattgatcctgagtaccaacaaacaggaatgttgggtgtgaagtcagatgtttattctcttggaatcatgcttttgcagatcttaaccgcaaaacagccaatgggtttggcttattacgttgaacaagcgatcgaagaagggactcttaaggatatgcttgatccagcagtaccggactggcctatagaagaagctctatctttagcaaagctttcgcttcaatgcgcggaactaagaagaaaagatagacctgacctcgggaaagagatattgcctgagctcaatcggttaagagagataggtgaagagagtttagagagtgtgttttatgcaggaaatcaaggaaagtctccaaacactagccaagtctcgattccggaatctccagctgcagaatctcaatcctagttttgatatgagggaagcaaatgtgctctaacactcaatttgcaggagttataaacaaaagcagagcaagtttctttgctgattagtgtatagcattagaggaatttggtattctgttaaataatcagttatgtaaccgcctttttgttaggcccataacggttttgaacaatcaatactgtatttattaaagaatcgataatgtaagagcccatataaataggcccaatggctcagaccggtttgacccaaccgggattttggttttattaattaatttggttttgaaaatcaaaatggttaaacccatagctacagataaaccctgcaacagcttcttcttcttcctcttgatgtgggcagaagcaaagtagcgacctttgtcttcttctccatcgtgtttgtttatggagcttttacatacgtcctgcaatttcgaaaccctaaccttgatttctcctcctttaaaatcctgtaactttagttccagctctctcttcttctctcctcgtcgcgtaaccttgtttccagcttaccatagtggccgcgtcactgtttccgcctcgttacagcacggagattcgaattttagctctaattcttcgcagacaaatcaggaagcgcagaattcaattgctgggtttctccgacgagacactggactctcagaggccgattcagatttcatttcttcaaattgtcctaaatacacgcgaatgatcgtagagggtgttagggatttggaggaatggaattcgtggaaagggagtg

SEQ ID NO: 31456 - DNA, 1443 bp, Arabidopsis thaliana landsberg
tacaaaagccactaaaaatcaatatataaattgcaatgaaagaataatttaggtttttatcagacacttgacattaatgacaaatcatagtaagtacaatttcacattttcacactataatgatatttttgcttttgttttatttctctgttaataaattggcaccaataatattacatcaaatcccctgttctcgtttgtcacttaaatgatgataaagtagacatttctacattggaactcaaaattcatgatctctcatccgccacaatctcatgatgataatgtaaacatttttacgttggaactcaaaattcatgatctctcgtctgccacactctcgtattgatatcatcattttttaattcggtaaaacgagtctaatttcttttttaaaaaaaaattatgatagtgtaacaaaaagtttttttgttttgttgtcaagagacttttattaagagcttatcgttaatgatgattttatttggtttgttaaaaattttattactttttttctaaattgccacttttgcaaaaaaaacataaaatcattcacaattccaccgaaacatagttttattcaaacatatatacgtcgtatccaattgaaaggatctttggtcgcttcaagtcttatgttagaaatggagcacaacctgaagggtccatttgtgagcagtatattgttgatgagtgtcttacattttgctctatgtatcttgatgatatagaaacaagatttaatcgtgttggtagagtggatgattacactacggtggagcatgacttaggtcttgaatcacaaattccacaaatttttccttctcttaggagaccagttggtgcttccatattggatacacttagtcctatagaaaggcagcaaacgcactgatacattctagtcaatagttcattattagatgactatcgcaagtaagttttctactttacgctgaaagattttttatattgattatgctcgtttatcatagtaattttgccttcctatgaaaatttatacggtatttaaaagtgaattaaaaagatcacaattacgacgtagaaaaagaggtaatgtgatagatataaatcggcatgtgcatctccatttgagttaatagcttaagcaaaaggtagaaaagaatggtctcgatggtatttctgctgatattcgttgccttacacctggtccatctagtaaggtaataaagttctccgcatataatatcaatggcttcaattttaggattatagaaagggaccaagatttgaaaattcagaatagtggagtttttgtctcagctgaaaccattagttatgctagttctcgcgataataatcctatagctagagatgtttcttattatggaaaattaatagaaattctggaactgaactactatgattcatttagagttgtattattcaaataaaagggta

SEQ ID NO: 31457 - DNA, 3463 bp, Arabidopsis thaliana landsberg
tctcactaacctcaaagctgattgatctcttctggaactcgtaaaacgcattagtatctgcggaaggagacttccctgcatcagcatgataatctatcattccttgtaacatagagatttcgtcatcgccactccatagtctttgaaaaagtgctggcttctttacactctcttcatctttcttgactcgtttcgttgaagtcgtcgcagcttcactcgctgccctctttgctccagatttcaccgccggtaaagctaaagtagcagtcgacgacgacggatcatctttcttctttgaagcgattgttttaccggatccagatttcggaggatccgtcgattcagaatccgaatctgtttcactctccgaaccagaatcggaatcagcagcggcggagacggcggtggatttagaaggagcagcggcggagacggaggtggatttagctggagtagcggcggagacggcggtggatttagcaggagcagcggcccgttgtggcgggaagggatttgattggttcgtcttcttcagatgaagaggaatcatcttcggaagtctcgacgtcatcttcgtcgcttgaaggtgccgttggtggatcgagtttcttcgtcatcggaagtttcaaaagagcaaatcggaattttcgagagaaagagaagatgagaagcttcttagggtttgtgaggaagatgagaagcttcttagggtttgtgacgaaacgatgataagtgaaaaggaatatttataatcaatttcgatattctcaaacaataattgcgaaatttgctttccttattcaaatcgtttcatatttccaatgtagcagttcccgttaaaattccattgttctatgagttaaacaattaatattgtcattaaattaagattctaaatctgaaaaaatattatttgttaagttttataatcttattatataaaattttttgatttgtctaatgttagaaattgtaatgaaagagtaatttaggtttaggtcatgacattaatgactaatcataataagtacaatttcacatttttgcttattatataaaaatctttgatttgcctaatgttcccatatcgaagatctcattctcatggatctcattctcattaacaaatatttggtgaaagagtttaatattatgtataattaaagcccactaaaaactaatatagaaattgtaatgaaagaataatttaggtttagatcatgacattaatgacaaatcataataagtataatttcacatttttgcttcacatattttcgcactgtaatgatttttttgctttcatttcatttctctgttaattgtatatatacaaaaatatctatatacataaatatattcatttcttactgccaatgtttataaagtcaccccaaaaaatacaggaatatgagtttctttttaatgaattggcaccaataatatattacatcaaatcccaagttctcgtctgttacttaaatgatgataatgtagacatttttacattggaactcaaaattcatgatctcttgtccgccaacactctcatgatgataatatagacatttctacgttggaactcaaaattcatgatctctcgtctgctacactctcatattgatatcatcatttttcaattcggtaaaacgaatctaatttctctaaaaataaaagaaattatgacagtgtaataaaaagtttttttgtttttttgtcaagagattttttataaaagcgtatagttaataatgatcttatttagtttgttaaaaatttaattatttttttcaaaaaattgctacttttgcaacaaaaaaaaactataattaatcattcacaattccaccgaaacatagttttattcaaacatatatacgtcgtatgtatttacatttgcatgatccaaaatttacttcctccaataaaattttgcactttaaatagaaagtctctatacacatccgtatagaaacgggatcacaaaatagtttttaaggatatagttacccgttcgacattaagaacaaaatagaataaacataacaataacgtaccataatgatgacaagagctcaagcaattacacacatgaaaattcgtatatgatccaaccttacttgcaataagtcaatgccaagttataacaagaataagatattcacttcttggtgttgttgatagactccaccttgccgtcattacctccaagcaaaagatatttatccttgcgagtaagttcggtgcattcgaagcccaaaaccgcgccgataactttctggacgtaattagccacctctataggagtcttgccaccaccgttgacagtcatttcttcaggcaaacgatccaagaaagtggcttcatagcttggtcttgggttcatgaagaagaagtaagggtccaaaacttcacacccctaactgtggtcccgttgaacattccttgtttacagttcatcgctactggcacaatccggtcgattagctctgcgaatagagcgctaaatctcagtagatactcttctctacacgtcgtgccttccggacatatcaccaagtcgcctgttatacaccaaaaacatatcattagctcaacaagtccattgatttttaatttctcaactaaagattaatgtgaatgtaagtcaatattcaaaagaagtaaacaatattattttatgttcatttatataaatttggttagaagatgcgttaattaggtaccaaagtaaacatcaaagaccataccaaagtaatatttactatattgagatttgcatgggctactatatatgtattcatcgaaaaataaaaagaaagaaatagaaactcctattgaaccccctggacagtgaaacttgttataggtatgctctagtaatatatgatgagaagatgtgtaaagtacctttctcgagaagttttctcatgttggcagcatcggtggcacggtcacgggtgagggcaacagcaggaataggagaaagcataagggagagacgagagacactgtaagtgacgcaacagatcttacgtccaagagcaatagcaacgatgatgggatcaagcgcggtacggtggttaaggacatagaggttgccaagagttccaggggaaggaggtggaggacgatgaccacgaatggttaagtggatcccgagcatctcgtaagtgtaacggacaaatctttcaggtaaagggaggttgaagtagacgcgaatgatggagaggatgaaaccaaaaggaagccataggtatgtgataatggcgtttaacggagttggacgttgcgctaaacgcccatcatggaagactatgcggttctttaagcgttcttttggaatcgttgtggctgacttggtcgcatgaaccatgtaacctttctgttataataccaaaaacgttattcatttcaaacttataactaaaagtacttagaaaatgtaccatatctctaaatt

SEQ ID NO: 31458 - DNA, 5956 bp, Arabidopsis thaliana landsberg
ggcacagcgtcgggctctgaaggtgaaggtggtcgatcgtagacacctagtacatctgtctttgtaaagagttactcagataacaaagaatatataggaaagagggagagagaacacaaattaaatttccggtttatactatgaataggatacgagaaagacaacatattctggcttcaaatgatctgcaagatgacggatgataacatcaccactcaatatggtgcagccctgttcaggacaagattttcaactgttcaaattctaaacggacaagaatctagatagctatttggtatctctggagagcatattaccagtatattgtccagcactgcatctccatggagaacctggccatgacaaaaattactgtccaaattacagtcaagagactttggtaaacatctacctaatttcactggtgggatcaaaacttacagggacaaatcctgagtctatggttttagctacggttgctagatctgcagaagccacctaatgcaaaaagcagtctcattgaaatctaaacccacatgcttcagatcaggaaatatgttaagaagttcagttagctcttacatctcttttggaggttgaccaaccacatgaaaatggagacatgcctatcgtaggaatgccctctgcaagagatcataatgtttagcttcaaaattcatcttttcctcttagccagagtaggaaaagagaataagcttaagagatacctcgggctagtgctcgtacaatttcaagattaagatttgtcacctgcaaaaagaagttgtagactatcagaacagctcaagactatcttacgtaagagcatcagatttagctaacagtctcacagatatacgagtagcaacgaaaccagctttgacaataggtttctcaagtcctcctttgtgaaccccagatctactggcctgaaagtgcccaaaggaacctaatgacaaaaatcagaacaacacataagaaacccaaaaactaaataacagctcaactaacacaagcaggtcaatgatctgtaagagctaaatcaaaaatgtattttgatccttcattataagatttaagcagataagaatcaatctccaactaaccagcgccatgaaccacaacaaatttactaaactcagaagacttttgatcccctatgtcatccacatcacaagaaatctcagagcttccaggtctcttgctccaatccatgccaataaccttgcttggagctgaaccctccaacatagcttgacgtaactgacacgccacgacctccagattttcatcgtgaatcttctccagctcgtttttgcaagtaattgccgcacctcctatcaaatcatttagacattctgctgttacaaagtctagacaggtaaaattgatgggaaatgaataaaagacagatctttaaagtctttcctcatcttcggtattcaatagtcaaatcagaatcaaacccataagacagaacaactaaaatgcgatctaagaatcgatccagcaagtattttaatagggatcaaaagacaaaccaagtttcacaatgcaacgaattgatctgcttcgactctcggaaatattcagctccattgttgcgtctctctctaaagctctcgtctttagtggtcaacggtatgtctctctctcccgctctaactcaacttcatcgtactcgtatccttcttcttgccatttcccattcaccggaaagattctctctttttttttttttttttttccatagaaatattcttctttttattcctctaaagaagcccattaagctattattgggcctaaccaaattgatcaattttttcaaaccgggtttatggtttagtgttttaaggtttcagttaaattagcggtttagcttcaagttcgcgatggagtagaagaagattacctccgacaaaagcacgttcacttgtgccaccgacaaaattggaaatcttacattttttgttttctctaatcaaaattattgttggaacgtagacaagatccgttccaagattcgtctttttttttcaatttgattcctgggttatctgaaagatcttctctttgcttcgatttctatctccgctgcttgtgaaatcaacctttatggtatgtaatctcgaactcagctaaaacacacttcactctcggaaacatggagacggaaacgaatcaggttttacggaaaccggagctaaaatcatacagtcacaaacaatttcactcctcaaatgcgttagagatcttaagagaaacagttcgaattctccggtacaatcttggtgctttaatgttaactactgctgttttgatctgtcctgtctctgctttgctcttaccaaactttttagttgatcaatcattagtgaataaactcacagtgaagcttcttttagtggcgaaatcaagtggtcttcctttgcagccttttgtcaaacattcttgtcagaaattcgctgaaactgctgtttcgtctgcaatgtgtttccctgtgtttatcactgtgtctctgttgtctaaagcagctgtggtttactcagtggattgttcttactcgagggaagtagttgatataagcaagttcttggttatattgcagaagatatggaggagagttgtgttcacttacgtttggatttgcattctgattgttggttgcttcactttcttttgcgttcttcttgtagcaatctgcagttccttctctgttctcggcttctctccagatttcaatgtttatggagctatgctagttggtttagccttctctgtagttttcgctaacgcgattataatctgcaacactgcgattgtgatctcggttttggaagatgtttcagggttaggagcattgatgagagctagtgatttgatcaaagggcagattcaggttggtttgttgatgttccttggatcaactttaggattggcgtttgtggaaggattgtttgatcacagagtgaagaaagttagttatggagatggctcttcgaggttatgggaaggacctcttttggtgttgatgtattcctttgtgacacttatagattcgatgatgagtgcagtgttctattttagctgccgagtttattatagtatggaagcttctagaggtgaaactcagccaatcatggaaacggttacggttgtggatgctgagtaatggtgcgttgtgcggatcaaactcggtgaatggacatggaaacgtattagctgaagaagaagttgtatatcatcaaatggggttttattgagcactttttgtttcactttgaaacttgatgcatctttaaggtttttgttatatatggtttctctgtttacattgtttgaagattatatagcatcccaagttcgttcatagttctgctcttgtttctttttagccagtttgattgagtcttgaaaatcttgggcgtaaaatagtaaaattaaaaagtaggtgggcctttatgcaaggtaattatattacaaaggacttgaaattaaaaccaaaagtaagaacaaaccggttcgcatggtttaaataatctgtgctcgagcggtcaaattgtaaaaccaccaaataattcttcgtctccctcaccgtcgcggcgtcgccactcgccgtcacaaccaccgtcgttcaacatcactgtcaccaaaagaatcaccgtcgttcggtcgtgacgtgtctggacctatttcatctctttgctcgtgactcgtgagtcaaatactcttggacctttgctgttatctgtacctctaattttgtgattttcagattccttctcgtttatcgagttggattctctgtatttgaatgtatttttgatagggtttcgtttggaaaccaatttgattctcatatttaaagtgtagttacgtggtttgtgttctctcttggggatgttcaccacctgttcgatgaaatgcttctacgtattagtttgatgcaatttctgtatagtttcgacgctctccgagcttgtatttagatattgatggttaggtgactctagattctgaaacgaacatttcaaggctctagaaacttattctggactaagtttatcaaataaacaaggggatggttagagccttaagcttgatatgtttatgttcgcattgcagtaatggaggagggacgtcaaaaagacttgcaattgttggaggagattatcgacaaaggtttgaaacagaagcttgtacatgcaactgcttcacggtatttatatttacttccttttcagatcaaaattaaaattgtgagtatgatattaaagtgtatgtaggattagtttagtttgttttctttgcatgctattcactttttgtttgaggtttcgattcattgtggtctctgcatttgtggttttgcagggacaagatctttgaagaacaaaaaacactgtatccttttgtatagggaagactctagcttctcgtgatgtgcatcatcttgttaagctgatcctaagtgttttgttagtttctcccatgtcttaaccctatcaaagatgacgggttcatttaccagtcagtttttgacttagttttgtgtttctaaatcgagaggaactcttcttggtgtagttattgacaatactttgctgttctagtgaaatctaattcggttgaaatattcttgtttccttgacggttactcccactccagctctgacttgcggaaaaacctagaaactctggagaagaatggtgtaaatagtctcaaaacaagggtcaaccttggttcagaagtttacatgcaagctgaagtgtacgttacttatagctttggttctttcgtttaattttagtcaagtcatttagctatgaaaggtcatgcattgtctgcatacaatgaaatacactgtctccatacacagcttaatgcaattaagaagtgtgcttttactgtgttctgtatgttagaagctagttatgtattattgagcagaaaacgtttaataaatggggattaaaataggagatgctttctaccaggtttgcttctgatttcgtttcacttgacttgggtgtttgtttgagttcaggccagatactcggcacatattcatggatgtaggcctcggcttttatgtggagttcacacggcaagaagctcttgactatatagcacaaagggaggaaagaactcaaaagtaagagaaatctttgcttttctagttttcttgctccatgtacaaggaaaatatggttgtatcattgtatatgatgaatgagttctccggtggaatgcagtatagtgactgaatgttgatgcaatataaatgtggttttttttgtttttaacagacaactagaagagtatactggtgttattacgcagatcaaagggcgcatcaaactggtaagttcaagttcttatcttgctttgtgatagtagtcaatcatttgtcttatgaggttgaattggactagaaaatcactattgcgtaggaaccctgcatcagacggatatatgaaagtgtcatcggataagtattaatgttaaattaccattgcaggctcattaccagattcagcaaatactcaatcttcctgaagagaatccgtcatcccggcaacgtgcgttttagtacactacctagtggaaagttgaggattttctcttgcagtcttatcttctcgatttgttctgcttactgttttgagtttttaaagcagagaattaacttagtttgttcaatactaactctttctccggaatggaccaaactgttggtgtttgataaacatatcgattaagcaatcaaaactttatagaatgactattgttgtgggggtgaatagtgaatcgcactctgttaaatctgccatttctattttaaatattaataatcacatgttagaacatagaagatcattaacagtttaacacagctgatgaagaatgaaataaaagtatgaacgcaacagatggcaagatgaatgcttt

SEQ ID NO: 31459 - DNA, 3242 bp, Arabidopsis thaliana landsberg
ggcgagtggtcaaacagaagccaatctaaacacgatgcttgtgttgttaacattactacagctaaagataatgagaagggtgcgttaaccagagataagacaaaaattgaaattgcaaccaactcaatgcaaagccatatcacttcttctttcggcaagaagattatcttatacagaaccaagattaatcgtcctaataaaaagcaaatcttatgtctctgataggaatctatcacatactaggtacaaaacccatcgatagaactaagagactagtctatttgtaacctatgagtgactatttaacagcctcatgagtcatgacctcagaaagctaaggagaaattctcaaactatattagtcaagtgcaaaagaaccaacggatgttatagaaattccaagaaggcttgttcgtttacatcctcattgatctacttgaaaattttattctaaaaggcaagattcatagctcttatagctcactcttgaccttagcatccccatttggtaacacactttgcgtttgagccaaccgttttgcttcctgaattcaaatgaaaataaatttatcaccttgactaactattgtagaaactatctcagatgagaaacaaaggaacgtcaacaacttacagcagcataactagcacgtatgtctctataccgatcgacttcatcaggaaaagcctgttcaagctcctccaagagatgttttctcaaaccctgtaccaaacaatgtcgactttaaaatcatgagtggccaaattgagagaaccagtacagcaaaaggagtcaccttaaaagcatcactctttccctttgtaacttgatttttagcaatgcagttcttattaagaacatcttttgtaaactcatctgggttcttcccatcatcaatcaagctacaacaatcaaagatatataaacataagagagcaccaaaaattctctaaagagtctaaaaagggacttgttctcacttaagaacctcaatggggacttgaatgttgcatttatcagacaacttagccatattatcaagctccatcacaagagaattgctgcagatagagacaaaatttcaatcacacaatactcaaaacaatggatcaatagagaagaagaaaagttacaggcgttggaggaggtgaagctgagaagcaggtgtgaaagaagagacggtgagttttaattgatgaaggagttctaaaattttctgattcgagtttataatttggttcagcttctcatttgaatcgtcgacggttgcaattgcattgatttcggtttttatcgaaccgttgatttcaccaattccggcgattgtgttctgtgtttgatccatcaccgaataactagaaacgcgattaaaacacacacaaattagggttttgaatcacggaaacatagaggttgagggaaacaatttatgtagagatcaattccaattgacacaactggatgaaatttctgggaacgatgaaaccctaggaccaccgacgaagaagaagaagaagaagaagaagttcagagagcgtacatggatggatttgagaagaagatcacaggcgcaaagtcaaagtggtcaaaagaaaattaacaatcgagttttgaatttgttgtagtcattaatgggcctttgggcttttatatggttttcaatggagttaagtcatgtccatttacggttacttaaactaatgggtctattgttttgaacttttgattttaaaaggtggagatggttctgaatctctctggttaagtatcaatccatgagaccttttttttttttttttgaatgaatgtgtgaaattatattcaactaaaacaactgttttacaaatcaaattcaactaaaacaactgacaaattaaatctctctggttaaggggtacatttttaatgtctctagtctctacacataaacgattaacatgagagttcaccaaatcttttccaattgggtttgttcacttggtttcgttggttttaatcttcacaaataaaaaaatggttttaagtaaatagaaagaaaaaaaaaagaaaaaaagagtaatcgaaggagctgtaatcttcacaaagagcacttgattataacattgaatcttttgcaaaaaagataaaaatcttttcaagaaactgatccatccaaaatactatcttgtcttcactcttcaaaattcctgtcattactctctcgaaccctttctcttttcgaatctccacttttttttctatcttctgcttcttcttcttctctcttcaatgattccactctcacaaaatctccatgactacaaaacgcatagacagagatctcccatcttccgacgatccttcctccgctaaacgccgtatcgaattccccgaagaaacactcgaaaacgacggtgctgccgcaatcaaactccttagcttactcctccaatgcgccgaatacgtagctactgatcatctccgtgaagcttcaacacttttatccgaaatctccgagatatgttctccgttcggttcctcgccggagcgagtcgtcgcttacttcgctcaagcgctacaaacgcgcgtgatcagctcttacctctccggcgcgtgttctcccctctccgagaaaccactcactgttgttcagtctcagaaaatcttctccgccttgcagacttataactccgttagtcctctgatcaaattctcacatttcacggcgaatcaagccatttttcaggcgcttgacggagaagattccgttcatatcatcgatctcgatgttatgcaaggtcttcaatggccggctctatttcacatcctcgcttcacgtcctcgaaaactccgatcaattcgaatcaccggatttggttcctcctccgatctactcgcttcaactggccggagactcgccgatttcgcatcatcgttaaacctctctttcgaatttcatccaattgaaggcataatcggaaacctaatcgatccgagccaactcgcaacgagacaaggagaagctgtggtggttcattggatgcagcaccggttatatgatgttacagggaacaatctcgagacgttggagattctacggaggctgaaaccgaatctgatcacggtggtggagcaagaattgagctacgacgatggaggaagctttttaggaagattcgtggaggctttgcattattatagcgcgttgtttgacgcgctaggagatggattgggtgaagagagtggtgagagattcacggtg

SEQ ID NO: 31460 - DNA, 1225 bp, Arabidopsis thaliana landsberg
tttagatgatcaagaagtgggtgaaggagagagtttcatcgattttgtggacagagtattggttgtgacaggcaatttccccataaggaaaatctcgataaaatgtcgtttgagtatcgacacgggtcatgtcacccgctggatggttgacgtgctggaacatggtgtctcatatcttgatattgacataatttccgaagacagacatcggtttcgtacctcttgagatcttcacttgcaagacattggttgagctgaaactcgcaagaggattttatgccatggttcctgattatgtttctcttccatcgcttaagactctctttcttagttccatttggttctgtaacagggattgttgccctttgggaaggcttctttctgcttgccctgtgcttgaggaattaaccattattggtgggtgctggcaacatatagaattttgtcgcaccgtctcctcttcgacccttaagaaacttactattacgtcttcttttcactatgaatattggggcatcactatcgatacaccgagtcttgcctacttagaatactctgatctagttccaagacactttccgtttgtgaatcttgaatcccttgtcgaagctaagctcgctcttgatctatgttctgatagcaatccaacaaatctgattaaggggttaagaaatgttgaggtcttggagttatcatctggttatactagtcaggtaaagattgatctcccctctttttctttctctgtaagataatcgaagagcttggagacgaattttaggaaccctgtcttgaggtttttggatccaaatattgcaaattgtttgatgactatgtatattgactagttaatttttgttgcagatattatatgtgaagcaatcccagtgttgagcaagttgtttcgtttatctattaaaagtaattcaagacactactacatttggaatcttctgccaatacttctagaaaagtctccaaaactagagactctcgtcatcaaggtataactgaaactcctgaagtttattggacaatctaaaatctctaatcgtccctcttgtttcagggtccattgtccgctgatagatatgaacgagaatatggattgtcatgtcctgtgaaagtattggagataactgagtatggaggaaaatatgaagagctagagcaaatggaacatttcttaaagaaactgccatgtcttgagcttggcaaggttcgg

SEQ ID NO: 31461 - DNA, 1121 bp, Arabidopsis thaliana landsberg
cttgtggtttcattagatagatgttgtagtcaaataaagtatcggcgtaaggtgatgctccttgcaactgatttttggacagccgaaaagaagatgaattcgaacgacgctggatcaagtcaatggtgaagccgtgaggtgatgagacagtggtcgtgaagagaaaacatgtaatgatttgaagaaaaagaacgatcattgtcgttgcaagagacattgatatcgaatggttttgagacacaatgcaatgctcttcattcatgcaagtatatataactttttgtcgtcagtcgtaactgttaattgtcaaccttttccaattttgatatttccatgacatggggaaacaattaattttgttactaagttttacatttttttggggggcttcattatttttaaatggaaaatttatatcattccgttgaagcaaaatgcatatgttcttttttaacagaaaataaatgtatatgttctccaaatttttacttttccctaatatgtatatacattctttactctaaaaataaaaggaaatttacataatcatgaaaattttggtctgtataagtgtaactcacgcttgtttgtagtttgaaccggccttgcatttgaactcgaatccttccaaaaaaaaaaaaagtgtaatactcttttttttaaacaaatataattaatcccattggtgatatataaaggttttaacgaagaaaaaaaacggtaaataacgatagaaggatgattaaaataaaatatacctttgtaatgatggtccatgtaacattttgcttacaaggaggagtggtaagtgatccattatatctataataatttccgctctcaatcttagttttacttgaatctatcattactattgtaatatattatgataattttatgtttcacgtgatataccacttacatagcagtatatcacgattcaaaaggtgagtagtaattttaaaggaaaaaataaatttgtaaagagcaaaaacgcaaagcaaagttcaaaatggtatttgatgaaatatatatctgagtaatctgactatcaatcacattagagattatcacaaacaagtattatggatctattaacgatatttatccgaaattatcca

SEQ ID NO: 31462 - DNA, 3748 bp, Arabidopsis thaliana landsberg
atgattcctcgatatatagttagagaatatagatacaatataaaagttgaaccaaaaatttcatttccgtcggtgtttgtttttatatgtaggaaacaaaaagataagcggatgtttcccctgggattacgcaaatatcaaagattattataggagaatctggttgaggaaagctgacgtaaccaccacatgaaaagccacgtggcacatgcacttcccctagaaatacggaactttaataaggagcatccagcagaacggaaatcttggttcaccaccgtctccagatcaaagaaaacagagaaacatctgtttttttgtttagtttgatctgttgagagatgacgagcggtggcgacaataaaaacagatctgtggtgacagatcatcaacatcaacaacagcctcctcctccgtttcaaggcgtctctaactatccaccgcagcagcagcctcccgccaccggttatcctcagcctgctcagccctacgcccaaggtttctttctttcctcatctctcattatatggacaacatcatcaaagctgtcgttttgttttgttttgtgttttgtttggtatagaagcttcattttattcttgatccattatatcgaagatcctttttgatcaactttttacctcatctaagatgctaagattcgcattggattaaaatttgattatttgaaaattcgagtgatccagtaattagagagaaattgtatattgcctcttctatgatataaatcaagatgctagattcacttgagaataatgacatgaagaaatgaatcttttttataaaaaaaaaatcaggtttttgaaatagataatgcaaatagaaggttctcttttggcgtttacgtcttacaatttgacaaatgatttttttgcttagtattttgaacattgtggattcatttggaaacaaacatcagaatctcttatctcatctgccaaaatttctagctaaactgtagtttctcaaaaggattgtatcattattgcaacgtacacacaccacttggctgttgtaaagctcgttttggttatctctagttttcatcaactatagtctttggtcgcaggttatgttgttaatggagtaagaccaacagaacacggtcgttgttgcggtatcggcattggctgggtattgtaagtgatctttatcatttatttttacctaacttctcttctcattacattcttgacaatttttgagagttttttttggtttgatgtgtcttgaagattcatccttggtttcttcttcgctttgccctggtacatcggtttcttccttctattattctctaggaacccgcgtgagagaccaggatatatagcttgcgcagttggggtaagtccactactctatatatctctctcactcaacaagaaccatttctcttttctttatcacaaatataaatcaattctgactaacccttccttttcgcaggctgtttttgctaccattatcgtcatctttggaaccgtaagaggatcaggggtgtggtcatgaaggtgaagatgtcaacaatctgaatccgttgagattttgtttcagaagaagatcgatccataatgtttgtttacataatgtgtattgtctctagattacaaaacagtactgtatatgtttctttgaaaagttcttcttctgaaaacatactagtgtttgcattgttcaaagaattttttttatataaaaaatttgcatttgtttagatgatacgaattcaaatgaatctgattataagctcatttagtaaatgtgtttgacctgaaccactgactcataaaaacacttgagctcatttgaccggcgacagtaaaaaagtaaatttaatttacccgatttacccgctgcaaatatttttgtaacgccaatgtaatgagaagaataattaaaggcccaagtaggaaaaagaaaagcccacagagacggcccctagggtttgtcctttagagaaacctcttttatagttttctcatgagcgccaccgtttagctcttttctctctgttttgctcttggctgattcgttggagcttgatctctccgtggaaatgggtggtttccgggtaagttacttctttagtctgtgtataggatacgtgattctgggtatttggacttctgaagatttgatttggagaatcatcaactgtgctcggtcggggatagtgtattataaggataaataggttctgattcgcttagaaagtatgaaactttttctatgtgcatccgttaaattaatatgaatttgaagtgtttatttccggatttggtttgttctgtatgaatctctaggatgattgttttagtgcttcatgtcttctaaaatgatcattgtgaatcattttaagcttcattagctatccttaggcccagagatcggtgttgtcttgtgactcactgagagagttgatatgatgtaaggattagggtctggtgctgtttaaggttttaccaaagctgatatttttgttggtttgtgattaattgattcaatgtacattgcagtttcaccagtatcaggtggttgggagagccctcccgacagagaacgatgagcaccctaagatctacaggatgaagctttggggtagaaatgaagtatgcgccaagtccaagttctggtgagccattcgatttgataccagtttgttaatgtaaactccattttgtcttgtttatttcctgatctaaaatggatttgctcgttgtatctaggtacttcatgagaaaactgaagaaggtgaagaaaagcaacggacagatgcttgccatcaatgaggtatggattgcattttacttagatatcttagatatgctgaaagatggctacttgtatctgatcttgttgttctactttattatagattttcgagaagaacccaacgaccatcaagaactacgggatctggttgcgttatcagagccgaactgggtaccacaacatgtacaaggagtaccgtgacacaacactcaatggtggagtggagcagatgtacactgagatggcttctcgtcatagagtgaggttcccttgcattcagatcatcaagactgctactgtccctgcaaagctttgcaagagagagatcaccaagcagttccataactcgaagatcaagttccctcttgttttcaggaaggtcagaccaccaagcaggaagcttaagactacatacaaggcatcaaaacctagccttttcatgtagaagcaaccgacatgattctcatcagaataggcttcttgttcctagtctgaacaaaacactggagttatcttcttttgaacatttttcaactttttttttgttctagatatgatacaatattaaggtgactcatctccaattttcgtcagtttccaaagttttgctgctttagtgtaatgttgcagaaagttcaaaactgtactatctcccactatcataaaccaatctgctttgtatgccaacgaccactaaactagcaacacttcattctcattcttgtatgaaactattctcgcaattccataaatgtcttcatctgcagtctggtttatgctacatgtccccggagctctcggcgtctgacacacacttcacccaaaaaggattgagagcagttcaattcatcatgctcaatggatcacttttcatgatttatcgattaaaaaaattgcaagtagacgagaacagatggaaaactcttacacgcaagtacacagaataagccccttt

SEQ ID NO: 31463 - DNA, 1489 bp, Arabidopsis thaliana landsberg
ggtatatcccttggtagcaaactgtcgtacgcacaccatcagttatgctgtctatgccgcatgtattgacgttcttgcactctcatgccaaactttcataccagcatatttatgcatgttgcgccatgcttcgtctgtatacaaccactaattgttagattgattgatgcgtgtcctagctcattacttatgctccctcctggctctctatgcttaaaggtagggtagcattgtatcagcttagagcccacattacttgtagctcacatgtttgagtatagtggctccgtcactgcggatgttagctaatatagacatgcctagcgcctagtggatcctctctgccttcacctgggaagttcaacctgcatgcatgtgtcttagggtattatcagcaataatggtaattacagtgttatccctatctccatgcaattatttttagtgttgattttttctgcacctttggtttggcccgcaacggtatcttgacctttgccatctaactcatcatagctgatttttagttcattcccatttctacggaactccgatagcatcttcacccattgttccttgtctagtcttctaaaagacgaaccaacgtacttgagagctttaggacgattaccggcaatctttgcagcttcatatgcaagctcgttgaaaccacgaggtggagagtttttcccaaaagcatatcgacaaaacatatgatgagccagttcttctgatgggaatcccacttcataaacatgtgcaatgttgtgagccttgagaagttcccttttttgagtaatcacaacaattttgctctcagatccaaaccatctgatacgtcctaccaacgtttttagtagctctatatcatcaacatcatcaagaacaataagaactttcgtgtgctttagtcgttgttccaccgcaccacattcctctatctttatatccttctgacaaagaatttctgatagaaattgttcttcccaatacagcttctggtcatagtcgctccgtatttttctcttatatgctacgaaagcccgatggtggaagtcgcttttgagtctgctgtataaagctcttcctatagtagtcttaccagtttcagaaggcccacaaatccctatcattcgcgctttcttggagtcgaagcgcaacattgatatcaatgcctctatatgagcttcaatcccgacgaagtcactgaaattatttgatggggggaagagtttgtttgaaacatccttggcgatattttcaagcatttctgcttcgctacgcctacataaaagtaacaatagtcaactgttatcaaggaacatccctaatagcataacgagagtctatctataacgcatggactgccttttctagtgagcacccacgtctttactcaagctcgtgggacccacccctttctacggttgtacattacagctgggaggctttaataacttagttacgacactacatcaccacacgatct

SEQ ID NO: 31464 - DNA, 1023 bp, Arabidopsis thaliana landsberg
ggaaacaattttcattagatggcgcaaaaataagatccaacggctgagatctttactcgtgaacgttctcgaaagctctttgccgacccattcttcactcatatataaacaaacacctctctgccttctcttcctcacacaatcataaacacaacaacactcacaaattctcttaaagctcacagacgaattctttctatttttaatctttccggcgaacaattctgatctctaataatggcgggtaaaggtgaaggtccagctatcggtatcgatctcggtacaacctactcttgcgtcggtgtttggcaacatgaccgcgtcgaaatcatcgccaacgatcaaggcaaccgtaccactccttcctacgttgctttcactgacagcgagcgtctcatcggggatgctgccaagaatcaagtcgccatgaaccctaccaacaccgtcttcggtaaacatctcacttccttctcatcttacttactatatctgctttgcttcctgcatgtgattaagtttgtgtagatcggtccatagtgattttggtttatgaatcggttattcaattttggttatatcgaaacagagccggtttagtgtgtcaagcagatagaaatctgttttagtttattagtgttctctatgttgttgttaattaggaggaagtaagtattaaacttgttgttgtgttttttttgcagatgctaagcgtctaatcggaagaagatacagtgatccctctgttcaagcggataagagtcactggccttttaaggttgtttccggtccaggtgagaagcctatgattgtggttaaccacaagggagaggagaaacagttctctgctgaggaaatctcgtcgatggttcttattaagatgcgggagattgcagaagctttccttggttctcctgttaagaacgctgtcgttacagttcctgcttatttcaacgactctcagcgtcaagcgactaaggacgctggagttatctctggtctcaacgtgatgcgtatcatcaatga

SEQ ID NO: 31465 - DNA, 1789 bp, Arabidopsis thaliana landsberg
actatagtaccgtgcaacttgcaatcgctggctacactcgccgagaacacttctaaattctcgtaattacattttttcaatctttttatttttatcttattttctatatttctctctttcaaaatttatcttttatttttgggattctcgaggtggttttggattttaagatttaagtatttaactatcgtcggggatttttcgaaactaaaacaaaaaacaagaattagatcaaacaagatggttttggtttttcgaagttagggtttttagggtctgttaaatgtatgtctcaacgatactttggttttacccttaaaaccatttcttcttgtacagctctcgtagctttattatataaacattgattgtttagttattttcataatcttcttcttgcaccgtattttacatatttattatttgtcttttaatttagttaatcatgaaacaatatagactatatagtgattcagctataatgcatggggtatattgttacgatatttccgatattattatgtctaatttcataaattttgataacctacataataatgtattacacaaacaatttgattaatataatcattggcataactactatatatgaagagatctgaacaattgtgggcaatcagaaaacccatacatgtgctgattgagatgattcgttttcctttatgttaagagaagaacaaagtaaaactatacatcatttgaattttattgaaatgtataaacagtagaatactacttggtgttttaaatgaatttgctcaccagctatataatcaaagcgttcaatcctaaaagcaaagatggaataatatcaattagtgataattaaacttgaaccaaggcgtaatgcatgtattgagttatgtgatataatcttaagaattttctttatggcatatataatgctaggccaaaataaatggtgtcaggtaatacagcattatatctttaattccctaatttggaaacgtaaaattttcaaattatttgtcatttcatcaacaaactttacataaatacgtaaatgttttgtttttactcaccaaaaaaataaatcaaaattatttacataccaaaatgataaaatttcttagttccttttatagttttgggatgcgtgaaccgtttcaataattcaaatgtcaaaattattactttttcggatttccttgtcctatatattagttcatgaataaaaatgtacatttgaaaaatcaaataactttatctagttatataaatataaagaatccaatgaacaagatgaaaagacattcaaagtttgcaaaagcaaaatgtgtttagttactttataattaagtagtaagatttcgagacttgtgaaccaaattcaaaattgaatacatatatagacattcatgtatatgatcgtacgtaaaatgcaagttggggtgtaataaaatccaacttgttatagaaaaaaaacaaagcatgcaagttgcaaaggaaaaaaataaaagtcgctactattctttgacacctttaaaaaatattccataaataaaaaaggttaaagaaaaatcaaattgattacataaatgattattaatttattatcataatgagtacgaaatatatatgtaaacattgtcgtggaaggaaggaattgcaagttgatatgcaagttggcaaggaggctattaatgtttttccctcttttggtcgttttgtataatggacatttaaaaccccacccaccttttcttaattttctttttctgtctttccctattttctggatcaccta

SEQ ID NO: 31466 - DNA, 405 bp, Arabidopsis thaliana landsberg
  unsure (1)..(405): unsure at all n locations
atcgtggttaaacaaacacacatacattgtatcaactgaatatctcagtaaaaaaaatcatctaatcatatgcttaacagtgttctatatcgctaatggaaggttccaatacacataagaaccctaatttcatctcatagattaagtttggtgattcgcgaaaggaaggaatgattgattacaaaagaagatataccttgaatttagattgtttcagtatcggnnnnnnnnnnnnnnnnnnnagatgaacaacaactgcgacgaaattaaggaaaagaaaaccatagacacgatcagattagactcgtacaagagagaaatcatcaaaaattctcatcagatttaaaaccatcttaagtgaataacaggttgatcgaggttatggtatagtaatcaaatgcaaga

SEQ ID NO: 31467 - DNA, 1304 bp, Arabidopsis thaliana landsberg
ctcgtatgttagataaatgcttcaccaagaatctttggctttggctaccacgatattggctctggcttcattttctcattgtttaccaggttgcttgaccgatacgggtttaggaaacttgactctgagcaaagggaatttgctgatggtgactttgtgagaggtaaacctgagcttatccggaacatatataaacgcaccagagctcaaatactaaacactaaagaagggagagagctgcttaagcaagtcatggagatgaggaaacagaggagagaaaagatgaagaaagagattacgaaagcaaaggaactagctgatcggttgcaccatgtacatatttgaaacatacaatgatgtttcgcgatttggaaatttatgtcaagaccaggctttgattactctgcttatagttctcctgtttgatatatttccctttccagggttaggtttttgattgtatgtgcaacttattaattgtggaataatttgaaatactttagcatgtatgtcgattacaaaggatgtatcaatcttgcgatgaaagattatgtgaagttgtgaacctaatcattaattgggttcaaaaacaaaggtttttttcctttatttttggtgtaattagtcaaacaaaaggctaacgagatttgaagatgttttctcaggcatacttgattctaaagcttcttcaagtactcacaaacatataaattttggaattatcaaatgcgttgctgccgagtgtattcccaaagggcaatggcaccactgacatgaacattgagggacctaacaactccaagttgtgggatctcgatacaagcatccaatatatggattatatccactgggatgccttccttttcacgacccagcaccaaaacctttggaacaacagagagatccacttagttactatgggaaagccacaagcgagagtaaatgaaaggctctgttcttatgtttttgcgcatcaacttaccgtcttctttgggaattggtatttgtcaagtgaaacgctattcgctgtctgttccagtcccaagattgagaacccttcccgtttcttcttctccaagaacagtttcaaactgtttacggggacttccatgattggaacccatttctcagcagtcacactgcagaaaagaaaaagagaaaaattcttgtaaactcttgcaccgtccttcgatgatagatgactagaatatataaacgtacctaattagttggaacttgttgtcgcgtattatgcttgcatctgcaacagcaagacttgatgcttttaacacctgcaaaagatg

SEQ ID NO: 31468 - DNA, 3885 bp, Arabidopsis thaliana landsberg
cacaacaattgtagcatttcatgcaatagattttaaagactgaggtttttgcaggaactactacttccggctacagaaatagggaattggcttttgtcattagtatattgggaagatccattgaagtcttttgttttctgtctcttgtccactttcataatttacaggtaacatcttttattatgcattcattttgtttgttagctacaattctctgaaatcttttgtttttcttccggggtttagggggtggattggctatgttttcgcgattgcaactctctttatagcgggtttcatggttctaacgagatatttcagcaatagagagaaagtaatgatcgagctgaaagtcatggcaccgcctccctatgaacacaatggaacagcttttagcggtccaaaacgccatttcacagctcgaacagttaatccaagacgcaaacattgttctcctcaagttccgagctttattactttcgcttttcccacaggtctctctctaccttcaattccaactttttaagcgttttccagacgtggtttttagttttctgcaaccacttaaatgttatcgaaaaaaacaggcgagtgagaagtttgcggttgcgattgtgatcgctgcaacgatgatggcattggtgccttggaacaatctgattttggtggtgtttcttgaactgttcacaagatactcaccaccacgaagagcaagcacggaacggttgatgcggcggcttaaagagtggtggtttagcattccggctgctccggtccttcttgaacagagcaaagacgataacaagaaaaccaagtaaaaacatctgaaaaaaaactacgtcggttttcgtcccaggagagtacgaaaaaaacagagaacatagcaaagtgtaatagttacgtatgtttgtatatttacatgtatcatgtatgttatagaaaatagttaatgttccgtggtaaaatcacatttagctgaataatgatatagaagcaaatcctcttacaaaaaaatcatgttttttgttactctggtgggtacaaaattaacattactgttatgcataataataatcacacaacaaaagcgaagccttactgtctctgactcttatcttctcgagttttgcttacaaagcagtagcattttggggctgctctatctggagaggttcctgcaactctggatttattggaaacaaatggcattgtgcgtattgcgccatcaattgatccacaagaactaaagccaccattgcttccaccattggcacagctgcaacaaaatcccaaaatcaaaatctagagtgatagactgaattaattcaatggtttggattggattgtgtctatttacctcgaggaacaacacaaggatcatgacgaccacgcgcaatcatttcggtttctaccttgtctctggttaccgtattctgcttcctctgcacgttggaaagaaaacatcaatgatctgaagttgacatttgttatgtttataaggattctgcatgagttttatcataaacttactccaattgttgatgttggctgaaggctactctcatgtttattatttcaccatttgagatccctccctatacaaattgaccaatattaggaattctctcaggagaaatgtagtttattgacatattaaatacaagacttaaccaacctgaattccaccagatcggtttgttctggtacgtattcttccattttcatcggtatagaactcatcattgtgttcaagaccagtcaaaaaggtacctgcaggttcatttgcgtatgatttatacagctccaaagggggttgtttttagattggacaaagaagagaaaaatataactttctatacctgcaaagccgcttccaaactcaaatccctttgttgcaggtaacgacatacaagcttttgccagttctgcttcaagtttatcgaaaaccggtgtaccaagcccctgcgaatagtagtttcaataagcattcactgaagttcattaatcaaactacatgaggacgcacagattaagctcatggtatagtgagttcatacacgtggagcattccgaacaatgcaggtcacaacaccaccaacagagttcccttttgtcctgacagcatcaatcgcagctatcatcttttccgcatactcgggattagggcatctgacaatgttattttctatctgtaaaataaacaaaatgaggtaagaatatcaccagaagaaccttaataagaagaaatactattaggaaaatagttataacggtggatgaaagttgcagaaaattgacagcaagaaccaggtcaccaaaatgggttttccctccgttacagtccgaaaactactcaaaaaacaacatgtaaattatactttgaaaaaatatttgcacctgttcgagtgttaaattctcgtggtctaccaattcttctggaagtacaacatggtgaacttgcgagacataggcaagaatctggagacacaaaaaaacaacagagacaaacataagcaagtccagaagcaaactttaaagagttgcgtgaatcattagaattgggtcactgagttaataaggggcatcttatttgcaaggatatactaagatagaaaaaatagagagatgaaagaagaaccaaacatgagaagggatataaaaagttcaatgtaaattgattctttgagagcagtgtcatttgcaaaatcagaaagtaaacacacctcagttcctgcaaattgcttcaaaattttcttggccaaagctccaggagcaactcttccaatggtctctctagctgaagatcttcctccacccttgaaaagaataacgcttaaggtatgttaagctgaacaatgcctttgaacacataaaaccttaccaagaaaagtagcatgtgagtaatttaaaagaaaaagatacctgcactgatctgacaccatacttcatgtcataagttgcatcagcatgcgatggtctataggcaaccgacatttcactgtaatcctgaaaatccagtgagttcctcaaaggttagaatctacaggctttctatacttcaaaactgttgtctttctaatgcaaatagcaaaagtctatttaacaatatcgagtacagttatatacatagagaagtcaaaaaaacttacaagtcctctctgatctgtgttaggcacaaacacatggataggtgttcctgtcgtcattcctgcaaatttatggatatcaacaattaaacaacggttgagaaactatatcaaaatccaaactatgaaaaaaggaatcaaagctagaccttcggagactccagaagatatccgacaagtatcagtctcctttctaggagttgtgatcctgctctgaccaggtctcctaataaagcaaacccacatgtaaaaaaacccatcaagggatcatattatatagtaagaagagctttcttcttcatcaaaataccttctatcgagatcgaattgcaaatcagattcagtaagtggaatacgaggaggacaaccatcaatgatacaaccaactcctcctccatgtgattctccaaaagttgaaactcgaaaatgagtcccatatgaacttccagtagcttgtatctctaccaattcaaaaactcttaaagctttaaactttccatctacccaatttgttctaatgaaaatgtgaatcaattcaatctaccaaagctgccctaatgattcaaaggcttgaaatcgagaaattttcgggaaaaaaaacagagaactcacggaagttcttcctggtttgggtacggagagagatctgaacggcgggagaagaaagacgacggagctccgaggaaagagaagaagaaccgggtttggtggatccgagaatggattggaagtagagaag

SEQ ID NO: 31469 - DNA, 2497 bp, Arabidopsis thaliana landsberg
ttccatcaaagcatattttattcctcgagagaatggtttcaaaataataaaccgtatctcaaatacccattttaagtaacatatattctggtgttaagattgtatatatgttgaaaatattggttatctctttctttctaagtttctagcaaaacaagtgaatagttgtgtatatatatcacattttcaatgtacaaacctacctactacataattttctattcataaagtaatcttgtagagttgaaagattaaaaaatggcctcctcaaaattcgttctttttgctatcctagctctgtctcttctactttccggttagtatctctgttaactcgtaaaatccatttgtaacaaacaaaaaaaaacatttgcgttcacaagaaattgaatagatagttgattacttgtgttgtgtaacttgcaggtaccgaagcaagaaagaccgtgtggcctagcagcgaattagacccaaagtgttgcagcaatcagccagaatttggtatatgtgattcaaaagaagatgatgaaagatgcgcccagatgtgtctggatggttgtcccactaacaaaggtggtggctgccaacctattactgaagcccctggtgctgtttgttcttgttactgcgcttaactcttcttcttggctttattgattcataaggaaaaaatatagtttttgtatccatcttcaaagaaacatataatatgatgcttgattcaaaacaaaaatttattttccattataattcaacaatctcttaagtaacaagaagatgaacacaaaccacgttctgtttttttttttggtaactgatcaaagccttttttattaaacggataactcaatttgggagacaagaatcccatcagtatctgcataaagccattcaccatcacaaatccgagtccctgcgatatttaccggaactcgttgttctccaagtcctttcttactcgcttttatcggatgagaggccaaagctctcactccgatatcacaaccgttgatctcatcgacgtctctgatgcatccgttcacaacgattcctgcccatccgttgttctgagcttgaacaacggggttacctccgagtattgcacatcgttgactccctccaccatccaccacaagaactctaccgtttcctaatgacaaccaaaacatttagagaatcttagatgatcttgaataattaataagaggctggaactactactgcgaggtttctcaaacggaaaacccttgaacactcctagttaaagaacttagaatcgttctctctcccaaaatttaaccctttgcatcctaaacattaaaaatttgctaagtgacataagactgatcttgatacatgtaaaagagcccaaagctaagagttttttttaaaagaccctggctgtttcaacgtgtccaagatcacctctgttctctcaaagtaatacactttaatcatcaaaatgctccacttggaaaagtgatgattacatacactaagccactaacacaactatctttctatctaatcataaaacatgtcaaattttcataacttcagatcatattctctataagtctttgcaagtaaaatttgttcaaagccattgcaatcttgaacttgatttgcaaatacctttctcctcgatgaattgacggattaagccattgtcttcaaaaactttgacagtgacaactggacctgagaatatttgacgacgaccataaatctgaaaaacgggttgcagagctcggatctgttcacttcgaatcatctcttgattcgcgtcacacacttccgcagtggtcacaaacgccattttttcttctcacctgaatcaagaattatgatcaaaacaagtaatctggggatttgattatatgagatttacgagaaattactcaaacacagaaagcaaaagacaaatcgagattagtctagataaagtgatcatatatattctcagtcaatcaatcaaaacccagaaggaaagatagacacttttcattcaattcacaagaaaactatttcaaaatccatctgggttttgatcgaatcttatttcatttacctggaatagaagaaactaggacgaagaagagaaaactctgtgtgcgtaaatctctgagaaatgaagtgatgataatttaaaggagaacaaagtcatcaacatacttgtttcggtcgttcaataatattaaaatagtgacttttaactttacttaaatcagatggaaggtgggttgtcgttaagcttggaaaaaaggaatctttgcgttgccttttctctggtttcgactctgtttccttgatatccttttcctagacgctttttgtacatctcacataactttgtgacattcattcattaggtaagatcaaacgaacccttaattattgcctgaggtgcttgcaagttttataagtgtgtcaaatatcccccggccctatcatggcaaagatgataataaaaagaaaagagttgattgatttacca

SEQ ID NO: 31470 - DNA, 1055 bp, Arabidopsis thaliana landsberg
tcgggaaacaaagttctttcgatgaagaaatccaggaaatgggaagatctccatcagctgggactaattggatacctgagctttctcctattgccaatgtggttgtccgcaggtgttcaaagtaagtaagcattttgcagtatgagttttacagggcatataaggggttgtcttgtatgaaaaagtgtgtattgtgatgcgctatagtaagaggtttccaaagcaagtagctctaactagaaaggggtttacagaaagtttgatttttaattaaagaaaactacaatgagggtgtgtttagacatacttagactaaatgaatttattgttctgtctttatatttatttggctatgctattgatgcagaatactcggtgtttctgcaaacgagctacgagatagtttcaaacaagaggcatttgaatctctcaagcagccttctctatttccaaggaactttctagagtactgttgtttcagagcactttcactgtctgttggagtaacaggtcatctagccgataaaaagtttcggcgcttaacatttgacatgatggttgtctgggaagtcccagctgttgctagccaggctttactcagtgtaaggctcctttttctcatttcgtctgcaaaccttataagaaccttttcttgatcatctttttttgctttgaaataggtagaagaagatgcaacagtgagtttagaagccttctcacggatcgcaccagcagttccaataatagctgatgtgattatatgtgataatctgtttcaaatgcttacttcatcaacgggtggtcggcttcagttctctgtttatgacaagtatttacatggcctggagaggtaaaactttctatccttattccttgctgaactactttgtcttgaatcactttgcagacattttaaaatgtctattttatttatagagcaataaagaagatgaggactcagtccgaatcatctttgctttctggtgttcgatcaaaaagagaaaagattctggaaatagacgggacagttactacccaaccagttcttgaacatg

SEQ ID NO: 31471 - DNA, 879 bp, Arabidopsis thaliana landsberg
actattatcaaacaaaaataatcttaaataaggtattttatttaggaattttctgatggatttattctttctagtagttccttattagttgatccgtttcattcgaacaacatataccgtttccaacgaaagcagctaaggttgtggttcaaaatataaagcagaacttaaagattatgagaatgtttatatttgaatcgatgaaacagaatcatcaatcttctttggatagtccaatagtaatactcattagcctatcgagttctataagtggagtttttcactgctataatactttaaactcttgtatcatacgtaccataatgattcgtagaaatccaataatgatttcttccatatcacatccacagatcataagttttgtccccaacgtaagccaaatttgggcttcttaagtaaaggggccaatattgggctttaaacccattttaaaccctagccttgtgttgtgcgtcatatatgataatctactttttcagagccgaagcaagggaagaagaagaagaagaagatggtgtctgggtcagggatatgcgcgaagcgcgttgtcgtcgacgggcgacaccacatgcttggtcgtctagcttccaacactgcgaaggagttgcttaacggacaggaattggttgttgtccgatgtgaagagatttgtctctcgggaggtttggttcgacaaaagatgaagtacatgagattccttaggaaacgtatgaacactaagccttctcatggtcctattcactttcgtgctccttccaagatcttctggcgcactgttcgcgggttcgttcgttcactctaattttcttcatttttattggagaaagtttgtaactttatgattagtgcaaatgcgtt

SEQ ID NO: 31472 - DNA, 5925 bp, Arabidopsis thaliana landsberg
caactctatcttgaggggctaccaactctgcaggcagatcaattctctcactgattggagaagaaaattgctcatatggttgtcattcaaaacatggtgtggttgaaccttatgtagagtaagttctacattttaatctagttcattacacattcctataattgataaaccaattgtagctgatttcttcttattttcattttccctgacaagtgcacatctgcaacatctacaaaactcaaactcaagatgcagacgtgatgcatcaacactatggactatgcatcgcctcttggttaaaaaatcaagcgaataaatattaaattagaatatcttacctgcttcttaaattctataactgtctgacataaattactttccttttgttagataccgcttgattcaaacagtcatgctgagactctaaaatggttggcatttggtccacgtagttgcgcacagtcatataaaggatatatagtaaatgggcagcggtttcacacaatatcagtagatagaaaaagtcagaatagtggtgcctactatgaggctacagcaatctgcaggtctagcctaaggatacttcacaagtggcggatctggtatcatactatggggcagtaacatacattatcttgttggactacaatgtgttttatgtccctttgttcaggtgtcaatgggcagttaagggtaatggagtgaaagaagatgatggtttcactctcgtgaaccttaatcatagtcaagttagtttttcaaaggacccgtgcatattagcctctctagcaaagcaagtgttttactctagggaagacgagtcatcaagctggcatattgctatgagaggtccttctagaagattcagtcagaaagagtttgacgctggagatgcagacatcagtcctttgcctgcatatatgtgtagttcttcttcatttacatgattagttagacttttttttgaatagatgtctgataggaaattgtttgtttcttagcttattctctgaatagatgtcttagcttattctctgatagtttctctatatattttatatatattaacatttgaaatgggaactgggaactggaaagaaaaagagaggaagaaaacctaaatagaaagatgatgaggtagaatatgtgggaacccgtgaacctgcaccagttgagccagaaacatcaccccaagtacaagctgcagatacagaaccccaagtacaagctgatcctccacttgaactcaatgaagaagaggttcaaggtgaagtgacgcctggcgttgagaaaggtctgattgatgaggagcctgaaggtgagatagaattcattgaagattatgaaaatgttgagagaaagagtaagagacagcgaggaccaacacccatgaaagacattgccaaggatccaaataccagagtacatgtagagttcaatagcatgggagaaccttatggtaaagggtctgtttagatggcatcttacgttggagcattggtacgggaacatgtccctatcacatatgatcgttggacaaagataactgaagaaatcaggacacttctctggaaatctgtccaggtgacttcctaatgcaaaacctcaagatgtttaagttataaaatctgtaggtcttcaatttaacttttttgtttttgttttggtgaactatgattgcaggcaaggtttgagatagatgaagagtaccagaagactacagtgcttacgcagatgggatgtctatggaggtcatggaaattccgtctagtaaccgatattagaaaagccaatactctccaagagaggatgaagctgcgacctaagaatgtttctccatttgagtggcgaaaactagtcaaaatcaaaaccagcaaagagtttaaggtaatcctttgtacttaactaagtttatttcatatatagtatcttacagtaaaacatttccctgttaggttgtgagtcatagttataaggaaagaaggagcaaacagattcctcacaccactagtcgcagaagaatggttagactagcataagatatggtaatcataccacaattatgttgcatctttttctcattgactactttagaatacttatcaactgtaaattttttttgctctgaattagaaaaaggagagtgcaaatccaagtgaagtgtcacggctaaaggtcttgaccaagtcacgaaccagaaaggatagtacaccagtgaatacaaatgcggctgaaaagattgtgagttacaaaatattgtactatgttctgcatgttggaattagatcataacgtttgaagctgtatcttgtgattggcagagagaggcagctgagattgttaaaagtgatacttagacttctgcttgttttgatggccaagattcacttagccagctactaggacctgataatcctggtcgaatgagggcaatgggtagaaacatgaataagaccaaattagcatgtttccaagtgaagaacaagtgtatggctgaaatggaagcgaaacaagctcatctcttgtcgaaggtcaatgagttagaaaatgtaattgaaaaattgaagaaacatgttagatacttctctacttatagtttaaattgattcattataaaactagatttgactttgttttattttttgtaacagagacaagagcctgatgttgcttcaaactcaactgctagagtaagtttttaatttatatccaatgcatgttttaattgtttttggaaactctagtaactatccttttttcattctatagagcgtaaacaagagatcacaaccaaagtgtatcttgattgattggactggtaatggtgataccattgttgatgaggggcgtattattacatctgatccagatgacttagtgaatgattgtcgcttaggcccttcggatgtcaaagttttggttgacagtgctacggtaccagacacatatctttggagacctgcgcttaacatgtgcacaattgaatctgccatcggatagatgattgcttggcctgcctctaagtgtgttaacctagaaaatgagcatgaaacagaagacattgcacaactggtaaagtttattattcaccctcataagtataagaatatttatatatattggaaggatgataatgttgtgtgaatgtgtttgacagagccaaagaactaattcagcgatgaacaaatgcaagctgctcgatttgtcttcagatgacgtggttgttgctaaagggtgttggaagacaaaagatcatgatgccttagtaaatgggctatctatgggaccaaatgcagtgaagatctttgtagatgtggtatgtcaaccagatacatttatctggaggcctacggttgatgtaacataccttgaggactgtctacaatcatttgtatcatggcctgtgaacaaagtcgtcttttaaaacacattaggtgcaataggtcagcaatctccaattcagaattctgcatcaactgagcaatcttcaggaggaaaatcttcaccaacaactcagaaatctgcatcaactcagcaatcttcaggaggaaaatctgcaccaacagctctacaacaatttgcagcaacaactcagaaatcagtggaaacaagtcagaaggctgctgcaacagtctcaaaacaagtcaaaagactttcgtagcatatttataaacgctgatacatgaggtgttatgtcttttgaaaaaaacttatgatttgttatggcttttggtaaaaacttatgggatgtgttatgttttttggaattagaacttctgttatgtatgatgaatgattatgtaaacttttactcttcatgatatggaatcagactttatgtgaaatgatatttatttctatgtgttcatattaatagctagtttgtaattctaaatctatgattaattattctcaaaaaaaaccatataatagctatatgaaaacatatacaatagcaaataaaaaaatgatctatacttctatcatatcactaaaatatttgttttcaaatatggtattatagcacatgtaaatgtaagaactaaataatttattgctttacagaagagctatagtataagcatatattaacgcaaaattgaatagctattgtacaatgatgtacgataacaaaacacctgctgctatatgaaaatacatactagcgttttactttcgctatagtattcgtcaattgtgtagcaattttaaaaatgctatagtagggcttacccctacgatggatgccgatgtcatagcttttgtgaattcgctatgttatatgtatgatagcagatattccgcactaataatgtcaacatttcttatagtgaaaagaagttgaacaagaagctgcataagaaactgaacgagaagttgctgcgcaagaagctgaacattctgctgtgcaagaagctacaaaaatatttacacattttttaaactgaattttgctcagattgactcataacttaggattaataacttaaatgactcttgtaattgatggctgactagaatgactcacatttttaatcaaaagacattttaaccctcatcagttttataaccagaattatacttaaaatgtgactttgattaaaaataaataaaatcattaataaaagaatggattaaataaagaaataaagaatataaaaaaacaaaaagcgaaagtgttttccccgactctcgaaatcgaaacccaaaaattgcatgtctcttcttcttctttgatttcaaatcgaaaccctaacaaatctccggtggtggctcttcgtaacgccgacttctcttctccggtagtggctcctttctccggtggtcgctgctcgactaggagatatctcttctccggtggtggcgttgctgcttcttctctctcaaatgacggatacttcttctccggtggtgactgcgctgtgggtttcggatgcacaaacggcagtgaggagtttgcctcttctccggtttcacctgcggctgtgaacagcggtgggcgttcgtgtccgatggtttagggttcttcggctcctttctccggtggtcgctgctcgtctagaagatatctcttctccggcggtggcgttgctgcttcttctctctcaagcgagggatacttcttctccggtggtgactgcgctgtgggtttcggctgcacaaacggcattgaggagttcgcctcttctccggtttgacctgcggcggtgaacagcggtgggcgttcgtgtccgatggtttagggttcttcccattcaccgccgaaaactgttgggttctttttttaattggattcgatataggtaaattcagagtcaatcagatgtgaaatcagctttagattcatcctcttttcagatttaagattgtgaaatcgactctgactaatgaaaattggttttgggttgttgtagatctacatgttcttcttctccggcaacacaaacggcggcgaattgtgtttctctcaatcaggtctgacggtttctctcctctggtggtggcagtttctcttctcaacattcgttataggtaaacacatttagaatccggtttttgattaattccctttccgattgaagtttacgaataggactttcgagtaaagaattttttatcagttgcagatcttttttctaatcgccggcgtcactggtcataactccggtaagagtatcgagaataactcaatacttttagaaaaatcctatcatttgcatttctgttgctttggaaatcagagtgtgatttatttgtattgttgcagatctttttcctcatttgcattggtggatttagagttcattactctagtctctagtaagtgtttgagcctatatcgtctgtattttgttttaagaaaaactcccgcctatgtatgatttttcttttgaatttctgagttgttttgacagatttattcaa

SEQ ID NO: 31473 - DNA, 715 bp, Arabidopsis thaliana landsberg
gaattttgtattttaatattaacaaggaaaaaatactctacgatgctatgaaacattttgttaagaaaatcacctaaaatatatttcaataaaattcctaacgtgtggttgaacccgaaaagcatgtgtaagacttgaagaaaagtcaccataccaagttgatcttttgaattctatgtctcgtgttcaaattacccaagaatttttggttatgaagcgtttccttttgactcgtgttcaaatttatgtttcggaaaatgctaaggaagataacaaatcctttgttagttttagtcatagctactttatgctccatgttttttcataaaaatatttcatgaactcaatcttttctcataactgaatacatgccaatgttgtaaagattatatatatactacacatacatggtttatctagagagtggaacaagatgtgtatatatatgactagttgtatcgactcccttacatagacaatgacattattcatatgcagtaagtacctactcaagctttaatcagcactaccttattgatccaacacccatatgtcaaaagttttacctgtaagtagcatagttgaagaacatccaatcctacatatcatccggatacattacggcatcatatgtcagtgtataggacctagactgccatgagaaaaagaaacgggataaggcaatcagccaccgtaaaccgggcatgggttccgg

SEQ ID NO: 31474 - DNA, 2023 bp, Arabidopsis thaliana landsberg
  unsure (1)..(2023): unsure at all n locations
gaacatttcaaaatttccgaagacattctaaacaaaatgacaatgtccgattttcataatttcatacagaaccaaagaactaccttcgtgttccagaatcacaacaacgaaaacgaaaacctaaaaatcaatcatcggagaaacaatcaaaggtggcatttttagggtttatcgacaatagaaaacaatacctcatcttcgcgatcatcaattccgaaaatgcgtagcttccgcatagacgcatcagcttcagacaaaatctcgatatcagactccatggaaacgaagaaattgctcaaaatcgcactagtcaacttttttctttctccgattaatttctcgcaaaggagggaaaaatagatttggggttttagagagaaacttcttcaacacaaagtctacgaaaacagagcgatcgtatttacacgtggataaaagacgttggctaattctatttgccacgtcatacacgaatttgctacgatggcaaattcttgccgtctgatatacagacgtaagaactacttgccgtttcggagtacgaacattcttccttatgcataaaccataataatctacagataaaaaaattacaatgtcacatttgaagaaaagaacaatgaaggaagaagattgcattcatctacttctgcgaaagcattgtctcaagaaaaaaataagagatgagccaacaacaatgcaaagataaagcaaatttcatatgtttgaagcattcagagccatgactttgcattgttcatttaaggccagaagctgagcttctttcttatcaagaagagtggtcagcttcatgttctcctccatcagcttttgcacttgtacctctttctgcgctttctcgccttccaattgtgtcgacttagcaaccaacctgcttccaccgtaataaacatatgacaatagcttcagtaacattgaaatacatagcaattgttaataaattctataactcgtcagctgcttgtactatatattgatttttctgctcttcacgctatcatagacattgctttacatactttgtagtttgtacctttccaaaaggaacatcacatatatacatgtcttatcatttacataaaacagctaacaagttgcaaataaaagagatgagactgaccgggcttcaatggtttggaagtgccgtctggaggaagaaagaagtgtatctaaaacattgttggaagcagtgagggcatttttaagcgactcacactctgtcattacaatccgttccgtctgttctaatctcaaggacagattctggatttggactgtcttccttgtaatttcttcctcacatataatcaccttctccttatgagaacacgtttcagattctgccgctgtgaccctcctcaaaagagactccagcgaatcagtaataaccatttctatggattggagcgtattcaaagtatagactccatcctctataaccaaggaatcctggttcttgttggttccagccaacgtagtatcatctttaagttgtagctgttgagcaccgagtgacagaccaggaacggccaagattctagcttttgatctcaaatagctcaagcttgttgcagctgatttgaccctatctaacaaaacctttaattcctttcttgcgtcttcctctgaacagtcatgggacatcttgacaccttcaggttcagccatgctagtaccagccatttgtccacaacttaataaaagaagaagctttctttctgcaaatctgcaatcatttaaaaaagaagcttagaatccaaagtaaatccaaaacgcaatctttagtctagttaacggcggaaccaacttcgttgacctagaaattaattattcggaaatcaaaagttctgcttaacttttttattttttaagcaacaaactcacttcaaaaataaaattaatataannattatttggttatggatatattaaataaaagcatatacagtactagtattggggtaatcaanataagttttaaacattaccaaataaaatatta

SEQ ID NO: 31475 - DNA, 833 bp, Arabidopsis thaliana landsberg
gctttgcctctattggaacactccccaagctgaggaacaagctgtttctgtggtccctcatccaggatgctctcatgggagaggcacaagtttaaatgtggctccatagccttaaccgtcacgaagctcttcaacgccattgtgctatccaaacaaacgggaggccttttacgagcagagaagattgacagctgctctggcagccaataactgatgttttgtttccaatcctggacattaaagtcaaacgctgaggcaacagcgttttgtaactcgttgaaagtcatctcagcagatacagaaatgctcctagcgaagcaatcattttctaaaatgaaatcccacttgccttctctacaacattcccacttcccagcaaccacgaaaacaggtatgtcgactccctgtaaaaaagacgatacaaaaaaattagtaattctttcgatttcaaacaaaaatccataaatctatggatctcagattactagagcggattacaggtaaaacaacactagatctggatttccgataaacaagattggatttctgataaacaacactagatctgcgatcaactataatagatcttcatacttaatcaactataatagatcttcatacttaatcaactaaactgttatataacttataacaaaaacggaatcataccttccgattcatcacttcgccaccctctcaacactgattcaaattggttctccagaaactatgaagctagggtttgttcattagtagtctctctgattatacactacaccctatacccacaatccactccatctgtacttctttaattttcagccacatatttc

SEQ ID NO: 31476 - DNA, 1421 bp, Arabidopsis thaliana landsberg
atggtgattggaacatagcacaggctggcagaaaaaatggcattggccttctatggacattaattggattaaaccttggccgtttcaaccttttgggccggagtattaacccattattctgacccttcttccactgtacctcccacctgaccacaaaccacacaaaatttatgaccgaattacttaaattgaccactgtcaagagacggaaggagagagataggattctcttacttttctaagctctgtgcaaatggcaatcatcctttctgtctcctttactctccagctagccactatattaaccaaacagaaattaagtgatcatgaatattgagaaaccttaatttataagagagagctttttacttaccatctctaatggtggttggaccgtccacaaagagagcaacgacggcaagagtcatggctacatcaggcattttgttcatgttgacatcaatagcccgcaagtgtctcattccaaaagcatctctaggtggtcctttcacagtcacactgttctctgtccaggacactttacatcccattttctcaaggacctcggcgaattttacatctccctagagattcatcacaaaaattgagcttagattcttgcgaatatgttatatacaacttgtcaaaagatgaaactttgacctagacgaatttcactataaacttaacagcctcgtcgatgattcagtgtacaaatattacctgcaagctggtagttccacaaccttcgactgtgacagtttcaccggtaatggcagcaccagccaagaaataactagcactagaagcatcaccttctacatacgcattacccggagacctgaatcattcaccttttagtcattatattgtcaagctaagcgatgtgatttcagaaaaggaagaaaagaataactcctacttgtatttttgcccgcccttgacaaagaaacgatcccagctatcactatgctcgacactaaccccgaaacgttccatcaacttcaatgtcatttcaacatatggaacagaaattaatttatcgacaatctcaatctcgacgtctccaagagctaagggagcagacatgagcagagcagtcaagtactgactactaattgatccagaaagcttcacctgcaaatgcataacatgtctcctaattgttaatcaagaaatcatacaacgaaaacctgtaatcgagaacgaaaaccaatcaccaaatgcgattctattttaggatccatccgttgagagtagattaaaaactgaaatcttgtcaagctaaggctatgatgaacacacatttctgacatttctgcaagtgtacatagagtcaaggaacgagatttcatattcacatgacatttcatgatctccctttccaccgggaaggccaccattagcgatcccccgtccag

SEQ ID NO: 31477 - DNA, 667 bp, Arabidopsis thaliana landsberg
  unsure (1)..(667): unsure at all n locations
atgtaagaacacatatatatttcagattaggttttcgtttgactgacgagaaacaaaataaaaaatgtgcaagaaaaattggtatacaaattatttaactatttttacaaaactgtgtaatcttccaaacctaatttcaatgatattatacttctggtgacgtgaacgttctcgtaaaacaaaaaacaaaaatcatcgaaattatacttacggacaaagagttatggactatctattttggaaggagaaaaagagaaccatcagaaattgcctacaagagaaccatcaatgataaactcagattttgacttttgtacccgaaagagaaagaaccatcaatgaaactgcttgcgcgttagtctcccaatatttttcccagctttgatgtttccttaaattcctttttgggcaaggttacaaagaactaggctatgctatattgtataatctaagcttttcactttgattgatttcatatcaaaaaaaaaaagaaagaaagaaggagcatatgtgatgtaattggagagttgtttagactaagagaaaaatgtattcagtggaggctaaagaaattcttctcgaaatctgatgcanaacccataactgaaagaaaagaagaagaaagaactctttgattaagttccgagccaaagatcatatacataac

SEQ ID NO: 31478 - DNA, 3457 bp, Arabidopsis thaliana landsberg
  unsure (1)..(3457): unsure at all n locations
tgttcaaattccagcaaatctctaagtctttctcaaattcttctttgtaataccaaagagtcaattagctggatttaaaatcaccattgagactcattacttggtgatgtaaacgaatatgcagttctctcttttttttcgtcacacggttcttgttaaagtaatcttctacatttggcaggcattgattacattgaagaagggtactcaacttttgaaatatggtcgcaaagggaagcccaagttttatcctttcagactgtctagtgtgagttgctttctgctccaaccacttgttttttgcttgtttgttggattattgcttcatctgataaacctgtgttgtgttgtgcaggatgaaaaatctttgatctggatatcaagtagtggtgaaaagcgactgaagttagcatctgtatctaaaattgtacctgggcagagaactgtaagatatcttcattttatctacagtctttataatgaatattccatatagtatggcgaattctgcttcctttcaagcttgtatataattaacctgtttcattttttgcatctcaggctgttttccagcnnnnnnnnnnnnnnnnnnnnnnntacttatccttttctctcttatacaacggaaaaaagaagtctcttgacttggttagtcatcgtgaaactgatatatttggacaataatttcaacaacacttgacaataactccaggcataacagttcacttcttaatagatttgtaaggacaaggttgaggctgagatttggattggaggcctgaaaacattaatatccactgggcaaggcgggcgctcaaaaatcgatggctggagtggcggaggcctttcagttgatgtaagtactctggaaaggactcctttttgccaaatatatgttggtttatcaaatgggatactgacgacgtcgtggtctgttgaactcatcggttgatcctgttgatattccattttggtgtttaatgcgtttgtttgttttctatatatttcaggccagcagagaattgacatcaagcagtccaagtagcagttctgccagtgcttcacggggtcacagctctcctgggactccctttaacatcgatccaattacttctcctaagagtgctgagcctgaggttcctccaactgattcagagaaatcacatgttgctttggacaacaaaaatatgcaaacaaaggtatctggttcagatggttttcgagttagtgtctctagtgcccaaagtagttctagtcatggttctgcagcagatgactcagatgctctaggtgatgtttacatctggggtgaggttatatgtgacaatgttgttaaggttgggattgataagaatgcaagttatctgactacaagaacggatgtccttgtgccaaagccattggagtcgaatattgtcttggatgttcatcaaattgcatgtggtgtcaggcatgctgcatttgtgacaaggcaaggtgaaatttttacttggggtgaagaatctggaggaagactgggtcatggtattgggaaagatgtttttcatccccgtcttgttgaatctctcacagctacttcatctgttgactttgttgcttgtggagaattccacacttgtgctgttacactggctggagagctctatacctggggtgacggcacacataatgttgggcttcttgggcatggctctgatatcagtcactggataccaaagagaattgccggttctctcgaggggcttcatgtggcttcagtaagttgtggaccctggcacaccgctttgataacatcatatgggaggctttttacatttggagatggaacatttggtgtcttagggcacggggacaaggaaacagttcagtatccaagagaagttgaatctctatcaggattgagaacgattgcggtttcatgtggggtttggcacactgctgctgttgttgagatcattgtcacacagtcaaactcaagttctgtatcatctggaaaattgttcacatggggcgatggagacaaaaaccgtctcggacatggtgacaaggatcctcggcttaaaccaacgtgtgtgcctgcattaattgattacaactttcacaaaattgcatgtggacacagtttgacagttggtttgaccacgtctggacaagtgttcacaatggggagtacagtttatggtcaacttgggaatttacagactgacggaaaattaccgtgtttggtggaagacaagcttgcaagtgaatttgtcgaggagatctcctgcggggcatatcacgtggcagccttaacatctagaaatgaagtttacacatggggtaaaggagccaatgggagattagggcatggtgatctggaggatcgaaaagtacctactattgtggaagctttgaaggatagacacgtaaaatacattgcttgcggatcgaattacactgcagccatatgtcttcacaaatgggtgtctggtgctgagcagtctcagtgttcaacctgtagactggcttttgggtttacacggaaaagacataactgttacaattgtggacttgtgcactgtcattcatgcagttcaaaaaaagcattccgagctgcactagccccaagcgcgggaagactatatcgtgtctgcgattcttgttatgttaagctcagcaaagtgtctgagataaacgatactaacagaaggaacagtgctgtgcctcgtctttcaggggagaatagagacagattagataaatctgaaataagattagctaaatttggtacatccaatatggacctaattaagcaattggatagcaaagcggccaaacaaggaaagaaaactgacactttttcactcggtcgcaactctcagctgccttctttgttgcagctgaaagatgctgtgcagtctaatataggcgatatgcgaagagctactccaaagttagctcaggctccatcaggcattagctctcggtcagtgtcacctttctctaggagatctagtcctcctcgctctgccactcctatgccttcaacttctgggctctatttcccggtgggtatagcagataatatgaaaaaaaccaatgaaattctgaaccaggagatcgttaagttacgaacacaggtatacattctcggagaagggactcatgcttcttagttcgttcgtccatctacattaatgtgtagtctaattaaaatcatggatttggtttaggttgacagtctaactcaaaaatgtgaattccaagaagtagagcttcagaactctgtaaagaagactcaggaagccttagcattagcagaggaggaatctgccaaatcaagagccgcgaaagaggcaatcaagtcgctcatagcgcaggtataatcgggtttgaactacactgaagcttgaatgaaaactggattttactcccacaagctaacttaactggtaaattttgatattttgcttct

SEQ ID NO: 31479 - DNA, 736 bp, Arabidopsis thaliana landsberg
atgaagctttaagtcagctggtatcgtgatatctttcacaggaggcttaaccagattgtgaacacagagagagacgttaacatcatgtgcttatgttccattccatgttggatattgcccaagtgaagttctccgagagtcatacatcaagatcatccaggcatataaatgatgtggtataatagcatgttaatgcaacagggtgagggttcttcgtgctcacctcaggttcatcagttgtccagggaagaccttgagccatggggattatctatgtagctttctccaacgtcatctagggtagcttatttgcgaactcatcctacagtatcaagagccagacctacgaacaccttataccaacaatcataaatctattctacaacatctgaaaaatgttttcctgtaaagtttatacctcagttctgagtttaaatggcttcagagaagtgactgtgatctgcttcttcgatgatcttctacttcccattgaagcagaggattctaagctctgttacaaaaaagaatgtcaaactacatcaaccaggagagattgcgcaaaatcagattctgcatatatcaatccaatacacatacatttcttctgcccctccggccaccatttgagttgagacttgaaacactgtgacccaccaaatcagacattagaactgagtctacgaaagatcaacggctaataattgagttccaaaaacaaaaaactcttttttgggta

SEQ ID NO: 31480 - DNA, 595 bp, Arabidopsis thaliana landsberg
atgagtctctgcttccaggagtttccaaagaagttgaagatgctctacacgtggatcccacagctcttggcacattaactctgtcacgctctattgttcagtcttcttgtcaccctttagccgctaacttgtcttctagacataaccgagctcacgttatagctctgggtgcatttctctggtccgctgctactttccttgtcgctttctcttccactttcttccaggttttgtccttttttccacaattaaggtttatggtttgggtttagtgagatacataaatctcttgtggcatttctgatagagcaggtagcagtgtctagagctctgaatggaattggtcttgctcttgtggctccagctattcagtctctcgttgctgactcaactgatgatgctaaccgtggtactgcttttggatggttacaattaacagcaaatattggttcgattttaggcgggctttgctctgttttaatagctccattaacctttatgggcatacctggttggagagttgctttccatatcgtaggtgtgatcagtgttattgttggtgtgctagttagagttttcgccaatgatccacata

SEQ ID NO: 31481 - DNA, 2086 bp, Arabidopsis thaliana landsberg
gagacagaatgtttcagctttgactgatttgtttcccctagatagtagatacaccaatgtttgtgtcaagatgtagtaattaatctgcactattttattgaccactaagttgatattataccaagcaaatggttaaataagggttttaactaggcagggtcaaatgttttcagattggacattatatctttaaactatgttatcctacgtacgtgcacatatctcttattctgagcatttggaacagtagtttgaacaagttattttaaaacatactctaattcaataaatgctctagttgcatgtaacttctttgacttgctcaatgataatgacaatgttttaaatgatgtatatatgtgatatgagtaaattctgaattagcttgcttctctttcttctttgtttatgttgaagtctcctgcagatgacaatggagcttctctgaccctactctgctcggcaattacttctcttgtacactttggataagatattttgacctggcacaaaaagcatagattctcaacggaagaaagcagaagacaaggttgactttttgaacatttctgaatattttaattaccttatttgattgtgatctagtggttttcttattttctctgagggtgaacgcagggaaaacatctgaaatattataaccaaatagttaaatgtgaaggtggaaggattgtcagtatccattagagactagtgacattcatcactaactctcttgcacagtttgcaaacagacacacatcacaatacattcatttacatcaaaaggtacaatgatttttgcataaaaagaaagaaactttcatatacaatcattcacttaaaagacacaatgttgtagcaataacaaatagctttcttgtaagtttagcagactgtgatacaggcttcaacgaccgccaaataggattgtaacatcttcaaaagagaaattggctgatgaggaggtggctgtcatctgtgttatcgtttcattgcttatattgggaataccaaaccctgctgtatcaaatgatatgcttggaatagtggcatttccttccaaatattgtatgatgtgcctcatactaggtctactttccgggttactctgtgaacaaagcatgcctagcttcagaagcagcttggcttccttagctttaaagtctcctagtttactgtcaacaacatccatcaaagtatctcttttcccacaagtggcaacccacttaagtaaaagcatttgctcaggtggtctatcaggttctactggccttctcccgcaaaccacctcaaggatgaaagatccaaaagcatagatatcggttttagtagtggccactcccattgctgtaagctctggtgccatgtagccaatggttcctaccacatgcgttgcttgaagattctcgccacgatcatggaatcttgcaagcccgaaatctcccaaccttccatttagatcagcatctaaaagaatgttgctagctttaatatctctatgtagtacaacttgttcccattcttcatgaagatacagaagggcagaggcaactcccttgattatattgactctttgagaccaagtgagatctttcagcttgtttttattgaacaagtagtcatcaaggcttccatttggcatgtagtcataaaccaaaagcaattcacctttccttctgcagtaaccaagaagctgcactaagttcttgtgccttaaccttcccatactagcaatctctgcgacatactgtttcatcccttgttctgcattatggtagactctcttaaccgcaatttgtgtacctgaaggaagttctcctttatagacttttccaaaacctcctgccccaagtagccgattctccctgaaaccccttgttgctttgtagaggttcctaaaggagtacctttggggactatattcattttcccattgttcaagcacctcggaatacttcttttttttgtaaagatacaaaaatcctcccaacatcaacagaaaagcaattgatgttacagtaacacctatgataataatattcttagagtctttagaccttggggttggcggagggggtggcgg

SEQ ID NO: 31482 - DNA, 1852 bp, Arabidopsis thaliana landsberg
gaagttccaaatctagaaagcacaaagtttacatattcacaatctagtctattaagatttcttgataagattgaaagatctcaagaagaaaacgaagcttacccctttcccttctgtccattcgagataatctttcatttcataaacaggaccagcaaaatggctaccacaacaaaggcagtaaccaaagtactcaatcaaagacggcatctgaatcaatctgtttttcttctgagcttcacgtagaccttcctccttcaacatcccatcattgtaattcattgaacatgagataactttcagcgtcaacaccattaacgctcctaacacatgaacaacaagaagggcaagttaagaagctaatcacaattactacacatgaacaacaaagagcatccaaatcaaaaggaagcaactttcagatgaggaaattaagagttaccagtagaatcgattcctccttctttccacgcatcaccactcatataaaacacatgactacacacacaaatcacgaatttgcaccataactaaatcagggtcaatcagaaggaagacgattctgcactaattcatagcataaagggttcagaatttagtaccagccaataagataagcgaaaccgaggaagaaagtgatgattccacacttgggtctataaatcgccatggaagcatatccgatcgtcatcggaacaaggaagtgaaggttggaggagaagccaaaggagaggtaagagaggaaagcacctgaagcagcggcatacaagtgtttaccgagtctactcgggacgattcgacaagcgaatgaaacagggatcgtggcaacgaaacagaggaggaatcggagtacggctaccgaaactccgattgaaccagccattgaactcatatccatggtgtcgaaaacccgatttttttaactcggaatgagtcacaacgaccgagttgctccgggaagctttcttctgatctcgccgaagctatagatcggtcgtgtcgtgtcgtgtggttgttggtgtcgtgtcgtgtggttgttggctttctttgttaacgaaaggtatcatgtaataaaccggtcggtacagtattttaaaaccaactgaaattgcaaaaccaacggtttaaattaaataccataatttcctctttttttttctggtcttacgatctctttacttctcgtgagttctctcgtttcttcgccgttcgttgtcctctttagccgtcgttacttgattctacagattttctctgttcaagtaagtttatggttttggtactcttactctgttttaggtttttgtttctcgattgtgccatgcttaatttttgatttctgtatgtaactctgtttatgttgggaaatttgcatcttaaaggtgtgatctttattgattaggttcacgtgtcgacatgaaaggagctggtaagtttgaaggcagctcgagtaagatagtttttgaggatagtgaagaagatgaagatctctcgtgttcatctgtgtcttcttcagatgaggttagtagctttagaatagttatggaactcaagacattattattattgtttgttgaagcatctgtttttgaatgtggaattaggaagaagaaacagaaaaagagttaacctttgaggagattcataaattacgagctgatgggtctaaagctgttccatggaaaccaaatcaagtgaagaaaacaggtcgtgctcgtgctaacaaaaacaggtatacacaacattgttttctcttgttcttggtttttgtctttctttcagttgttggttactttgttaatctttggtgtttctatttgtgaagaaaacagaccaatggaagtgagttcta

SEQ ID NO: 31483 - DNA, 543 bp, Arabidopsis thaliana landsberg
  unsure (1)..(543): unsure at all n locations
ttggcaaaagtatgaaaaatcaactatttaggcataatcttgatgttttattcatcaaactttgaaggtgcatgggaccaaagttatagattttgagtatgaatattttttatttttttttggaaatatatggcatatgtcttccatatgaaggatatgtgtcccaaatctataactttgttgaacaaaaacaaatcagagatgagaaaccaagattgccatatttaagtctcattgtaacaatcctctcatggaacaaggcgtgagaacgaatagaagttatcgatatcaacacatagaattttcgaaaaaattgatctgttcattctagtgtcttatgcggatcaagtcagtttcatttataatcttcggagtatccgagacgagaatcatggtcatctaaaatcaaggctagtctagaggaaggatatttggcatgctaagngagtttcaagtgcaccaatttttgccgtgtttccactatttagatataggggttcttctttaaggggcttgctgtggatgatcccttcaaaaatgcta

SEQ ID NO: 31484 - DNA, 2299 bp, Arabidopsis thaliana landsberg
tcaccttctctgtaaaatagatcagcagtgaggatgtcatttgttaattccagtcatttgcacaccacaaaattcccgtactcgctccttgccaaccttatcaacatctctgtcttgcacgctaaaacatccagaataattgttgccattggtatgtcccccgcctccaaaagtcgctccacgatgtagcttccatactttttaaacgagagctcgatgcagtagccacatagtttatcaacaatgttacccgtgcaacgggagtcatgtagtttaagcacgtgttggaccacaaagttgccataagcatcgttgcttagcaaaagagcgttgtttgagattatgtctaggagctcgtctctgtagtaaggatcgtccaactcttttatgatttcgttgagcgcaatgcaaccgtactggtcacgcgccaggaaaagcgcgtatcgaagaatgtgatcatacatcaactctctcttgtcctgtttaaaaattctcatcccctgtatcgccacgtaggaggcgtatttgtcgatcatgacatggatgaagaggcgcatgatagccacaaagaagaagacgtccatgtaatctgacatccccatgagtttctgtaggcttttggagccgttcttgtttcttgtgatgaccatgaagtaatcggagtcagacgtcaaaaaagatgccatccacaaacgttcccgtgtctaatactgagatgtcgtctaatggaattacagttaaaattgtaattccatgttttcttgggacgttaagtcttgctcggaaatcttcttccatgagaggaagtccttcttttagcttcacctttggctcccagcccaacacttctttggccttaccaatgtctggtttcctctgtcttggatcatccgttgtgttctctatagagaatgatgattcttattattcatagtaatgggaaaaacagactaaaaagtgattagagtaaaactaattacataaacacccttaactaagtggggagctgtatatatatatatatatactcttatacactccttcaagatggaggtacttgaataacaccaatcttgcgacatgcatgttggaaacgtgttttcgatagtggtttggttagagtattcgccaattgaacgttggtagagacatgaaagatctgtagcatgccatcttggatttgatttcgcacaaagtgataatcgagagcattgtgattcatcggggattggaaactcgggttcacacaaagatatgttgttccaatattatcacaatagataaccggagctattggcaacggaattttgagttcatagagtaaggaacaaagccatcttacctccgtagcacaattggcaacaactcaatattctgactcgattgaagatcttgcaacacctcgttgtttgcgtgaggaccaagaaatcgggttagagccaagatagatgatatacccatttatggagatattatcattcgtgtcacaagtccaatctgcatccgaaaatgcatgaagagtcatgggagaggaggcatgtaaaaatatactatgtgtgattgtgctagctagatatcggagtactcgtttcgcggcctgcaagagttcatgtgttggcttatggacaaactgtgataatttattgacagcgaaggagacatcagtgcgtgtgaaggagagatattggaggctgccgacaatagaacgatattgggaagcgtcagggagaggatcaccactgtcaagtatgagttgaggtgaggttggtaatggcgtagtgactggtttggcgtcaagcatattgtgcttagtaagaagatctgtgatgtattttcgctgcataagatgaagacctttggcaatttggtttacctcgattccaggaaagaaatggagattcgacggatctttgatcgagaagcgttctgcaaacgaggaaaaaaatttgttgaccacaacgttgttgttcctagtgacaataatatcgtcaacatacaataagacatatgtgatgttatgtcctgaggtgtgtatgaataacaacgtatctgccataaagctggaacagaataaatattgtttcaaagtcgtataccatgcccttggtgcttgtttaagcccatatattggtttcttcaatcggcaaacgtatgagggcatatcagtgtcaataaacccaggtggttgtgacatatatacttcttcggtgagttcgccttggagaaaagcattgttgacaaccaactgtttaagtggccatgcttttgcagttgcgacatcgagaacaagacggaggtt

SEQ ID NO: 31485 - DNA, 5547 bp, Arabidopsis thaliana landsberg
  unsure (1)..(5547): unsure at all n locations
aatttctcggcttccgtaaaacccagttgacaagaaaaataaaaaagctttatcctttttaccctaattcctcaaagtttagtcctttctctttcgggtttctgaatctcgattcgccatttgatctgatatcgacgatggcagacatcgtcaagcaaatcctagcgaagccgattcaactgtctgaccaggtggtcaaagccgccgatgaggctagttccttcaagcaagagtgcggcgaactcaaggctaagaccgagaagctcgccggtcttctccgtcaggctgcccgcgccagcaacgacctttacgagcgacccactcgccgtatcatcgacgacacggagcagatgcttgagaaggctctctcccttgtcttaaagtgccgagccaatggcctcatgaagcgagttttcaccatcatccccgccgccgcgttccggaagatgtctggtcagttggagaactctatcggagacgtttcctggctcctccgtgtctccgctccggcggaagaccgtggtgacgctggctaccttggtcttccaccaatcgccgccaacgaacccatcctttgcctgatctgggagcagattgccattctctacaccggatcgcttgaagaccgctccgatgccgccgcctcgctggtatctctggcccgtgacaacgatcgctacacgaagcttatcatagaggaaggaggtgtggtgcctctccttaaactgctcaaggaagggaagcccgaggggcaagagaacgcagcgcgtgcgttagggttactgggacgtgatcctgagagcgtggagcacatgattcacggcggcgcttgttccgtcttcggcaaagtcctcaaagaagggcctnnnnnnnnnnnnnnnnnnnnnnnnnnnnnnnnnnnngagcttgtgtccaatcaccccaagtgccaagacgtcttcgctcagcacaacgccattcggctactcgttggccacttggccttcgaaaccgtgcaagagcacagcaaatacgccattgccaccaacaacaaagctacttccattcaccacgccgtcgctctcgccaaggaaaatcctaattccacctccgccaccgccttgcccaagggtcttgatgaggatcagagctctattcctcatcctacagggaagcaaatgcccaatcagatgcacaatgtggtcgtcaacaccatggcggttagggcaaaccctccgaggaagtcgactagcaacggtgtgagccagagtaatggtgtgaagcaacctagcagtctacagcagcaccagaattcgacttcgagcgcatccaagactcgagagctggaagactcagccaccaagtgtcagattaaggcgatggccgcgagagcgctgtggaagctggcgaaaggcaattccaccatctgcaaaagcatcacagagtccagagctcttctctgcttcgctgttctgattgagaaaggcgacgaggaggtcagatacaactcagctatggcgttgatggagatcaccgccgttgcagagcaggacgctgacctgagacgttccgcgttcaagcccaattccccggcctgcaaggctgtggttgatcaagtgcttagaatcattgagatagcggattctgagctactcatcccctgcatcagaaccattgggaaccttgctagaacgttcagagcaaccgagacacggatgatcgggcctctggtgaagcttctggacgaacgagagcccgaagtgacaggggaagctgcggctgccctcacgaagttcgcctgcacggcgaattacttgcacaaagatcactcgaggggcattatagaagctggagggggcaaacatctggttcagttggcctactttggagagggtggcgtacagattccggcattagagctcctctgttacatagcactcaatgtcccagacagcgaacagctggccaaggacgaggttctggcagtgttggaatgggcttcgaagcagtcatgggtaacgcagctggagagcttagaagctttgttgcaggaggcaaagagaggactggacctttaccagcaaagaggatcaaggggttacaatttcaattgattcattatttcgattttgatttcgtgaccagcgaacgcagaataccttgttgtgtaatactttacccgtgtaaatcaaaaacaaaaaggcttttgagctttttgtagttgaatttctctggctgatcttttctgtacagattcatatatctgcagagacgatatcattgattatttgagcttcttttgaactatttcgtgtaatttgggatgagagctctatgtatgtgtgtaaactttgaagacaacaagaaaggtaacaagtgagggagggatgactccatgtcaaaatagatgtcataagaggcccatcaataagtgcttgagcccattagctagcccagtaactaccagattgtgagatggatgtgtgaacagttttttttttgatgtaggactgaaatgtgaacaacaggcgcatgaaaggctaaattaggacaatgataagcagaaataacttatcctctctaacacttggcctcacattgcccttcacacaatccacacacatccaatcgcaacctcatcatatatctcccgctaatctttttttctttgatctttttttttttgcttattatttttttgactttgatctcccatcagttcatcttcttcttcttcttctgatcaaccatggctgctgctataagtgctgcagtctctttaccttcctccaagtcatcctctctccccaccaaaatctcctctgtatcccctcaaaggattttcctcaagaaggtatcatttccatttccatttccatttcgtttatcatgttttaattaatcactaattgtaaagctggatcttgacatgcataattgctatttatctcgtgcacctgcatacagagcacagtgtgttacagaagagttgtgtcagtgaaggctcaggtgacaacagatactaccgaggcaccaccagttaaagtagtcaaggagtctaagaaacaggaagaagggattgttgtcaacaaattcaaacctaagaacccttacactggtcgctgccttttgaacaccaagatcaccggtgatgacgctcccggtgagacttggcacattgtcttcaccaccgaaggtaaatccttaattagggggcttttgattgtattttttagaggcatttttcgagtgagagatttgattaggttggttgatgacttaggtgaggttccgtatagagaaggacaatcgataggagtgattccagagggaatagacaagaacgggaagccgcacaagctcaggctttactctatcgccagtagtgccattggtgactttggagactccaagaccgtaagcaaataatccctctaacaactaactaaataatgatttacaaaatgatcttctcttatctggaaatggatccttttgcaggtttctctctgtgtcaagagactagtttacacaaatgatggcggagagattgttaagggggtctgctccaacttcttgtgtaagaaagaagaacaatgtgtctgtgatggatcgtttacggtttaaactgttcttagtgtttgtgatgttcgggtttttcaggtgacttgaagccgggtgatgaagctaagatcactggacctgttggcaaggaaatgcttatgccaaaagaccccaatgccaccatcatcatggtatggtcatatattggcgtgctcacttagattagagagcagaatttagtggtatatagtcaacacttgtagtgattacttctgcttttctgtttccttagcttggaacaggaactggaatagctccattcagatcatttttgtggaaaatgttctttgaggagcacgaggactacaaggtcaaaccaaaagcaaactctctagacactgttgttgccaattataccactgactaacttactcaccaattgaatttgccaatcatatgtgcagttcaatggtttggcgtggcttttcttgggtgtacccacaagcagctcactgctatacaaggaggtacacaagctgaaatcctacccacctttactaatgttgtcttgtacaaaaaagctgttgttgaattgtgtggataatggcaggagtttgagaagatgaaggagaagaacccagacaacttcaggctggactttgcggtgagcagagagcagacgaacgagaagggagagaaaatgtacattcagacaagaatggcagagtatgcagaagagctgtgggagttgctgaagaaagacaacacctttgtttacatgtgtggtcttaagggtatggagaagggtatcgatgacattatggtctcgcttgctgctaaagatggtaaggacattgatttcattatcatttgattttcagaagtctgtgccagatgtgtttattaaactgttttgtttggggtgggaacagggatcgattggttggagtacaagaagcaattgaagaggagtgaacagtggaatgttgaagtctactaaggaagcttctgagggagtaattatataatgtagataaaaagcttctgatgcattgtgaaatcttcatatctgcttcttttttctttctcaaggattttcaatcaaaacattcaaaagagagcatcaataccaccaaactactctttctcacttgttgttcatgttatatttcttgcaacaatatagtgagttttgtgaaatatgtttttctcatctccctttttgaagggctaaatcacttttcagtaaagtcatcaaccgaacgacccttttgagcgaggtatcacaacacattcttctttgcttcgttgggtggcaatttcctgatttttgcaacgaaaaggccgctggttgctgaggtggaaggatcaaaccgcagtgtcttaggcgtgcgaccacttctacacggccaatccttggccatttcaatctcttgtagctctgcatcgtcataacccagttttctgttagtcttcccactagtccataagtaaggaacaagaaatatacaaaatcacacaaaatctgacctatagcacctacaaagtatcgagttttttttcgaaaacggtaccacaatgaatgttgttaatttgttgaaaatatactttaagtacctgcagagaaattttcagaaaggaactgatccaccacatcttcgttttgggcatgcgtcaaactgatagttacacgacttagatcactgactcacgtctaaaagaatagaaaaaaggagaggcaagagcacagagagcttattgtgattggacttttcacctgcaggtgctgtacactagagtgccagcttctttcaacaatctgaatccatttctcagtagattcaactgcaaacaaaggccctggcaatgatcaccagagaggcaataacaagggtagacacacgaaacaccaacagacttatggaatgtacctgaagagcttttaagtttgtatcggttctctcagcatccagaacacggcgttccagagtttcgaaccccaag

SEQ ID NO: 31486 - DNA, 1287 bp, Arabidopsis thaliana landsberg
gaagtttggaaacacacaagacattttatccgcaattattcctccgaccaatgatcctattgcttgtccggtggcaaatattccattgagaagagccgcctgattatgatcaaaacctggaaaaaagaactttgagaattcaaagatctttttggtttatttatctaagttaagagcatatatatgttgtatatagtaaatgtattttgaaaaataatcaaaaaatttaaagttgtactcataaattatattatattttgtttttagaatgtatccctagtaacaaagatttggttttgtttgatgtttaaggggttaaggatttaatgaaccattcatgttagatagaatatatggttggttcatgtttgatgtttgatataaaaaaaatatacgtttggtttggatgaataccaatgagttcgaaccacattgtccagaaaaccattgcattccatggcaccgaacccacgattccttgcaatacgatgatctgaaacgttcttaacttggttacatcttttatggccacccacgattccttccaaaccgaagagctcggactctccatcgttgtagcaccattgttttcatctctacaaaaccacataactaactcaaaaccaataagcaaaaaacgctttattgtcatgttggtgctatatataaccaagaatgtagagatttatattaccgttcatgttgatcatcgtgatgaacaatgacgctgctagtcttcttttctctcgggtcactgacaaagaagaaaacgaggatcccgacaatcgtactcagcgtggcactcaatataaaggcccatcgccatcctgatattccaaagaaatcatgaccagccatgaccgggggctcggcggttctcactatacctccaaccgttccaattatattctataaaccaaaaccaaaacctctcgaactcctccttatagccatccgcgattattgactgaagcaccggataaacaattgcttgtccatccccattgtttgcttcaccaagggtaacctacttcataaaaatgaagatcaaatcccaaccaaacatacatacatttattatattaccatttagccattccacatgctttcagggtcatatttaatctttcctaataattcatattttatgttatatttattggaaaattaaattaccaaattccttgtgagtgattcataaaaaattcatattttatatctaacagttttataatttttatgaaccaaaacgaccgatacctccaattaattattatcatagccatt

SEQ ID NO: 31487 - DNA, 1205 bp, Arabidopsis thaliana landsberg
cattactgttaacagatgaattttactaaagatcatgtagcacactgtgttttgaaataaagtgagatccatattcaaactgaagaagtaaactaactctcacattagtaagtgaagatacctaactagattccagtttcttgaatcagaaaacgtctttcaaatcactgaaattaagctcacagatgaagtgtaatagagattatgatctcataccaaacaaaagtacccaagttcacaaaactaaccaaagttgcaacactcaaaagttttgtaaaaaccagatcttttgattacctcattaccgagaagaaacgcagtgtttcttttgaaaggatgttcattaaccgcagaagctccatctgcaatctcaacgccgcatatatcgcaatctttctcctcctaatcaatccaaacaaacaaaaagactcaaactttgaacacattcaaatctagtagataagacccataaagaaagttccaaactttgtgtaattcagagtgaaattaagaccttgagatagttgcgagcttcgatgagagagtgaaaatggcggaaacggatgtgagaagctgaaccatgactaccgaaggcgttgaaatcacggcgaccgacgaggattagctccgtcacaccaaaggcagtggcgctacgagctaaagttccgacgttgtgacgctttgctatgttgtgaacaaccacatagctctcaaatcccgccatcggcggcgtcttctacttcttttttccggtgagggcttttgtcaagtcaaggccttaaaccaaaaaacgaagagcttacataaccgggaataatttctcaattttgggtaaccggttcatttcaatttacgactggtttactcttctttttgggagggcacaatatttctcaactatgtcataatgacatctcaaaatttgaaataaaatcatttattagtttggtaatcaaaagtagtaagcaacaagattttttggtttggaataagaagaaattcacattgagaatgtgagctcttctaaatcttctcgaccctaaacgaatccatgactcttcttagatctttttcttcttccaggaaaactttctcgggtgtttggagtctaattgaatagagtctatcgttctcaactcctagaactgcaaggtagcgccggttccattccaaacgagccactcgatcttggggcatcacagcta

SEQ ID NO: 31488 - DNA, 1292 bp, Arabidopsis thaliana landsberg
gataagctcacctgcacacggaaattctcatatattggatgtctagtctgcgccattatggcgtatgtaccatctttgtcaatggttgtgacagaatccccgtgatcaccatatttttcgaggaattcttctcctgtgatagactgtgggagcttacttgcataaagagcttggaatctgcgaaaaaaaagaaggaaaaaatatcgatctcatctaattgattaacacagatgatatatacatagagagagatttatagtacctatgaggtgaaaggttacataagtaatccaacgaagtatcggattcaatcaactccgagctctcctcttcagcctcttctgagttggtttcagcaaaagaagctgcaaaagatcttatcattgtcttaccaataaaagctcctatcctcactgaaccatagtctgaaccaccaacgctgcagagtaccaaatttgttagaaacaaaatgtaagactttctgaaggaagaaatgtacacagcacctgtgtcggattccagagtcgattccccaaaatcgaatgtgagaaggaatttcaacatgtcctagtatcttagttggctgcaacgagtacaatcaccagttattactctttttagagaatcaagctttgtaagagacaaagagagaaagttcctgacagatcataaccagaagcttgtctgctttctcacaagcagaagccatctgatccatactccacaaggtgctccaacaacataattctccaccttttggcaaagtaaagccacatctcgcggagatatttcaagacctgcacattcagctcaatgaatcatcttctcgttaattagtattggcttattgcagagaagttgtactaaccgtgagcagcagcaacagcagacatagtagcaacttcaactgaagcagaggaagatactcctttgccttcaggaactgttgaagaaacctgaatacgtgtatgcaaaacggagttaaatacaatgcagttcatgaaattcgatgttttctttcttaccagtatgcttatgctgtcttcaaatcgaacgtccatctctctcattagtaccagaattgtacctgcaacatacgccgcccacctagaaatggaactcagtgttataatatatcaaaaactttatgatgaatctgaaaatggggtgaaagagatgaaccaacttctgagacggatcccgggaaaagtaatggtaggctttgtcataagatattggtttcccatcctccttccataaatcagacacgtacatatgaaaagttggccctc

SEQ ID NO: 31489 - DNA, 10185 bp, Arabidopsis thaliana landsberg
  unsure (1)..(10185): unsure at all n locations
ggtgctatatgaaatttcttcgatgagttttttactcatgccatatattagcagtttgctaatatatggctcaacttttgaagatacattgtttttggtatctcaactctttacgagtgaacaattgaatcttgtttcaacataatctggttgaatctgatctctgataattgaaacggccgcattaagagttaaatcgagatggaggagtattgctcaaacaataatgttatgaattaccggactcaagccaaaaatgacatgttccgctctgtggttttagattcattgattaaagtaatcgataatggtttgtagttgtacaatcaaatacactcttgggatgttcaaattgcacaagcatcaccaacataatcaaaattacaagacttattttatatgagatcttaaatttgtcagcacattgattagccataaatatttccacaaatgatcaatttgcttataccttgcaattgagactatgcattctcaatgagtctgtgactaaattaactcactcttccttttcatcttcagtttctcatgaaatgggtactatatagaacattcattcgagccaaatgcggttctttgacaatttctatgattaatttatcatcattttgaaaacttttgcgagagattaatcgagactacatgttaactattggaccctcttgagtgttgaatgggtttctttcttctgttgggcccgaaccaacaaaattgcttactataactcggcccaacaccaaaagtataggaagagatatgagatctttttcccaccttataatataatcttgctactcaatctcagaagctgataattttttttgtagtccttgctctttttaacggcaatggctttctcacaagctgctctctctgcgttgcctctttctgatcgaactttccgcaaaaagccatcttcttcttcttcatcttcaccgaatttcgttctgagagtaagagctgctgcaaaagaagttcactttaaccgtgatggctctgtcaccaagaagcttcaggttttctcgttcttctttcgggcacttttatagaatttcgttttcttatgatggataatggtggtgaaggcaggtgcagatatggtggctaaactattaggcgtgacgttaggtccaaagggacgaaacgtggtgttgcagaacaagtacgggcctcctaggattgtcaatgacggtgaaactgttcttaaagaggtttctcacttacgtaccttttattgcgacacgcttctgtgatgatgcttaaagaaataccaaaatcattatcagcttttattgtgtggtgtagattgaattggaggacccgttagagaatgttggagtgaaacttgtgaggcaagcgggtgctaagactaatgaccttgccggtgatggttccactacatctataattcttgctcatggccttattactgaaggtattaaggtatacagattcccattatgaccaattggataatgcatcaccatatgtgctttctacttgtgaattaacccatttttctcatcttcaggtgatttctgctggaacaaatcccatccaagttgcccgtggtattgagaaaaccacaaaagctcttgttttagagctcaagtcaatgtccagagaggtgaatgatccatgtcttttaactcttgagagtactcatgagaatggagttaattagctagctttaatagtgcaaaccgcgaacctcgtgtttgcagattgaagatcatgagcttgctcatgttgcagcagttagtgcggggaatgactacgaagtgggaaacatgatttccaatgcttttcaacaagtaggaaggaccggtgtagtaacaatagagaaaggaaaataccttgtgaacaatctcgagattgtggaaggaatgcagtttaatcgtggctacttatcgccatactttgtcactgatcgaaggaagagggaagctgaattccatgattgcaaggtctgaaccaaatcctctcagtttttttgtttctggtttgcttggaataccaatggctaagagaatacctgcattgttttgttgtagctgcttttggtagataagaaaataacaaatccaaaagatatgttcaagatattggattctgctgttaaagaggaatttccagttctaatagttgccgaagatattgagcaagacgctcttgctcctgttattaggaacaaactaaaaggtaacctgaaggtggcagccatcaaagctcctgcttttggggagcgcaagagtcactgcttggatgatcttgcaatctttactggaggtagtcaagctccatcttcacatatggcatacaccagttttgctttgagtataattttcttattgttagtctgaatcactgggttattctctctgcgtagccaccgtgatcagagatgagatgggcctgagcttagaaaaggctggaaaggaggtcttaggaacagcaaaaagggttcttgttactaaggattcaacactgattgttaccaacggattcacccagaaagcagtcgacgaaagggtttcgcagattaaaaatcttatcgaggtccttctatcatctatgtcttctcattttgttaaccaagtgacttctttgtaggcattataactggaagaacctaaaagaaattgacatttctactcatcatatgtggatgctcctgttttcatatgatctttatgtgtaattcagaacaccgaggagaattttcagaagaagatcctcaatgaaagagtagccagattatctggtggaattgcaataatccaggtgactttctaaagcactgataccaagaaacaatctgatcatgttgaactaacttccaaaggccttaggtaggtgcactgacacaagttgagttgaaggataaacagctaaaggttgaagatgccctgaatgcaactaaggtaactccagtcaaaacatgcgattcccgtggttcagaaattgtcagtccaagaatcctgatctctgagaacttagtcagcaattgaagaagggattgtatttggtggtgggtgcgccctcttgcgactggctacaaaagtggacagaatcaaagagacccttgccaacacagaacagaaggtatacttgatttaagtccatggaagtgaaaacatcacagaagatgtgatcctttttcttgcaacactataagcagattggagctgaaatcttcaagaaagcattgagctaccccataagacttatagccaaaaacgcagacacaaatggcaatatcgtcatagaaaaggtatctcacaatnnnnnnnnnnnnnnnnnnnccttaacttccactaaactaacttctgaaatctgcaggtcttatcgaacaaaaacaccatgtacggttacaatgctgcaaagaatcaatatgaagatctgatgttggctggtataattgatccaaccaaggtaaaaccacatgactaatgtattgagctctcttcgatctatgtttctgcatctcattgtctgggaaactgaaacacaggttgtgagatgttgcttggaacacgcttcatcagtggctcaaacgtttctgacatcggattgcgttgtagttgagatcaaagaaatcaaaccaagaccaatcattaatccaccattacctacttcttctccagctacctcctccatgttccctgacagaaaattaccaagatttcctcaaattatgccaagaactcgaagccactttccacggaagtaggaaactgtcttactttagaaaatactacataacatgagaagtcacattttaatgttatctccaaacattactcaacgtgtatatatatctctgtatgtatgtatacacgagggtctctgaaattgcgctaaatgtcataagctctggtcatctcataaacgtgtcaatgcgtggcttcacttcttcttcgaatcatttgtaaattatccccaaaacactaaatcttaccatagctgagaaacaacgaagagatcgaagaaagctaagatggtgctgatgacgctaatggatctgatcgtcgccggaatctctctgatggtcggattagggttcttcgctctcatcgcttccatcctctgctccgtcgccttcttccaccatgccaaagcagcttcttcttgaccatcaaaatcaagtaattgaaattccctcataagcaaatcttcaatcaacacaacaattgtttcaaaattctaacttttaaaactctctgcagaaccaaaacagagaattgaacatggaaggaagacgaagaagtgcttctcattactctcttagcttgtacaagaaagtgtagttaaagagacattgtaatctgtgcatttacgaaattaaaatttataaagtttcaaactttttatttcttgtttctctgtttgcgtataaaaaccattcctttgatcccatccgggtcagagacgaacccaagcgggcgataaaacccgagaactcgaggctctgaatacagagcaatgttacaaatccctttcacctgtaaatcctcaatcaaccgctccatcaccgccttcccaagtccacagctttgaaacgatggatcaaccacaacatcccatatgatcgcattgaaaactccgtcaccggttgctctcgcaaacgctacaggcctccgcgttttctcgtactctacccaaagcaacgcgtctgtgtgctgcaacgccacctcgattttcgccgtgtcacgacgagggaatcccacggctgcaaagactgaattcagctggtctaagttaagtccttctgttgttcgacggagaagaaagcctctggattcgagatcttcgtcgctgattgagtaacttggtggctttcgttgcattgcagctggaaacgtcgcttgtgatgatgattgtgtgactgcgttttgtgggtttaatgtggaccttaaccggagagaagctggaggagtggagattgtgcctccgagaaacatggtatacactattttttgttcaagtgttgaattttaggagctcgattacatggaatcagacaaaaggatggttttttagtttccctgaatttggataaagtgtgtgttttgtgtgtggctgtggataaacggagaacctctctagtctctctagcttttacttttctgttttttggaggaaataaaataaaatcggtacgaagaaactcgtggctgtcagagactattgtcgtttggtagttgagagtcaaagagatactcttttggcgggcaatgtagtagcttcaaacgaatccagaaatggagtgaacaaaacctgaataacttatatttttttgtgttttacttcagtgattttccttgttgtgtgatttttttagttcttcacaatggttctagtggttaatcaagatttgatcattgagtgatgcaaacaagcagttagtgattgttcttgtgctgttttatgtttaccatgtttgaaggtctctggcatgtgatcagcagaggatgagtgattcttttctatatgtttgctgcattctttcttgctcatcaaagatttttagagccacagagcatttaagtatctctcctgcaattcaggaatggtatccatttcttgatctcggaggttccattgctttgtttctcctatctatctgcctattcaaagatggttttaaggattgtataagttttgattaatgactgagtttgtttcttatttgaaaattgaaattatcatctgatagatatatcatgcatattttatggtattgtttatatattcaaaagcaaccaaactagaataaacagtggcatatggctagtccaagactctgattcattgcagcttgttctaactaccgaacgtgcacatcttcattgccattgtaactacgtttgtcttctgttctgtagcttgtaactagcaggtgatgtatatgttctgctatttgtttttcagcagtgtacatcaaagatctctgcaaaccacgttttctatattttagaattcgttagtgttcatgctgttagaggaccctaggaaaaatctggatagcagaagtcttcatatgactagaaaaccgttggtattctttaagatagatcatgtaggctaaaggcgctagcattatgatagggagaaacaaagcggtttcaagtctgctgttttcttgtccttccaggttcatgaatcatgatgctttggcgattttcaacagtttcttaaacttttcaagtggtcagaattatattcttaagttctcaatgtaacattaagatctgaaactgagagaggctaggactggaaatttttctgtatgtgaagacttttgttcttgaatcattataattctgaaatggagtaagtttgggaatgctttttattcgctaccctggttgggtttcagatagcttctcttgtgatcctggaacctttcattagttagtgactcagtttcttggagacattattaaaaaaccatacacttgttttgtttttctaatggtactgttttgcaaggcaataataattggtggttgtttgttgtaccaagatactgttgcctcatctttggttgtgcaaatgcttttactaatctttcttgatgtcattgtcaactaggaatggaacgtgcacatgctattgttgacagaaatgctggttcttcgcctttactcgctgaactcgtctggtccttcaatcttcgtgaaggtgaaattggtagaccaagttcagtgttttatgcatttaccaagcaacattctctcatgtatctcacgttttgtgggtcataaaattaggttgggacggcccatctttcgttttctgtctatctgtttattgctcctacgtgcattatgatggattggagattacaaaagtcgaaagcgacctgagaataacatcaacgtgagggtcttcctcttctggaaagttgccagctatgttcttttctgctcccatttattgtgcctcattaagcttaatacgttgcatttacaatgattatctaaacctcaattgatatattcaccatcttttttgttttccaggatcaaaacctgatcttgttatatcaaagggttgataaagctatcggttcaattgcgcttgtaaggatctgtctctatatttttgtctatgtgatatttctctaattagagtataattttcttgcaccgtttcctaaactttttcttgagctactctataaatgcaattattattcttatatataacatgccatgtttgcttaacttcctctgatgaataagattgtatttactgttacaaatggtaccgtttcctaaactgtttcctgagctactataaatgcagttattattgttctagtgatagataattttctctgtggggcaatacttgtatctactgttgcaaatggttcaactgtgttgacaacgtgggaaagaaatcagaacagtttcatttctgatattttctaataactcactttcctgatatgcaactagtttcttaagaagtggttacaaagagtttgtagtaatagaaaatgacagatttttgaatgattgcaatttgttgttttgtaaaagaatcatgtgaagctcttaagagtagcacaactttttgttagcaagcaaagctctgctgttagctacttgggccacacatcatagacaccatattggcaaccttagaaactcctgttttgtcatcaaccactttgtcctctaccatgagcgtttcttttttctcggaaaaagattattagtattttataactaatgttttgcttttcaattgctaaagattggttattatctggttgctgttgagaatgattcaggaactgttggtttttcttccaagaatcactctcttgaatcttgatggctcctgtgttgaacatgcagatcaggatatgctctgttttgtgttagaaggaagtctctgaagaacaaggtacatattatataacagggttccaacggagaaccgtgcagataacttatttgggtcagcttctacaaaaaaacatattccggcaaaagaaaacaatgcaactacctacacatggcttattaaaggcaaacaacacgattggtgagacccctgaaacgtctctcttcactacaggatttggattctttgtgaacccccatatcttcttctctcattcgccatgagttttatttggttttgctcaccttccctctactctggacacgactagctgcacttgttcttgttctagctttgaggtctgatttttctccttcgttgctgattgttttctctgtgtgttggcgtttttgaaggtagacttgtttagaaccattcttcctagctgcatgtttgttgatgtgctttggaagctgattgctaggccccgaggatgcatcagaagccatggaatcatcactctcttcatcaccaccatcatcactagtatcgccatcatcgttctcataaccatcatcagcctctttaacctgtgtatcatcatcatcatcatcgacaacaacagatgattggtcatttccatggaaggcgtcttctatgtacatagtccaccctgactcacaactgctgtattcctcctcttcagagcctccatggtttctcggagactccatggcttcacgcaacagaaagaggaaaacaaaaccaaggtctcaaaattagcttatatgcacagacacaaaaagatcacttacttcttctagttacgtaccttatgtgatccaatccacttcaccaatttactctctgatatagggtctgtgtctctgtctctcatttgctttgctcttcttccatcatcaataaatataaatttctttttgtgttttttgaagtatcaagaaaagccggagcctataggaagcctcatataattgaagagaaggagtaagtttcaccacatggcaaccctagcaccattgttttcactcaattgaagcactaccagacaaagctcattgcagatatatatcaagggaaggaaggttagtgcctcccttcattataaagtacactctcttatagaattaaaagcctatgctcttctttttcaatatcaactaactatacttttctttaaacaaatattttggttcctaacaaaccataatctagtcttagagtcaggacacatcaatatccacagaacaagaatcatccttgtaagctctgtcattagttatatgacttcttaattgatatgtgaagttataagttatctctatctctctctctcttctcttctctctatgtatgactctggctatcttaaatagaaaagatcagcttttgaggtggaaatcagaagagacccacatgaacaaacaagaaggaataaaagaagcatttacttaattaggttaagagctgttcctctttctcattcctttaatactcttcttcatcctccaatcctctctcattgtctttaaaattgttgcagccttttacttcatctctcattgtattgaaaaggtttacacaactggattttgtttgtcatttttgttttaaaagataaggacaaaacaaaaagaagtaaacaactgtcacaaaccccaaaataaaagtaaaagacagaatttgcaaattacaagaataaattgtcttcattgcgtttcctgtttctctggcgtcaccttaaaatgttctttcagtggaggccctcttggtgacagcttgcaaatcaagtgtgtgatgagagttcattttacaaaagggttgttttgttttgactttgactcttgtttgaatattgtgtaaacaaagatattaagacattatacattagtttgactctacttttaataatgtatcagctttgtgtgcttttaagacattttcgagtctcatagaatttgaaagtgggcgtgtagaatttggagagatgtgtacaaatcgttaatagctaaaaagaatggagttggactcgttggatttactcgtgtgtctctttctacaattgccctatgtgtgtgtgtgtgactgtggaatgtcactgtacgtcactgttaagtatcaccgattcatttatttatattgaagactaatttgacaagtcacagattcgaaagcatcatcgggacaatggcttgacctcattgatgattttggttggcaagtatgctagactacagatgggacttgataacaagtgaattagtttgtaaatccatattcatc

SEQ ID NO: 31490 - DNA, 1102 bp, Arabidopsis thaliana landsberg
tctcgattgatctaaaccatagtctacgaagtacataattaacattaatcctctctcttatcaaaaatattcatacatttatcaagtttctgtaagtaaatgtacgtatatgcacaaacacaaaataatagtacacacatatatactatttaaagcgacctaagagattaaagtagatgaaataagcatgttaatgcaataattatacccatcatctccatgcatatgtctttacgtgtgtttgattatttgttttcagaataatcatcaattttcattgaacgaacgttttcaaagatgattacaacaaatcaaatgaatcacatatgggtcagccaattatattcaaatcatgcaatccgtccattctcttttttattttccacgttcctcgattatgaatgtcactccatctcttgttactttaacatcaagcatttaactaactaatcactgtaattactaattaggttctgctctgttgggtaataaatgtcatagttagattttaatactccatatagtatataccatataataagctgatcggttgaggaaattgacatagctaatgttgacaacttttctaatgaattttatccctaattcccaagtaattcactaaatggtattcatgattttttttttttttttttggatggccaagaagaggaagtaaagtagctggaaacataaatcatctcttatctgagcatattgatttccttcgatttcaagaaaataaaaaggaaggactatataatattaccaaactcgaaaatgaaaacaaattaaatttaactacaaaataaaatttaaattaaaccaacattctctttctcttcaaatatccatttataataacaataattaagagaaacaaataaatacttatgttatggcctaaaccttagtctgcaagagtggcaagtgatctcgaagcaagccgtatcgatcttcgtcattgatccttccttcaatatctcagctctctccactattttccttgccttctgccacatcaccctgggtacaattcaaaaccgttaaccaaaccaaaaccagaattattacttgatcgagctagcttaactaccttgca

SEQ ID NO: 31491 - DNA, 755 bp, Arabidopsis thaliana landsberg
taattttttttctatatttcacataataaatttaaaattaagtaaaacgatttttgaaaacaacttgtatttttcaccaatacaacctttgaatatctcaatgcactttttgaatcttccaataatcaatgtaaacatggaacagtgactatcaaaattgagtgaagctgtaagatgatgtcggagacttagtcatatactactacgcgtaaaaaatttctttatcttatattggcgagagtttacaaaacataagagagttatttatgctgtactagtgaagccgacaaagagaatgaatcaaagaaacggccaaaagcatcgtcaattgaaccatttctgcagtcaaattttttactcgattgcctttgttttcaattgatctaaaaatattcataaattgaatttcgtggtcaaagtttatgaccagtcctataggtatatatcataaagtcaacttcgtatcaattattgttaaattctgttcacatttcactcacatgcttagaatctgcgtttgacttttaaaaacttttaatttgaattttcaaaacgtatattgttcatttgttcatacgaatatatacaactcttttttactaaaaatttggaatcgtctttattattgacattcccgtaccgaacctggtaatcgtcaacccagtaagaaattgaatatcatatcgtgccctccgttgacaaaaaaaaaaaaaaaaaaagagaatggtaatttgaaaagaaacctctaatttttt

SEQ ID NO: 31492 - DNA, 1175 bp, Arabidopsis thaliana landsberg
  unsure (1)..(1175): unsure at all n locations
tgtgagaagtttgtataatatagactcgacgtcctctcccacataaccagcctgacaaatcatttcatttccgaacaaaaaatgaatgtcacagattggtcatcatgaaaaggacatgcgccaaaaaagactagaagaaagacgagaattgcctgagtcagggtggttgcatccgcaatgacaaaaggaacatttacaaatcgtgccaaggttttcgcaagtagtgtcttccctgtgtttgaataaaaccaccaaaacagatgaggtgagacagctgaaactacactagattgaactaataactgtattatagcagcatatcaggcttgcgcatttatgcagattggcgtcagaatattacctgacccagttggtcccatcaggagaatgttactcttctctagttctaccatatcatcatctgctggtttcgctgcagtgctatctgtttctcccgcagacctagcttcccaaaaagtaccagcatcataactaacaatctcttaccggatacatgaaattacaaagaaacaaacagatgcaaatgcatgtgcaagcaaaataaataagaagtgaactaaccgtttctgggatgaattcgtgatatatcctcttgtagtgattgtaaactgccactgaaagtacctgcaaccacaaaatgacacaagaatgtgttaaaagctaaatatatttcccatgtctaaaccaaattagaagcatgtataattcacgaatattcagagatgaaatttagcattcaactaagtagtaacaacatcaaagtataatcatttcacctttttggctctttcctgaccaatcacgaacttgttcaaacccttacatatctcctttggtgtcggaaaatcagacccaagattggatccaccccaacaatcttctttcgaattcgaccctgttccgttaccaggaccaccaggactactttcaccaccaccaccaccacgaccgagattaacactggacccattaaccctaacggaaactccatcaccaggaggctgccatagatccggtgggtctccttgtgagctcagaataacaacagaagaaccaacaccgctgagcttcttctgagcagcataacacttagtcgaattacgtctctctcctcctnctcgattatccaagaaactcgttccaagagaggaaat

SEQ ID NO: 31493 - DNA, 1077 bp, Arabidopsis thaliana landsberg
  unsure (1)..(1077): unsure at all n locations
acagtcgttaatttagtaattagggttttcttcttattttaataaatctatgcatatatatagcaagaatacacacaaaaaaaaaagagaagataatttataagtataatatgcgaaagaagatgcgcatatacatggtacgggagagattccttttctcatatgcttttgagttgggacttacgattgatttgtcctccgtaacagtataataatgttcttttcaataaactaatccgaattaattatcactaaagcaaaatgattaaaataattaaatgtcatgtttatcccaacatttgccttccttgtttcccgtacttccaactctccaagtgctttgcgtaacagatagataattgggtagaaagattccatacgtttttgcttaatactttaatttttcaaaagttaatttctatatcaattaatcaacaaattcgattctctaattatcgnattattatattctgactgggagctggcgcctgattagcaataataaactttagtaagagtctttagtactgcagattatggtcaaatgatcctaaatctaaaatatgatgcaagagattcagtctaaaattctatcctcaacgtttgggatatgtaacgactaaaagtagcaggactaagtttcgaaccataattttgtgatttgaatcgaacattcatatgtgtacgactagctagtaattttttgttgaaatgataggtaaatagacgcaatgtcatattttcaacaatttcaaaagtaataaattaggaaattgcataaaagtaattcgaatgtcactagctaaattaaacctcttttatgaggagtagctgagattgaccagtagtgagtgatccctaaagttccgcaccattagggggttgcttagttattgattaatccccaatgtcgatttctcggaaaccaaaggatgctattttggactgatttggttaaaattatcaaataaataaccgagtctcagttaaatcttcaaattagccaacccactgctataggatatatatagtcggttctactctagattgcgaatctagactaatcagatatataga

SEQ ID NO: 31494 - DNA, 4862 bp, Arabidopsis thaliana landsberg
  unsure (1)..(4862): unsure at all n locations
cagataaattttattgtgttgcgttaggaaatactcacccctcgcagttccttggttcagtgtgttccctaggaagagaataattttcataatctcttttagcatttgtgaagaacgtacctgatgaataagaaatgaggagaaaaaagtataagaaggagaagcttatggactgcacaaaaactagaagtgattattgtaccatcttacctcctcacacgcagaattgaccacatttaacatttttctgaattttgttatctgcacagtaatcaccattaacaacagaaccaagaattacgttttcctctaaagaatcagatagaagataacataataagttatacagccacaccttagtgccaaatggaatcttgaaggaaagtactctaagctttgcctcaaatcgtggcaccttcattagctctagtaagcactgcgatagcaaaattgatgacaggagaaaatgaattaacttaagtaagctaattactacccatatttatagtaggagccaaaacaatgcgagattgataatctctaaagacttaaacagacctgctcagactttcccaaggttgccttgtcaccagtatagttctacaacaaagcagtcaattccgaacaagaactcgtgtcagtaaatgatcacttaaataaagacacaagtagatattgctactcaaaagtcaagaggtaacaccttaagaagctccatctcctcctttgttgggcaaagttgtataagattctctatttgatcaacatctagtacagactcatccattgccatgactgcagcctggacgatgcaaagaaaaatgtggataattatcattaagctatgaaagattaaccagtaattgacttttactcgggtaattaaggtttttggagcttaccatcatatcaggcagcggcatctttaatatatttaagttaactatcgtgttattggctctcctaaggtcaatctggaagaccataagacaaaaaaatctccaaaatgaattcacaaaagtatacagacatgcaataggcttcggagtagaagaaagtctaagggaaagagatgctggagagtagcttagtacaacttaaaaaacaaaatattttacagtttccaccagaaagtaatactacttgtttatagctacatgacctaccaggggaactttttcaggttttggttttggtcttggttttgccccaacagagaaaagggtctctatttctggtacatcaagttctattgcactagcaacaacaacaaaaaaaaaagcaatggttgataaaagaaaactcagtatcacagaattgaattacatggattggtcaataaagttaagttcaatacgtttgtgattctccatattgtatctgtaactcatcccataagctcccctgcaaagcccttgttattttaacccaatgtaaaggcttcagggaagacctttttgtaactggacatcgaaaaccacaaaccattcttgcacccttatgatcaaaggcatcaaacctcggaggtggtggtggaggtgatcttctaggcataggaggtggaggtggtggcaatggtaccagggcatcagcgccagagatctcgacaagcgacattggatcaggaagcaaacagacgatttagtagagagatttaataacaaacagttttcttcaccgatttagatcaaataacactagttcatagcaaaaatactcagaaaatattaacagaatgatcaatggcagcacaattgactttaagaaaaatttgaacagtcgacggacgagacagagtatttgatgtccatttttttgaataataattactactggcatattaattgacgaattcatctacccaaaacgacgaagtcaggttgacgaaaaaaaaataaacgacgaagtcagaaagaccaatgggccgaaaccaagccccactcttatttatgatgtctcggttagaccatcctttccattacaaaacaataaaatttgcattaaaaccctcgaaggaagtaaaaaaaatgaaactttgagctaatgcaacatagtactgaaacattgttagcattgttttagaacccataaggagaagtcacgtgactccgtaagttatcaatgggcttttaagtaaattaagcccagcctttaatatatgggtctcctccgctgattaagaaaatataaatgagaataactagtaaaaaaattaatatatgggtctcgtaaagacattccccacccccctttattaaagttttacatgatgaaaaaatagcaaccagacatgaatatgacgggttactaataccgattcaattactaaaaattggtatgtagtgacttattttaaatcaataataacgtgtttcgacagaagggaaaatcacaagttgatcgtaaataaaaacgtggttgtaaccacacacatatctatcaacaccaagcagtgaaaatatttacatcactcgtttatatcaacacaaaatatctgcttgcttttcttttagtgaaagcaacttgttatttcgtcttctccatttccgcttccttagcatctttattcttgtccaagtccgcttgcttgacattctcttcgtgtgctttcttaaacaaccttataaaactcaagagtgtcgtggtaactgcagcaatatcgatcgatcaccaggtcttaatgttattagctacatataacgagccactctctaaagaggatgaagtttattgtttccgaggcatatatacctttttcaaatggataatggttaggatcctcgccaaaatagtgtgcaagtgcatcagcattttttccctgtcgtccatacataagattgattcaaaaacaagtgtaattactttcaagatcaaacacattgtcaaatgtaaggcacttggaatctactagtaataagagattgacaaacattaccacggaggagtaaagactcgataccgttgctacttgagtctcagccatggatatgaagtccttcaatacctgtccaaaacacatagacctagattaagttatgtggcagagtcatggacctaatctcaaattcatgattgataaaagagaaatgcaagagatcgagatagatagaaaaacaacaacatactttacgtaaaacttgagaaactggaccatcactttcagatgcagtgagttgcttgttcagtttttccaatcctttggttatagcttgtatttcctcagccagagacttcaattgtatctgaaatagacaggacagtcaaaattacagctaagaacggaaaaggtacgtacaaaggcaaacctttgaagctgattcaagactttcaagatctttatggaagtctagtagatctgatgccttggaagcaaggacctgggaaaataaaagaggatggtttcatgatcgcataaatataatgcatgcttcgttctttcgattgtagttttaccttgcaaagataatgcatgagagtcatcttgctgttaggtgcacatgtgtcgcttaatatcaataaacttttcaacttgaatcccacggcactgcctacagaaagcagtgcaaaggatttgcgttcagataaaacaaaagaggacataatgcaacgattaaacaaaggcgccattcctttcgttaacttagctcacattgaacacacgaatgttattgtgttgcgttaggagatatcttaaagccaaaagataatgtaacactcaccctccgcagttccttggttcaatatgttccccatgcaaagaaatatttgccataatctcttttagcttttgtgaagtacgaatctgataaacaagcaataaggagaaaatgtctaagaaagataaacgcaaatgggctgcgtaaattattgagttttaagtattgcaaatatcttacctcctcacatgcagaatttacggcatttaaacctttattaagttcttttatctgcaaagtaatcatcataaaaaaaggagatcaagattccacagttacttagacactgacaaaatccaaaacgttataggtaaataccccccgacctgagtaccgaattgaatcttgaaggaaaacactctcagcttcgattctactccatggaaccttcattagctatagaaagtactgcggaagcaaaatggatgagagaagaaaacgcattaatcacacgtaaatactcttttaatggacctttagctttagctaaactaagcaaattgttaagaactatattatagtggaaaataaaaacagtgtgagattggtaatctaaagacttaaagacagacctgctcacactttcccaaggttgccttgtcaccagtatagttctacaacaaaccaatcaattacgaccaagaataatgactcgtgtcaagtaacaagtgaataatgataaccaaaaattgacatatttcacaaatgatctccaaagtaaagacaganatagataatgctactcaaaagtcaagacataaccttaagtagctccatctcctccttggttgggcaaaactttataagattctctatttgatcaacatctagtacagactcatccattgccagaactgcagcctggacgatgcaaagaaaaattagaataattatcatcaaactatgaaagggtaaccagtcatgactttcactcaggtaaagtaggtactggaacttaccatcatatcaggtagcggcatctttactttagtaagcataatttccgtgttattggctctcctaaggtcaatctgaaaaaccataagaaaacaatatttcaaaaagactagaatctgaatcacccagtatacagacatgccatagactgcaagaaaaagaaattccagggaaaagagatcgcagaga

SEQ ID NO: 31495 - DNA, 1712 bp, Arabidopsis thaliana landsberg
aaaacgcggccggtcagactatcactatgtggagcaaatatgatatattatccttctaacccctcatataactagagagaggttaggcggaaaaaatgatccgcagtttcatacaaaaagctctatagtttgttctttaagcagattaaagccattgtaagtcaatagcttttgattaagatttcaataaaaagagcaatttattttcctactttacttaaatgaattatttgtggaactttagtatctacggaagtgacgatgggacaatgaagtatggtgacgtatgacgattgttttggttagattgcaagcacacgtaacggaacaatccaaaatgatccaaaaatttaacaaaaataaatgtcagccaatgataatttattatattattcttaggttattattattgaaaaaactttaaaattcataatcttcctaaaattcacttaaatttatccaaatttaaaatccttcaaactaatccttaaattatttgtagctagccaaccaactacattagttaaatttaaatgcatttcaagctcacatgtatcaattatatataatgacatgtggtcaacatcacattaaaaacaaaaatattatgttttctgcgtagaaaaaaacaagctttgtggttaattttttatttcaataaatattttatggataaattaaaaatatgttaactccattagacttaacactaataacagctaaacacaaaaattgtaacatcttttgcaattcattgtaatgtttgcaattagtgggccttctttcgagccttcttatgtaccgaatatttgcctatttgggctttaaaacatattgggccgataaaaaagagctacaaaataaacagctaaacaatttttgatttaccatagttttttagtttttacccgacccggaaacaaaatccggcttttttcctccgacccccccaatagatctgactgaaatcaaaattttccgactctttctttctctcacactagtctttcattttcctcctcaactctgggcttgcttcgttctatgtttctccactgctaatgacgaagaatattgcaagcgacaacgttcctctgtcgcgattcggcgttctcgtcgcccagcttgagtcgattgttgcttctgcttcacagaaaaaccctgaccctctcctctgtttcgagatcctttctgatcttatttccgccatcgatgaagagcccaaggtcctctttcctttgttgatccttcttattatttatccgtttcgctttaaaatctcgatataatcgtcaatgtcgtcatttttgtatctgaaaattcgaagaactatctctggaacaacgatgatgaatctttgttattcataaacattgatcaactagtagacttcttactttcacaggccattgctctgttattaatttagcatcgcttcacgaatttgttctagattgtccgtattcgttatgcaattttcattagaaaactgtgaagatgaaattctaactaggaacattacattcaagtacctttctgctgtaaattttgtatatttttgacatttttgtgatacttggatttctcaacgatcatgtctatcaggagtctttgttagtaacgcaaagaaaatgcgaagatgccttgtattctttggttactcttggtgctcgaagaccagtgcgtcatcttgcgtcagtggctatggctaa

SEQ ID NO: 31496 - DNA, 638 bp, Arabidopsis thaliana landsberg
cttagtgtatccatgcctcgactcatatttctcctcgagttttcagacacgagacactcttttagttcaataacaacatgagacatggttggtcgtcttgctgaggtaggatccgcgcacgacattgctagctcaagagctctccacgcagaacgagaatcataatcaccgttaagctttagatccatgatcttagcaatatctcctccgttaagctcagaccctacccattgtgttatgtgagactttctgcggtttcgatcaatcactgcttggtttgtgatcatctctaataaaacaatcccgaaactgtaaacatcacttttctcactcaaccgacttgtatggtaatatctacataggaaagcgaatggtatcatactctttaagtatcgacgtacgccgcgaaaagtttcagcactgttaattgattcttactctggatcaaggtaaccaggagtaccagcaatcaccgctgaaacatgagattcacctccaacagggaaagatctcgagagaccaaaatcagcaagtttggccttataatgctcgtccagcaatatgtttctagttttgacatctctatgaaccattgctggtgtgcatccaatgtgtaagtactctaaacctatgtcctc

SEQ ID NO: 31497 - DNA, 1810 bp, Arabidopsis thaliana landsberg
  unsure (1)..(1810): unsure at all n locations
cttcttaaacataaaaacttgggaatgcgcctactgggtaatatgtactttgattgaatcgttctgtgacgttctttagattaatgatccaagagtaatcattgttattttctttcagatggtctcttattcttccccttagttggatcaaagtcttctggaatgccttcgtctcaaaaggagctcatgcaataggtcagagggagaaacgctgggtttcatgtgatgtatattttcgctctcctaaactttattctctgaatattaagattctcttgctatgtaaacttgttaaatcttatatttgaaaactgtctgaaacttgtcattttctttatttgcaggatggtttaccctttttcccatcagattttcccgactgtaaagcgtattcatcttttacactgagcgaggctgcagacttggaagaaaaggcacaacgtcgccctccagccataagacctttcagaattcccattccacctccatggaatagtatccatgtcacccgttctattggagagggttccaatcaaaagttttcaagcaatgggaggagtgttgtggaaatttccagttatggtggtaatctgtttgatggtatcgtggcaagaacatcagattcgctaactacttttctccaaacattcacaagtgacaacatgcttttatttcctcacaacacttcaaaaccaagcacagaccttatgatgacgcttcaagaagatgataaaaaagtaagagctcagatccatcagagtagtaacaaactgtgcctcgtcagagttcttctacatgctttcaaggaaggttctttcgaagaaggcgcggttgtatgtgcaccaactcttgcagacatatcattgctaaaatccaggtaacatctccaagaatccatgtcaaattgtgatccattggaactatttcattttggtatcacattcttatacattatgttttacagctgcagtgaaggagaagatgggcgtgtcacaatcccacaatcttctgtaagttcttactttcaagaacaaccttgtggaacctgggaactaaatgttcctgaagacactcttacagagcaatctcatagatggccaatcgggtttgtaacaacaggatttgtacgtgggaggtaaaaactaaaaaaaaacactaaatattgagtacaggtcgccnnnnnnnnnnnnnnnnnnnnnnntcttaaacctgtctttattgtgtgtagtaaaaagccggcggccgaagctttctgtgatgcggtgttgttagggagactaagagatgagcaatggagagacaaagatgttagacggaggaagaagcagatttatgttttagttagaaacctaagatcttctgcttttaaactcgcacttgctacgattgtcttggagcaacaagactattgtgatgtccactgcttttaaaatgcattttttaaaattcaaattgttttttttttgtatcaattatttatctattttacttcatacaataaaaaatatagaaagtttagtgggaatttggaaaatttatcaccaacttatctgttttttttttttgggacaaaaaagtcaatgcttatggaatgtaaaaaaaaaaagtgctaaaaaattaattatattgtgtttagaaaagactagagaatgaaagatgagaatgattttgttatggtatcgaagtagaagaagaagaagagagaatgcctgagaatgaattatgatttctcagaagtcagaatgagtgatatgttggagattcaagtttttatttataagcattanggtttcttcaaaaaaaggaaact

SEQ ID NO: 31498 - DNA, 3393 bp, Arabidopsis thaliana landsberg
catcaagccaccgatatcagcgcaacgttcactgcttttgctgatgatatcgtcatctccggtataactttcaaggtatatatatatatctatttgtatgaagatatgtgtcttgattttcaaaaaaaaaaaagtaaataactaaaagatttgagtaatgagtcttaattaataaatttacatcacttggaatggagagtagaacacgtacaatattgtgccaaataacaaacgggagattgtaccggcggtggcggcgaggatgcttggagatagatatgtggtgaccgattctagtttcgacggacttcaagatactttatttgacggaaaaggcagacattattacaagcgatgtataatttctggcgggatcgatttcatatttggttatggtcaatcactattcaaggtatatatgttacgaaatttatgttaattttctatcacaagaattgaccattatataatattttatgtgtcatattgatcaaaggaatgtacattgaatatgacgctggggatatatgcaccggataacccgtatggaacgataactgcgcatcaaaggccgtcaccgtcagatgagggaggatttgtgttcagtgactgtaccgttacgggagtcgggaaaacgttgttgggacgagcatggggatcaaacgcacgtgtcatcttcgaccgttcacgattatccgacgttgttcttcctattggttgggatgcttggcgtgcaaaaggcaacgagtatgcgtgatcgatcatttacgtactgcattaattatactttgaactaaacaagttctgtttaaaccttgtcgtgtggtgatgtaggagagacttaacgtttgtggaggctggttgcaccggagctggagcggacacgtcacagagagtgccgtggcttaagaagctgagtctaagtgaagttgatggattcgccagcgtttccttcattgaccaagatggttggatctctaggttccccattgagggtgggccttaacaattctatttgacaaagtttgatattgggctagaagccccattaagtaaaccttttattatattggagaagtaagaaaacccattaagtagacctctttattacattgggctataaggcccattaatctcattagtttgagccaatactgtaaatataggccccttttgttcttctcaaagtacaccataagtaaaaaaaaaaaaaccatgcgtatatgaatcgaaaaaccttaattttctgatttacaaaaattccgaccaaatctctgtttccctctctttatctcctttgttgcgtactgattctctaagccgtgacggtgtgccagtgtctgtccttgtcttattatcactgccgcagttcctattcgtgcccgccaactgttcgtcaaattgcctgaaccaattcttccgacaatcctaaaagtttggattttggtgattctaaacactagggttttattcaaattactcaagaatggctactactgcgaatggaaactctaagaaaagagatggtggtctatcgtcgcttgcccctcgcaaaatcaacgtgcagaaattctcagaggctcgagcaccagagctcgaatctcttcactccattgtgtctgagcgtttgaacaaggactttcgatcaaagaggaataagaggagaaggaccaattcttacaataatcaacctgcgaagaagcgtaatataaagaggcaaaaatcacagtcattgattggtcaagtatcaggaggagaccatgaagtaaagatcactagacgagttaagagaagaatggaacttaaagggaaccctgaaactgggttttgtacttctggtgatggaactaagaggctgagaacacatgtttggcacgctaaacgattcactatgactaagctttggggttttcaccttcctcttggtttacacggaaggtaaatttcaaatttgcagtgtttttgattctgataggttacaaaaaagttaagagtcttttgaaatcttaaggttgtttttgtcatggttctagaggaaggggatctagggatgtcttgaagcagtctcggcaaggtgttcttgttcatgatgcaagctatcacattgctgtgcaattggagggtccagaggcaggcattcacacttattcttgatatccttctataagtttttttcaacttggttgtgtgttcatattttcttcatgtcttttggctttgaatttctcagggctcactcttatcgatattaaatatgctactagagccttctccgtcatctcattccaaggaagttttcgactctattctcactggcggtagttatgaaaacgccatggtatagtgaatttatgaattcatttaataggaatcaagacgataactttagaatgatgtaaccgcaagttgtttgttttcttcagctttatcatgtcgaaccaccagtttctcaggcgattgctcctgttacttatatgtggagaccttctaagataccaaagagaagaaatgaggagaaagggggtgacggcataggaactgatctcccagtctcagataaagatcatgaagactttcgtaaactttgggtgtggatccatgcttcttccttcagtgaaggatatgctattcttaaagtagcttgtcagaaacaggtagctatttgttgtcttttgaggttatttttgtgacgtttgttgttagctatatgctttacatattcttgtggagataatgacacctcaagttccttcattcagatgaatgagacaggtgtctcagttgattgcttttcactcgagggtcagcttgcaaaacttgagatttttggttcaaaagcatctcatcttctccagaagaccttacatcctgctacaaggtgagccatctgagtaaatatagaatgattttcaagaacgcaaatgaacaaaggaaaatttatctcaggttttttttttttttttggtctttgcagtacctttgagaatccctctattctaagaaagtgttcaatggaaaaagctgaggttaaaaacgttgctgatctttacacagaagagaacgtatcatctggcgctattttagcacagtttgtcatagatccgcggttgatcctgactagcccacatgatgataggacagtgtcagttgaaacgatcaaaactgagcctactgagtccgttgaaacaacaaccaacactgaggctgaaacttttcctgaagttttcaactgcttgtgggatgcaaatagtgagctgacccctcccgaagaagagaacatgttgtgttgggaaaagcatcaaagtcgtatggattctctttgcctcgatgacccagctgctgaggttccaaaggtatctagtaggccaaggagttcaaggtcctgtcctttac

SEQ ID NO: 31499 - DNA, 2395 bp, Arabidopsis thaliana landsberg
aacgagcaccataccgagtaatccccttaagcattcttatagattgcaattaagaaaaaaagctttataactcgggagcagcaaatatcatatagctaatcagagatcactaagagaaagattacaaacaattggaaacatcttgattcagatttattagccaaatctcagaaacactgagagcttcaatgattcagattctcaatacacaaacctcaagtaatagaaacaacaaaatcaataatccgatagctaaagaaacacaaaccccagatcataatctgctcataaaccctacttaccaacaaatctcatgttgctccatggaaacttggccgtccccgccgccgcagcaccacctctcgtcggagagttagccctttcaccacctcgacgacctttacctttaccataaccaccaatctctctcttctccttacgatcaagccaatgactctttttatcatcttcttcctcaacaaagctagatcctttcactttcgaatccataaaaaaaacatagttggaagaagggatcgatttggttagtctcagaaatcttcatggcgaagaagagacactaatcaaagtttatcaatagactatggagtcgtctgaatttttgactttattatacttaggttagagaatgagtgggcttgggctagtaagtacattaatgaaaattcttaaattttggattgggtaatggactcatcactcatgggtataaacgttttataataaaactataaattctgggcttggacaatttcgggtaaccgattcactatccacggttatttaaatcaataaccattcggttttatgcctatacatatatacgaaccgaaccgaaattccggttcggttttaagcccaagactaattgtacagcggttcaactctacagaaagaaccttgttgatctggatttgtaagaatgaaagaaagtataatataatacagaagaagaagactaataaaagtgcaaattcatttctaacatcgaatcctgtaaaaacacgatactttccttaatacaaaagcttgaatacaaatgtggagagattgaaaacatcaacacctgtctccattattccaagtcaaaacttcaacgaatgaatctgttttctccgtactatctctcacactcacaatgatcacaatgcctcagcagacaacctaaagcattggtcttgttgttttttcgttattgtcaacaaaagaagaagagaagtattatgcatatgaaagagatgaatcaattccttaagctgctgactctttagcgatcttctctgcctttgcaaccacctcatcgatacctccaaccatgtaaaacgattgttcggaaagatcatcgtacttaccgtcgagtagaccctgcaacaattataattcatatacgctcttagcaaacaatcatggcgcactaagaaagaaaagcttctcatgaatgcaaacatacctggaaactgttgatgttttccttaagatcaacgtattttccaggggcacccgtgaagatctcagcaacatggaatggctgactcaagaatctctggatcttacgggcacgggcaacagtcagcttgtcatcttcacttagctcatccattcccaaaatggcaataatatcttgcaaatttttgtagttctgcaacactttctgcacaccacgagcagcgttgtagtgctcctcacccagaatgtggggggagagcatacgggatgtcgaatccaaaggatccacagcaggatagataccgagctcagaaatctacataagggaaagagacgagcataaagatatcagctctatgagcattacacagacatatttttaaaaaggaaatatcaggagacatgttcccacctgtcttgacagcacggttgtggcgtccaagtgagcaaaagttgtggcaggagcaggatccgtcaaatcatcagcagggacatagatggcttggactgaggtgatagaccctttcttggtggttgtgattcgctcctgcagagcaccaagatcagaagccagagttggctggtaacccacagcagacggaatacgaccgagcaaagcagacacttcagagttggcctacacaagaaagtatataagtttagattacaaaactacagagttaagattacaatatagggcccacaggtactgagtgatatacacaatacataacaaggcttacctgagtgaaacggaaaatgttgtcaatgaaaagcaagacatcttggccttcagcatcacggaaatactcagccacagtcaaaccagtcagtccaacacgggcacgagcacccgggggctcattcatttgtccaaacactagggcacatttgctctcagactgttaagacaagtaaagcatggttt

SEQ ID NO: 31500 - DNA, 783 bp, Arabidopsis thaliana landsberg
tgtctcttctagtgtggaaaacataaaaccctgtttgtttgatgcttctaatgtggccatgtattttcgatcaggattagtgaacaataagactgaattagaacaaagcaattctgatatgaggataccataatcacgaataatgaatcacagctaaacttttattaaagttagagaaaatagtaactcataagacatagtatactagttcatatcagtgttattatcaccttacatatttgatccaatatgagtgttttggtatatcaatatgaaccagagtttaaccatttggttgaacgcaaaatagttttgaatatgtttatgcaaattgcaataaacccaaaatggtagtaaaagaaaatacaacccataatggtactacttgaaagtttatcataaaaccgatctcgtaaaatataagattatggaagcagaaattatgtatgatttcagtaatgctgtgaaaaaaaaagcaatttattcgagtgtttttgagaacaaactataatcaaaataaataataatggacggtccatgttggtatatcgtgggaatatgccttaactttaacgactattataaaccgcacatcattgtctcatctacttaaaccaaattcaattttggcgactattcgttttctttcttctttggtcaagacattatcttacaatgaaccacttcttactataccaaaaaccatttcatctatgattaaaaaaatgatatagttgtatgtatgattgaacatgaaaaagaatattcttcaactttaatatt

SEQ ID NO: 31501 - DNA, 4392 bp, Arabidopsis thaliana landsberg
atgttacagagattggtatgtcatctccattatcattctttctctggtccaatttgagatcattaagtgatttagtggtttgcttattttctcaaaggtggggtaccagggattggcaagactcagattgggtaaatccgcttcactgctttcctctactttctcatcatcatcagagtgtttcctcttctgttaacttcgatctggtttcaggatccagctctctgtgaatgttcagattccacgtgagtgtggtggtcttggagggaaagctatatatatcggtatgtttcttttagtagtgatgactaatgccttggttgatcacttacttggttgttaatgctttttgtatgctacagatacagaaggtagcttcatggtggagcgtgctttacagatagcagaagcttgtgtagaggacatggaagaatacacaggatacatgcataaacattttcaagcaaatcaagtacaaatgaaaccagaagatatcttagagaacatattctacttccgtgtctgcagttacaccgagcaaatcgcattggtcaatcatcttgaaaagttcatctctgaaaacaaagatgtaggtataataattttgaagttccatcccgttgatcttgctgctacaagtgtatattgtgacataattcggcggctcactaagactctctttaatctttcatggttgcaggttaaagttgtaatcgtagacagtatcacctttcatttccgtcaggactatgatgacttagcccagaggacacgagtgctcagcgaaatggctttaaagttcatgaagcttgccaaaaagttctcacttgcggtaagaagaaatgatctaattcacaatacaatccttgactagcttaagtggaggttcctaatcaactcttatgatccaatctcaggtcgtgttactaaaccaggtgaccacaaagtttagtgaaggctcgtttcaactagcgcttgctttaggtgagccaaactcaaatctaccatctcagtttgctattatcatcatcatcattcatttgttatgatacttaaatggtcaacttgtgctgttttcaggcgatagctggtctcattcgtgcaccaaccgagtcattctgtattggaatggtgatgagcgttacgcatatatcgataagtccccttcacttccttcagcttcggcttcatacactgtaaccagtagaggtctaagaaactcatcctcgagtagcaagcgagtcaagatgatgtaatgacacactacgacacagtcacgaggacatgagtaagctttctccggtttagttttggttcagttcttgattccattaaactgcatgagtttttttcggcccaattgtttcataaagcccaaatgggcaaatattcggtacaaaagaaggtcataagaaggcccactaattgcaaacataacaagaaaaaatgagcaaaataaagacacgtgctatgcaacgtgggatgttgagagaaaaaaaggtttcgtcagctacgccgtcaccgactgggtcaataccggagttggtgaattggtgcctaaaatgtatttcctaaatctaaagcaattttgcccccaaaaaaaaaaaaaatctaaagtaattaggttcttcaccaacccttgtcataaccatggcttttgcttaacacaccaaccatgccgcattgataatctattttttacttaaattaaattattattttaataattagcgtaaaaagcaatgattagttgaaaattaaacaaaagaattaggttcgaaaaattgttaaagccatagagcatcacagccgtcaagattgtgtcctttctgaatccaacggtcagatcgagatctcattggtttattaatagcaacagtctcctaaaataggtttgcagagaagctttctcttctattttctctctctcagttaaccagagagagcatcaatggcttctacttcttctctagcgctctcacaagctctccttacacgagccatctctcacaatggctctgaaaactgcgtctctataccagctttctctgctctcaaatccacttctccacgcaccagtggcaccatctcttcccgtcgacgcaacgcctccacgatcagtcactctctccgccctctggttcgtgcagccgccgtagaggcaatcgtgacaagttctgattcgtccctggttgataagtcggtgaacacgatcaggtttctggcaatagatgcggttgagaaggcgaaatcaggtcatccaggtcttcctatgggctgtgctccgatgtctcacattttgtacgatgaagtcatgaagtataaccccaagaatccttactggtttaaccgtgatcgtttcgttctctctgctggacatggatgcatgttgcaatacgctctgcttcaccttgctggctacgacagcgttagggtttgtgttctcttactctgcttattaagtttgtatccttttagtttacattattgagattacatagtaaatacacagattgttccgtttccctgctcatttggtgatttttggagtcttgagatttagaattgtagaaccaacttaagatttgctgaagcagtgttgaagctttttattaggaggaagatttgaagagcttccgtcaatggggaagtaagactccaggacatcctgagaattttgagactcctggtgttgaagccactactggttagttagattttctctgcttcttttgtgtgttttagttgatgttgatcttttgtaatatagcattgcttgtatttgccaacatgcaggtcctcttggacaaggtattgcaaatgctgttggtttagctcttgcggagaagcatttggctgctagatttaacaaacctgacaatgagattgttgaccactacacgtaagattttgactccttccacggcacttttattgttatctttcttggattgtgatgttgtaaactgactgctttggattaggtattcgattcttggagatggttgtcagatggaagggatttcaaatgaagtttgctctctagctggtcactggggacttggaaagctaatcgctttctacgatgacaatcacatttccattgatggagacacagatattgcttttaccgagagtgtggacaaacgctttgaagctcttggatggcatgttatctgggtaaagaatggaaacaatggttatgatgagatccgtgctgccattagggaagctaaggctgtaacagacaagcccactttgattaaggtatctgcacactttttttagccatgaactcattaagcaacgtttgatctcatggcctttggtgttaattgttttgtggcatggtttaggtcactactacaattggttatggttctcccaacaaggcaaactcatacagtgtccatggagctgcgcttggtgagaaggaagttgaggctacccgaaacaatcttgggtggccatatgagccgttccatgtacctgaggatgtcaaaaggtaagtagaacttaactatgcacttctatttatggttatggttgtggtatgagaacctgctttggtaatttactataattcttatgttttctagccattggagccgtcacacgcccgaaggggctgctcttgaagctgattggaatgccaaatttgcagcttatgagaggaaatatccggaggaagctgcagagttgaaatctattatctcaggtgaattgcccgttggttgggagaaggcacttcctgtaagtagaactttctggtaatctataacgttttatcagtattcttcatatataaggctcttattttaggcaacttaaaattttcatttagacatatacaccagactctccgggtgatgccaccagaaacctgtctcagcaatgtcttacgcacttgcgaaagctgtgcctggttttcttggtgggagtgctgtccttgcatcttccaacatgacgatgcttaaagcattcggcaacttccaggaggccacacgtgaagaaagaaaccttagatttggtgtcagggaacatggtatgggagctatctgcaacggcattgcccttcacagccccggttttatcccttactgcgcaactttctttgtgtttactgactatatgagagctgcaatgagaatctcggctttgtctgaagctggtgttatatacgttatgacccatgactccattggtcttggagaagatggaccaacccaccaacccatcgaacacttatccagtttccgtgccatgcccaatattatgatgttccgtccagctgatgggaacgaaacagccggtgcatacaaaatcgctgtcacaaaacgtaagacaccttctgtgttagccttatctagacaaaagatgcccccccttcca

SEQ ID NO: 31502 - DNA, 1042 bp, Arabidopsis thaliana landsberg
  unsure (1)..(1042): unsure at all n locations
aagcgcacgggcctatcacaatatcaggaactatgccttggatcgtgaaaggataattttgctgttcctctaggtagcctaaaacaggcttggggccatgcatactggaaaacttatctccaaggcatggagaacgaacctgtaagatgtaaaagnnnnnnnnnnnnnnnnnngattcatacataggaatgcattctctgaaaaaacagctcgatttagtatgatctggaacttacctgtctcagagaaaccgcagcaaaattcttcccttcatcattagatgataataccactttttgcacaattcctctctcagtgtgcttgagctttatactgtgatcagccccagactcggtgcatctgccaatgacaatatcgccagtactcatgttagcaccaatgaaaggaaacccgtcatcttcaaggctgtctactttgccgattttgctgtgtgtctttccaaactgaacaagctcatccatcttcttcctcttctctgagtctttagcatcaacctctgctttgtagcttctaatctgctctgaacggaacataccacgttccaatgaagccttgttcatcacaatggaatcctcttggttgtacccgagatgaacattcacagcaacaattgcgttctggccattgaacagcacttcttttttaagacactccgatgccaatgtcttgaacagtggcttctgaggatagaacagctgctgggacagcgtatcgcagcggatgttagggttcgttgatgagaatccaatggcttgttggcagtgcttctgggactggtagagaactcttctcccatggtcgtgatttgcaaatgggacaactgcacagctcacacccaacaagaatgacaggtccaattcgcaatgtgtgtatatctttggttccttcagaagctgtttgattccccatgctgtattacagtcttcttcttcctcaatcccgatcagctcgagaatcccatggtcaagaagatggtcaaaaggatactgtgaaggtttttcttgcttcaacttttggagat

SEQ ID NO: 31503 - DNA, 5222 bp, Arabidopsis thaliana landsberg
aatccataagatcgaaaagaatggaaatgggtctaaagatcagcgtgagaaggtgtttagtgtgagagttaaggataatgcatttggtggaagatctgttaatattgatttggctatgatactgcgtgttgaatgtgtccttcctacagaaagggaaagatcattctaagagaccagtaacctgcacacactgatagggatgcaccaagaaagcataagaaagttggagtagagaaaccgattgataagggaaatgcttctagcattgttgaaaggaatgcgttaaccaaagtttctgactttcgtaacagtggagaaatgaatgggaagcagttgcggataatgtactctaggaaccaaatggagtcgatgaggtatgcccacattgcgaatcagaagaaactgtggagtgacttgtatgctagactcctacctgagctggtgactgagtacgaaggtttgaagaatcacaagagtatcctcggtaaccctccacttactttacttttatcttagctgctgcattttgtggtgttgcctgtttttagttgaacatgttgaggaaacttttaggtctaatagaaatatgtcactccaagttaagattacttagctcatgtataaccttaagctatatctgctgcatttttgtttgtgtgtgtcactcaaatggctttttctttgctacggttttatggtgatttccttctctaatggtcatctcaaagtgacaaatccagtcgggcttagtgtctgcgaatactctttcagcagtggttgttcctaagtatctttttgataggggccgtttgttttctttttcacaggtcccatatcggctgtaccaagacgaacccgtctctttgtacattgacctgaagaaatctgtcgaagcctgtgtttcataaatcctgtgttcaccaatttttccttttctaagaaacaatacattctttctgtatatagattctttagttcagattgtttaaaggggtctagagagtttgtttggttcaaagtgtgtatggccatgattttatcggctaaaaagttgtacatgttcatacatcttcaataaaaatcaatacctttgaaagctaaatctttttgatgggcttagttcttttctttgtttttattggtttcttcaatagaaatcaaaactgagattccaagaaaatgtgactttttgtttcttcatgagaacatttaggcaaggaattgatgacttaactacttgaagaagactatgttgtaaaagaggagaaaactgaagataatgacgattacaatagcattttgaggcctgcgtttgctgtggatggagaacctgatttcgattctggaccaccagaagacgggattgaatatttaagacgagtcaggtatatatgtcactctgtttcaatctttctgtgtatctgcatttaggcatatatggttaagttgtttccatcatttaaggtgggaggctaagcgaattccaaatgtaaaagtagccaaggtaagtggaagcaagtacagagagaaagagcaaagtgtttacatgccacaaattcccagagcacctgcaaccggtgaaggaatgggaggactcgttgctttccgacttctcacacattcgtctggtattcctttcttccaacttgcatacttatcagtgtttctcttaacggacaagtaatgactttaagttttatgggtttttcacaggctttaaaacaaaatggcaacgagtctttaggagatgtactcatggagatattcagtaaacgtccccacacaaacattgatgagtcatttggtgggatggtttcagagatacaaggaatggactcagtgacacgggtatcaaagctgagaaagcggatatgtttggtgaaaaggagagcggtttagagagtagcgactgcaaatgggtagtagcattatgtgcatcagtggacactcctccggatgctgataccagtgcttgtctcagagctcttgtgagaaagtgtgcgagtcttcgtgcgttagaggttggagtcttggagatgaacaagttatcattatggcaaatatgctcatcaccatcgcaggcagatattttggccaaatggaattgagaggagaagtgtgtttacaacagtttaaattttaaattcattaaaaactaaaagaaagagagttcaacataagtcggcgacatacaatccagaacgagaaaaccaaaccgacacgcaagttgaaagattgatgaaaacgggacgcaatctggtttgataagagaagaacaaaaaagtcaaaataattaaaaaatatctctcgacctctcttttctctctattgattctatcgctctgcgcatttgtatcttgctctgtctccgataccaaaaggtaattcaaaggaattttagggtttaccgttgatttcttcgattcgattttttgggacgtgttttgaggattcttctatctctgggtttacgctgattgatttcgagagctgtagctagggttatctgctactctttgttgcaaattttgtttttgttattcctttttgaggtgaacattgttcttctctttgcgtgattctgttggcatttgtcttgttatattcttcgtttgattatatgctcttctccgaagactggacttttgttattcggtcgattcgattatgatgttttttgaggttttgatagggcttcgttatttaaagatgttcctagctgcttgctattgatatccgtggagtgctattgttctaactgaaacccatcttgtaactttccaggtttttgtattctattgaagattataaactaaagggaggactttgagaatttgattgttgatatccaaggatttgcaagctagttttttttttacgacgttatacttttcgattatgagtgcatcatgggctgatgtagctgactcagagaacacgggttctgggtcttctaatcagaattctcatccttcacgacctgcttatgttcctccacatctaaggaacaggccagcagcttctgagcctgttgctccattgccagctaatgatcgtgtaggttatggtggtccaccttctggctctcgatgggctcctggtggtagtggtgttggtgttggaggtggtggtggttatagggctgatgcaggtcgtcctggctctggctctggctatggtggacgaggaggtggtggttggaacaacagaagcggagggtgggaccgtagggaacgtgaagtaaacccctttgaaaatgatgattccgaaccagaaccagcttttactgagcaggataatacggttattaattttgatgcctatgaagatattccgattgagaccagtggggataatgtgcctcctcctgttaacacattcgcagagatagatctcggggaggcattgaatctaaatatccgtagatgcaaatatgttaagccaacacctgtacagcgtcatgcgattccgatattgcttgaagggagggatttgatggcctgtgctcagacagggtcggggaagacagctgctttttgctttccaatcattagtggaataatgaaagatcagcatgtacagagaccccgtggttcacgaacagtctaccctcttgcagttattctctcaccaacaagagagttggcaagtcaggttggggttctcttctgatgtcaagattcttcgctttggtagaagttagttagtttctcatatcttgttctaatgatttttggcagatacatgatgaggctaaaaagttctcttaccaaactggtgtgaaggtggttgttgcatatggaggaacacctattaaccagcaggtatgtaatgagcaaatagtttgtttttttctacttttttgtttgaacttttgatttctgagttttgtttcatgcgtctgtcactgctgtctgttttgtgtcgtctcttaggctgattgttttgggttaagcatgttcgtttctaaggctacttaacttagttaaaagcatgttttggtttggagccagcatttttctatattaaggatttatcaatatatgacatgcagaagcattgctatatgtcgtagctgtatctatgtgttacttaatctgttttcaaaagtcaacatgttgatcttgtgtcttgttgtttgtgcagctccgggaacttgagaggggagtcgatattcttgtggcaacgcctggtcgattaaatgatttgctcgagagagctagagtctcaatgcagatgattagatttttagctcttgatgaggccgatagaatgcttgacatgggttttgaaccacaaattagaaagattgtcgaacaaatggacatgcctccacgtggagttagacagacactgttgtttagtgctacatttccaagagaaattcaggttggttacttgtctgtaaatcactttttctttattcaccttcacgttggttgaaatatcatttttagtgaacttcttcactttctgactactacccctgccttgctccgaatttttatttaagtttctttgccatgtgtgttgattcttgtgttccatactttttccttgcaaattatctgcttgttacattttctatgttggggttttgtcgtaacaaccttctgtgtccagttatatccatttggtcctctgaaaaaaatgagggggaaaaagaaatgtccaacttaaactgaaagtgtatgtgaatagtatatacaaagctatatgcatggtttctgcagaggttatatcttttctgagagaggttttcttgttgtaaagctgattacatgacttttagtcctactattattctagctaggctatgcaggggtaaatttatccatttttataaaacgatggtcaatgccagttaactgacatggtattaatagttctatgtgtcagaagattatatgccacttcattaatggatgatggtgaacctattatggcaagctttagattaatgaagtttcatacttttgtttcctgattaagctgcataatatagaatgtttctgcataatcacttgcaaattttaaaagattgtattgtttcatgtgcagagactcgcagctgacttcctagcaaattatatatttttggctgtgggtagcgtcggtacacatcataatctgaatcgtccgaataactaaagtccagtcttcgtagaagagcatataatcaaacgaagaatataacaaggcaaatgccaacagaatcacgc

SEQ ID NO: 31504 - DNA, 1111 bp, Arabidopsis thaliana landsberg
aatattgaaattgttaaggttcataagggctatgataacaagatggtttagttcaagaaggattaagtctatagagcatacaggtttagtgactcgagaagtagataaagttttgacgaaaaaccttgccaaagtgagaggaagcaaaattggaaaggttagcacttggagttatgaaattgttgggatgttgaatggaaagaatcaggtatgtcttgatcgtagacaatgcacctacaaggagtacaataacttaaaaattccatgtgggcatgctatgttggcagctacaagtgttggtcagtcatatggatcattaatagcagatttttacaagacaatagcttggagagcaacttacaagggtgttataaactctgaactcaacttggaagatgttgatgttccaaatgaaattggaagtcaaactatcttcccaccatggacaagaaggtcgtctggaaggccaaaaatgctatgtatcaaatccattggcgaatattcggttcgtatttgtgggaatcccatttttgagactttatgtgtattccgtatttaattataaattttatgtggtttaacagaaataaaaaagtgtgaatgtgaagattaaaaggtgtggcagatgcaaaaagactggacacaacatgacaagctgtactaatccaatctgaagatgttttgaaatcggctatattgatagaacgatgaccattttatacttgtttttgtgtttggagatggttatttttggataaaatatgttgtattctactttataatttttggataaaatatgttgtattctactttataattttaatttcgacttatttcatataaatctagcaatgtaatatattagtacattacatataatgttggaaacatggacaggtacaggtggataaaatataaataaggtggaactgaattgttacctgttattaatgaaaaaaatacgaaatactaaacattaaataaggaagttactaattattggataacaaaaagtttcattcctttaataaagaaattggaatacaaacagattcattgacccaactaagtaaaccggtgaaaataattcaaaattagggggaataaaaag

SEQ ID NO: 31505 - DNA, 845 bp, Arabidopsis thaliana landsberg
ccttgggactcggccgctgcagtgaagaaaaaaacagacagagaaaatcattgaatcttaacacatgtcaacacgtaacatctagacaattcacacgagctcaatatcaaattgcaagtgctagaagaaaggcttcaaagtctgaacttttgatagattctctaagagcaatattagagaaaaagcagagaatccaacaattgtacatgcaaagctacaaaactacattgcgttgcgagataagcctgcttaagcctcatcactcagggatcatagagaacagctacaacctgattaagtagctaacatgttctcatcatatgcacaaatcaaatgaattgtgaacaaacattttttgctagaaaccaactaaaaggtactttgcaattacagattttcgatacaaatccttttgaaacttgctgatactattcacctcataatctgaaatttacaacatttcatcacagatccaagttcttaatctcatacaaaattgcatatagctcttcactcatacatgactacatccaggaccagggcctgcgattactcagatacaccaaaactctacacatcaacaactctctggagatacgcacctgcgagacaacccacgcttgatccatacgcttgccgacatccgaagaactctcaggtgaatccaccgccgaagccttgacagacgcactagacggaaaacggcgaacgactggtaccaaacctagctaccttatcccaggagaagtccatggatggagaatcgaaggcgctactagatgtgaatcgcaccacatgcacaccctcatcttctcttactcttcttctcccccaccgagaaggtg

SEQ ID NO: 31506 - DNA, 2129 bp, Arabidopsis thaliana landsberg
acttgtcgtttgataggggcctcttattttcttttccacaggtcccatatctgctgtaccaagacgtaactgtgtgaatatatttgtacattgagctgtcagctgaagagatttgtcaaagtccatttttcaccaattttctcgtttcttagacacaatacaagtccctttttttctttcttttttctatgagctaacagcctaatacctcatacattcattctgtatatagattgttttgttcaggttataaaggacataggagtttcttttggttcaaattatatagggccattagtctttggctaaagttgtacatgttcatacattttcaattaaaatagtgcattcacactcagaaccttaaagttattatgtattttgatggacttatttcttctctgtttctatgcacgctcatttctgcttgtgtttagaaatccttttgtttgttcctattacttaccttgtatgattatttcttcagaagaaaatttggggactgaagaaggaacggaggaccctgaagactacactgacgataatgatgattacaatagcattttgagacctgcgtttgaagtagatggagaacctgattttagtactggaccaccagaagatgggcttgaatatttaagacgagtcaggtatattatctctctgtttccatctttctgtgtctttacacttttaaacttttggtattatggttaagttgttttgtttcctcaatttaggtgggaggctaagggaattccgaatgtaagagtagccaagatagatgaaagcacgtacataaagaaagagcaaagtgtttatatgccactaattcctgaaatccccaaatgtccagagtacctgttacccatgaaggaatgggaggactcgttgcttttggactttgtacaccttcgccaggtattttttcctgatatttcatctgacttacatggttggttaatagcagtctctctcttaatagacgaaaatgaaagtaagtgttgttatttttacagactctaacacaaagtgccaacagctgtgaggatgagataatatcaagtcagtgtgtagaagatttgcttgtggagatgttcaataagcatcttcacacagaggaggatgagtcttttggtgaggtggtaacagacatacaaggaatggactcggtgacgcgggtatcaaagctgaaaaagcgtatatgtttggttgagaaggagagcggtttacagagtagcgattgcaaatgggtagtagcgttgtgtgcatcattggagactcctttggatgccgatacttgtgcttgtctaaggggtcttctgaggaagtgtgctagtgttcgtgcagagacatcattagaggttggagatgaagaagttatcaccatggcaaatatgctcatcaccatcgccggcagatactttggccaaatgggacagtaataagtgaagaagagagtggacatgacatgcccttacttttctctcatatgtgcttttgaatcttacatgagctttaatgccattttttgtagtgtcccctttgttatgtcatctgtgatgttcggaatcatcgtatttgtgcgaagtaagctctttttttttgggatcttgttgaggttattgagatcttcacaacttccgtggatcggctagatagagtcttcttatcataccgagttctatcattgtcattgttgaaggaaattacaagaactacgttgctgtagtggtttcaatttgttacaattcagtttaagtgctctttgtttcttcttcgtttggatattgcaccaaatagtagtcagatactacgtttggatgcaatctttgatattattgttacaaagaaaaaaagaataaagaaaaacatgtaatacatatgtaatatacttcgaaacatatgtaattttgcagttcccaaaacaatgttctttttgtttttgacatggtaatatgaaattacttttataaacagatgtttcaaataatatttgcgaattttaatatttttggttacagaattagtttgtacgagtatgttagttctatcttaattattaataatttaatagaaaatcatattaaatcataacagaaatattttgttttataatttagatgatt

SEQ ID NO: 31507 - DNA, 367 bp, Arabidopsis thaliana landsberg
aacagaaaagtcttcatgatcacctattattgatctttgtttttttatcatgcacaagactcccgtaattcataagcacacgctatttcatcaaggaaaagacttaagaagatccattgaaaagtaaattacaccctcacacaaccaaaaaaatacatacatgacacatataaagtaaaacacattcttagattaaaatcgtacaccctttgttacatgctctactcacacattcacatactaacacggccaacatactatatatgtgattagccggtgattaacccacaacggcagacgacaaatagaaattcacgcgagatatatatgtgattagccggtgattatagcgtcgttacgagcccgc

SEQ ID NO: 31508 - DNA, 1168 bp, Arabidopsis thaliana landsberg
gcaaaacccatcaatgtggagaaatattaggcaaagacgacatgggataatgcattgaccaatcaacctacgtggttctcttacaatgcttatatcgtcgttgctgacaaatatcggtcagtttttaaataaaactttgcttcacaatttggattgaattattttaagctacaagaaacacatttataatagcgatccactttgttgttaattcgttgtaaatagggtttacatcaatatagcaacaaaaattaatttgtcgtagattgatttaagtaaatctacattccaggtaaatatgacatatcattttcaaatagttaagtttatcgtttattcatcataatcggtaacaatcaattagtaaaacatcccaacgaaataacaaatttggtcattaaaagatagtaatttatctctaatttttgttcaagtaacaacaaatttaagattataattgaggttttaggaaaaaatagaaatcgctcccatgctcttatattgagaatgataccctagccttgatttccgatgtcgatgaagctttgactcgccagcatcggaatttttctcttcttgctcgcaacttttgtaatcgtattaccactttagtctcgttttggtcctaattttcatccctctttcggagggttgaaaaaccccaaaactgccttcctttccagcatcgatgaacccatctattacctttgatttgctacagtgcaatcaccaaaaaacgacaccattcaaacttgcaaaaagaagctagggttttagtgagtgggcatgttctccagttgtggcccattattaatgttttggcccagttttgtaatgagtagatcactagttggctgggcaaaaccctaactctctagagatgatccttaatgaccttgacccacgttctcatctgtagaactatggcccttatgttcctccaagaaagctttctcctttttatgtgccctatcactctctacaattactttgcacatctccaatttatttcctttgtattctcaattattttattggatttttttattctttgtgttgattgacttatgacatcattatagcgttgaatcatttagtctagtttggtattgtactttcttatctcgattcctattcgcaagctcatctcggcttttgtctgaagaac

SEQ ID NO: 31509 - DNA, 1302 bp, Arabidopsis thaliana landsberg
attttgtatacatttcaagagagaagagaccaaattatcttcatcattacaaagctggagccatgaactttctggttagtgaatttcctcacatctctcttgtatctttctattttatttctgaagttttataaagaaggtacaacagaaattatgagcttagacatatagatataaaattacgtcttttcaaggaaggtaaatagtaaaggtgaaaatgacatctacttctcctattgctaaatatcactcaattgattgctaggcccaaccaaatatgggacaattatgtaaaaataagtcccatgtgatatatggctgcaatcattttttcacattttgttgcatgtgacaatccacattaattgttaaaatgaaaggtaaccaaaaacttcctgcttatatatacttttgggtggctaactaatacacggttagttaccaacaccaatgtaaccatgtttatgtgtagctatatttatgtgataattttgcatgcatgtaaaactaaagaatcatagtgttattgcctttgatatattatactatataatgtgtcattagcctaagacatcatatatgacatgcaatagtgaacaactatcaacgattgcagctttaatttttaattttgggatataataattaaaaatgtagtaacatagcgtgagatgaatttgaacaggtaagagtgtcagggttgatgacaaatgcaccatacatgttgaacgtagactgtgacatgtatgctaatgaagcagatgtggtgcgccaagcaatgtgtatatttctacaaaaatcaatgaattcaaaccattgtgcttttgttcaataccctcaagatttctatgattctaacgccgacgaactcaccgtcttacaatcagttaaatttctcttactctttatattttttgatcaatttaatgttattaatcgttatgtacttaataggttgttttctttatgttaaatttagtatttgggacgaggaattgcgggaatccaaggacctacatatgcaggttcaggatgcttccacactagaaaagttatgtacggtctatcaatagatgatttagaagatgatggaagtctttcttcacttgcaacaagtaagtactacaggcgaaaacaaaaatgcatacatcattaaaccaatattttagtattgaaaattctatttctcttttttttcttttcaatttattctaacacttaaatctaagttctgttattattcttctaacatgcaatgtatagtacttttgtgattcatcgttatataatacgttcaggatt

SEQ ID NO: 31510 - DNA, 1270 bp, Arabidopsis thaliana landsberg
atatatatatatatatatatatatatatatatatatatagtatatagtatatacactctttaaacctgaatataaacccacaaaatgatatgatgttttacatgtttttgtgaacaataattatcttatagaactttgatatattgttatacaatcatatttttcagaataaatgtttttggtaacatggtgatcccaaaccaaaactcaaaactaaactttcggagcatgtgaagagtcatgagtcgttaaaaactagaacttgtccaatcagagtcatgactaatgagaaaccaaaagttccagaactctaattggagtcatgcatggaaggttccaacaccgatcgacaaattatgtttcctcgatatcattttcaatcagtttctatagtacgtacgacgacatataagagtactcgtccacgttcatatttaaattttcttagaggatttattttaaaattttaattaaatactctgtttcactagacatgagaatgtttgggacacaacaataagtttcatatacaaatactccatgagttcaaagcccaagttggttctacgcacatttatgacaaaacgttccaaattccaaatcattaatctttaaatttgactgcccattactactttccgtctcactagaagagaaagaatttcaacagtccgatatcatttatgcatggttcaactataaattgttctatcaggctataagcatttcaccccacctagatccacataaaaccattttgtaagaatctcatatttaacataagtttataaacgccgtcaaaatgtttaatggggatgtttccccgtgatcgtatcttgtttttcaatgatggcgcaggctgccattgctatggctactgctttaggatatttaggaggataataatgtttacctcttaaatcctatatggatttatgagttattatatcctattgtaatcgatctggctattaagtttactgaataaatcttgcttcttaattaattatcctatctatatactcattccatatttgtgactcctgatgatacattccaaattacgttaagttatattaactatttagatctaacgctctctaaacttttaaaattaaaagtatgtatacgtaggtaaccaatccattctggtttctctgtttgaacatagtaccggaaattgtaacatacatgtgaccagtttccaacaattgtcttaatcacattggccattctatggctaaaccgaccactagaaatggtagatagg

SEQ ID NO: 31511 - DNA, 1992 bp, Arabidopsis thaliana landsberg
  unsure (1)..(1992): unsure at all n locations
attggaatagttgatacaaaattcaataattagaactagctacaatatagtcttttgtttggggtaaaagctacgaaatctagtggtctaattgtctaaatgaggtaaaaattaaaagtccagtgtattttgaaattgtaaatttatcaccgaaaaatgtaaaaagcaaaagagagattacgaaaagagtgacggagataacgggaaaccgtaccgccgtttgcagtctgaaatgctgaagctgacgtgacgtgtggtgtggcgtttgagaaataacatcgagtttctaggggtaaataggtctttatacttctttctgttcctaacagacagacgcttcaaggaaacacaaaaagaaacaaaaaaaaaaaaaaaaaaaacctttttagctttttctttcttcttggcgagttcgcgaccttggtcggaaaatcaacaatcgcttctctgcaatcgcattatcggctctaatggcagacccagaggtacaattaccttaaaccccctcaatctcctcctctcacgagttcatttttttcgatttcggatttttcttcgtttagtttcgttctgtttcttctagaccttgtttctcttatcggacagaatcttgttgctgatttcgctaattttgtttaaattttgggtttcacgatgtgggttttgtcttgcttttcttttcggggtttgcgatgattttttgttcgttttgttttgggttaacacagaccttagcggcgttgaagagagcctacgccgatacgatactgaacacgacgaaggaagcggcggcacgtgtgatggnnnnnnnnnnnnnnnnnnnnnnnnnnnnnnnnnnnnnnnngacggttagaaatgaagcacttcatacgttggttaggcttaaacagatgcttgattccaaggtactatcactttgttcttattttcatttgtttatgggttcttggtttgttttatttggtttctgcctgattatgtttttggggtcttagaggcatttcttttttcttgcttcatatgaagatggcttttgaaattaagtttttcagccttgctttcatggttttaagcattgttaatgttgtgtgtgtgtgtgtgactctgagttttgtttattcagtctttgacatttgaagtgactaaaatcttccatcattcaaatgatatgcttcgagactatcatttttgctatgttttttcactacattcacttcattgaacgttgatacaagccattgtttttgacactcttgagactattacattgatactttgcagatatagcttttctcttcctccattgatatttgttcatgaaacctaaggcctaaaactaatgagcgtaaccaagtgtagcttagtgtcagcaagttctagattcgttgtaccattgttggcagtgaggcttacacatatttcatggcttatgctctcaattctcatttcatcgtgaaatttttaagttaaaggtttttcagtgtgggggatatagctttttcatcttagagactgtatcacgtttgcttgaggatgagctttccctaatggagtatatctttcttttgtggctggctttgcgtttcctcctcaactctaatttttaaataaccgatttgtgtttataggttaaggagacagagatgcaatccttgaagcagcaacagaaggttgaggaacttgaagctcagcttggagaagctgaagatattgtaggagagctgaggttggagttgagagtacttcacgatgagctcaagaaacttacggatggtcagaaacatcttaaaaagaatcatgaggaaaacctctgttggaataaccgtgatgctgcagtttctgtaatgcctgaggtttcttgcagtcacgagaacacagaagctgtaggtttttgcatcccagtggaacaaaatggatcagtggtggctaatgggagaaaagtaccgtctttgactcgcaaaatagtataaccggggttcttataagatacaa

SEQ ID NO: 31512 - DNA, 992 bp, Arabidopsis thaliana landsberg
acaccgacaaggtatgaaaggcaagctggttttatcctagtgaacataatacatttttttagttctgtattggtttctctattgagtatgttttttttttattctttgagtagaacatgacgaagcacttgatatgttggaggaaacagtcatgcgtgtaaaacacaatgcgctagttatgaatgagcagattggcttgcagacaaggcttatcgtatgtctttggcttttcattatttttttactgtcttgattgggaattcttgagctacaaaatctgggatttttcttttatgcaggatggcttagaccaccatgtggatgttagtgactctggcgtaagggtaatacatattcgagcttaaatattttcaaacaatagtgtggtgagtcattagcttaatgtgtctggtcctttgactctgatatgcaggatgctatgacattttgtgttatcctttgactctgatgtgcttggatttgtcattcctctgagtcaccttttgttgcaagaacccttaagaaataagaagtatataaaatgtgtgcagttttcgcagtttgctgtcttcataaagatttaagaaatggtagcaactaagaaaaacgcagagacagaaaatgtatctataagttcttccaagaagaaccttgtctgagttcgctatatgaaacaatgagcgtttttgtgacaattgttagcaccgattttcaatgtcacgaatggaaagaaaaccaatcatgaaatgaaaatcagtgattctttgtttgatcattttttgagttttgttgacttgatcttagcttgttggttttatgctcttatttcatgttagaagccattgcttcttgtacgataaaagagaagacttggaccagagagagacacacacacgagcaatattaatgatctgaaactattcctttatttactcgacgactttacatattaagacaacactggcacttatatagttttctacataacaaaa

SEQ ID NO: 31513 - DNA, 1825 bp, Arabidopsis thaliana landsberg
cttgcctttctctatcggctgtttcgctgtgatcagctccatcattacaacaccgaagctgtacacatcactcttctctgtaagtttctgtgttgtgtagtactctgggtccaaatatccctgccattgaatcatcagaaacaaaagttcctaaaaattgaaagcaatatgactcgttgatttatctaaaacttaccaatgttcctttaacttgtgttgaaacatggcctttggtgcagtctgaaaccagcttggacaaaccaaaatcagcaaccttggctgtcagattctcatccaaaagaatgttagttgatttcacgtccctgtggatgatcggaggatccgccagttcatggaggtatgcgagtcctcttgccgatcctagagccactctcagccttcttttccaatccagcgtaattccggatcgccctaaaaacaatacgtaatggtcaagttttgtgtttgtgatttattgagcacctaaaggccagatttttcagtaccggttaagctatcttttagtgatccgttggacatgtattcgtagactagaatctgctcgccttgctcgaagcagaacccgacaagcccaactaggttcttgtgatgaactcgagaaagcaactcaatctctgttttgaactcgagccctccttgtgttgatccttgttgtgctcttttgatcgccaccatgtgcccatcttgaagcattcctttatacacctgcggagattacagagagaaacagaggagcgttacttgtcaaaccctgaaagtgaagccctagatagtttcaagatcgatctttcaaaaacccacctttccataacctccataacccagctcactgctcacagagaaattgttcgtgatcttcttgagttcttcgtaggagaaccatcgtgcccctttcagctgcggtgcgccaccgctgtcttttccacttgatgcccatgaaactgagtgaatcaaaatatcattgtcagtcttctacttaacagtaaatctatcatgtaagttaatgtagagtttcttttttttcaggtgaacctcagagaatctaaaatggtagtgtttctaagataacttcacctgttagaacatcggacttaccaaatggtctactcaaaccgatagcttgctctgcacgtctcttctgccacattgcgtatattcctaacgcaacaaggcacaggaccaaagcactgcaaccagttattatcccagtgaccatccgagagctcaaggaatgtccgttaccatcagctgccaaaaattattcgattgttagacgatgtgtttaactccaaaaaggtgtataagcttcgtatgtaatgttacctgggaatgtgtagggagatgcaatgaagtagtaaggtccaaacaaaggaggaggtttatatgtttggttactcaagtcaaatccaattctctgaacttcagttctgttaaaatacttgcccataggtgggaaaagtgccaactgtatctgaagataatcatcattgttgaagaaagggttttgtagagagaccgagcctggagtgagtcctaatttcacccacaagctcatctccaaagaatggtatgtgttcacattggacaggtctctgaacataggccctcggaagtagagtgtgccttcataagggtaggcgcattcacagctctgagggctgaccttttggtctaatggacaagactttcctccacagttagcaagactggtcgagtatattcgtttgacttgttgctgctgaatctgacagtagtttgtgttggagagagctgttgtgcatacaggatttccttcgagtctgca

SEQ ID NO: 31514 - DNA, 1494 bp, Arabidopsis thaliana landsberg
acgaatattctttacgctggagaagctgaaaagaaaaaagaaaaattcccgtaaggccgtaactaagcagatcgtatgatataattacaggtttttcgaggaaaaaatgacgtacatcttcatctgctagattaaggggcaatccaacaatgtaaacaagatttctttgaaccactcggacacttgttagtggctttctcccatcagaagatttcggttttgacttttgtatttttttgcgatccatgttgccttcagaggccagtctgagaacagaaaatagataagaaacatcagcaaactaaaactgacactgaacaaaagttcacatctcaggtgtcatatcatatctcaacctctcctgatcaacagtcatcccaacaatcttttctttgtcatatggagtgcggcaagctggacagcgcccttctgattgatctttctctgccatgtccattatatggtgccagcaccaaacacaaatctgtaagattgtaggtaaatacatatcagatcagaaaattatcagcagaacaaatgtcaatgatctctgaggccaccacaataagtataaattggtatgctctaagtatataccacaagccttcaaagtaaaccatagcacaactgaacctaatttttaatcctgatcacaaaaaacaatgaaaatcagagagaatgtctggacctgatagccacatttgcaaggcttcaattgctggtcagtcaaatccatctcctcagcacacaaagggcaagtcttttcaccgtaatcactcatttttttcctgaacaagacagagataaaaagactggaatcatgtctcatcataagacatacaagcaaaagcaaaccatactgacaaaactacctaaactttagtaattcagcaacattcgcgtatagtggcacagaataaaaagatcgacagttttactaataacagttcaaattgaacatcttcccgatcaaagaaactaatattatacactaatccaataaaattgagttagcaaatcttaaattaatccaaagtatcaaactttcagatcgaaatcgagaatctaacaagccaaagtccataatgaatccgtgcatgggacgcggcggttcaataagagacgcgtcaacgaaaccagtacaatcgaaaaaaaaacatatcgacgacaatccaaaatctccatgagatttctacatacaatcggaatcagtaaacacgttgatctcaataactactccggaactaaaatcgaaaaaccagaattagggttttgagattcggcgattcaaatcccaacatgaaagagtcaattacgagagaagtgaaaacatacggctgagtagagagattcgatcggagattgtggaagatgaagaagattgagagaagtgggagattgcaagagacaacccctgagcccgattggatggctgagattttggaaagcttaaagatccacgattgcataataagacgaattaactatgcgctt

SEQ ID NO: 31515 - DNA, 1253 bp, Arabidopsis thaliana landsberg
  unsure (1)..(1253): unsure at all n locations
catggatgaggagcttggggctatggagcttaataagacttggaatatggtttctttgcctccgggaaagaatgtaattggctgtaaatgggttttcaccattaagtacaatcctgatggtaccgttgagagatacaaggcgaggctagttgcaaagggatatacacaacaagagggagttgactattttgatacattctctccagttgcgaagctagctagtgtaaagcttgttcttggttgtgctgccaagaaaggtaggagtttaacccaaatggacgtgtctaatgcttttttgcatagngaacttgatgaagaaatctatatgagcttgccacagggatatacaccttcttctggatttcttccttctaatcatgtgtgcaggttacataagtctatctatgggttgaaacaagcatctcgtcaatggtacaagtgtttcacgggtattcttcttaacgatggttatgatcaatctcctgttgataacactctttttgctaagatacagggatcaaaatttattgctctcattgtctatgttgatgacattatgattgcgagcaatagtgatgatcttgtggataatttgaagaagaacgtggctgcttcattcaaaattaaagaccttggtcctgtgagattcttcttaggcctggaagtggcgagaaatgcagaaggcatatcggtctcacaaaggaaatattgtttggatcttctgaaagattatggctatcttgaatgcaaaccaaggtcagttcctatggatcttaagatacatttaagtaaagagactggaattctattagaagatggcagaatatatagagaaatggttggtagattgttatatcttactatcactaggccggatataacttttgctgtgaatcgtttgagccaatttctctcatgcccgactgatgttcatcttcaagctgtttacaacatactcaagtatctgaaggctaatccaggtcagggtctcttctactctgtcgatacagacatttgcataaatggtttttcagatgcagattggggtacctgcactgattcaagaaggtctgtcactggcatttgtgtttttctgggtaaatcattgatttcctggaagtcaaagaaacagaatgtggcaagtagcagtagtacagaggctgagtatcgagcaatggctatggcttctgatgaaatggtgtggttgaatcagcatcttgctgatctccatgttccagtcccagctcagaaaa

SEQ ID NO: 31516 - DNA, 1130 bp, Arabidopsis thaliana landsberg
  unsure (1)..(1130): unsure at all n locations
cacaaaagtggtggcgggcttaaggtacttagctgagtcaatgggccaaatgtagtctttgggcacaagaacgcctgaagcaaaggccttgatggctgcgaggttctgctgaatctcgctgtacttcttgttggtggtgggctcaactgcctcggggtctttgaactcaaatatgagctttgtcttggccctgcccgcgtccatcccgatgctcttcaagaaaccaatctctggagatgagatgacattaatgccgcggaatcgcaagcttctcaggtactcggctgggctcagcttgtgttccatgtagaaggcatcgtactgcacatttgcattgtttgttgttttgatgaatcaacaaaaaagctccatatgttggttaatcatgttctcaaagagaagaaaacatacctgaacgctcaaccaaaacttgggaggcttggttccaaggacgtcctccactgcgnnnnnnnnnnnnnnnnnnnnnnnnnnnnnnnnnnnnnnnnnnnngttctggaccactgcacaataacataaaagatgaaaatgtgtggtcgtggtggtgagcattgaagggatgaaatgaaagagaagaagacatacaagtgacattgttgaagatggtgtcggcatcgtaatcaaggacaaaccatcccttgaggtcctgaccgttgaccttgtaggtcttctgggctttagggaagactgaagatatggtggttgcattgtcaagtatgatatctgacaagcaaaggcccacaccgtccttagtcatctgaaggttgcacaacattgtgaggccaggcgagctggtgccaatagccaagtcgtttgcagaggcgcttgactcagggaaaagacccgagaagccccctctggccacaacggcaggctcttgtcctggaagataaaagacaggtacggattcttagaaacaaacaaagagcaggttatgtaatatggggattgagaaggatacttaccattaagggtgagccatttcttagcaggaaccgccgcggcagcagcaggagtctggggggctgcaacacatcagtgcataaaaagggagaaaaatatgataaaccacagaatctctgtatgattgatcctgtttgtaacacaaaaga

SEQ ID NO: 31517 - DNA, 1596 bp, Arabidopsis thaliana landsberg
  unsure (1)..(1596): unsure at all n locations
aagaaaaaaaattttgaacttggaacaagcagaagcggcgattggagcaagaaagggaaccattgggggagatctgatgggttaaacgaggagaaagaatgattctgcgagcgcagagagatgcatttctcaagagagctcctctcatggcggatcagagatttagggttttaggttgtgacaggaaaaaagctcttcttcatacctgaatctgctacagaacctgaatcaataatttggttaaatgtcttaatctccggtttagtttcatctgtccggtttagttagcaatacatatccttaaggttgttattttttcatggtggagctatgtttgtggatgttgtcttagaaggttagctgaagataaaagagttaaagggctgtgtaattcactagtttatcagattcatggaagttcaatatgcttataagaaaacaagtcaagaacagtttattatcaacgggttttcagctcaaagatggtacaaggtggatacaggcttggtttggagctgattgttggtaaggtcatttagaagtagactgcagatttttcagaaataaattgcaggtttctagataggagttgctggctgcaaatttcagaaaagacactaaggtgtaaatagagatgaagttattgaagtggttcaatgaattctctaaagaaggaactgaaaagagacatgtgtaagtgttgcaggagttgtctcaaggtatttcacttcaagactgtgaaagtgttgtgtatcaagcctgataaacaactcatctcaaagctggtgttagcagctgaaaagaagtcctagaaaggaatgcaaatgcagaggattcaaattgcatttagaagacaacaactcatgagcataaatttgtcttggttgatgacgagacaacgtaagtgtctactcatgggaagttatctgcaggtcagtcaagtgaaggattttgtttttaagaaaatgaagggcattgactaaagactgcaaattgaatggtgtaatagccaaattcgttttggtagttgcatacaagaagaagtattgcaggtttttctttacagcttgaaagatacatcaaggattctagagttgatatgtaagctgttttaagggcgtgtcttagggatatcacaaggtttgctgataagtgacatggtaaaggttactactagtagtgggtttcaagttgctggtgtgttctgtttaacaagatggttgaacaggggtactgttttgaaactcggtttgttcaatcaggttattgacgtgaatctacaatagtataagctgttggtgagnnnnnnnnnnnnnnnnnnnnnnnnnnnnnnnnnnnnnggctaagatgattctgttttatgcatatgattcgagtgaattcaaaggattttgatctcgatgcgcatgaggaaatcctagaagctagctaaggaatcaagttttgcagaggatgaattggttacttcaatcactgctacatgtttatggtcttaacagaggccatggtggagatatgtgattgaaagttttataagtaatgaagctaatggagatttatgttgtgtttaacaagaaggaattgttctcttgactt

SEQ ID NO: 31518 - DNA, 5856 bp, Arabidopsis thaliana landsberg
  unsure (1)..(5856): unsure at all n locations
tgaaacttcaatgacaattcattatgaccttttatgtgcttagatactctcagtctgaagaaatattgctttcattttgtagcaagtgaaagagaaaatgaaggatctttctccgttaatgtttgaggattttgtgaagccattccagataaaccctgatgatgtagtctatatattatcttcttgttgatcctcaatcctcagctctagttcccattttaagtgtgtgacactagttgttctttcttttcaggaggagcttttacctcacaaggatcgagtgagctatcagccagttgatttacgtgctgcgccactccacagaagctagaagctttactcttatcctgtcacaccacaggattgttcccaacttcttcaatagtgaaaaccaaaaaggtttgatcaatctaaaaaaatcatcttaaaagagcttttgccccccatcattggtttaggtatagaatatccgcagttatgttcctggcccagccggattttgtactgtgtctgtctgtatttgatgatatatatctgcagttgaacattttcagagaaaccatatgatatgctcacataagaaaacctttcctgttatttgcctggtcaagaattcttcatctttgcaaacacagtgcatagctataaaagggatgcatgtgtattcaacagatacatgtgacaaaacaatttcaaccaactggaataaacttttcaacttttttttgtttgtttttgttaaagaacaaaaaaaggaaaggagaaggatcaagaaatatctctctccaaaccccaaatcgaaaaagtataaaagaattggactctttgtaatcgacttatgttctcttttcactgcacataagaaaaagaaaggtttttcatttggaagccctgtgagctgatggcttggattgagttgaagttgctgctgatgacattactcgtaagcgaccagctatctctgtgaaagatggtcttgccattgggtttggtgcccaacattcctccattagtgttctccattcatcgtcacagaagcctggtatggttggtctcagtgtgttgttcactatcccacctgcactttcacaatgaagtcatcatcatcttaaatttcatacccacggcattcagaacaagaatgaacaggcagaaactcgatagaccatgagttacttgcacgcacctattattgccccatagtgcatattggcatatggttcctctccggttagaatctcccacagaacgataccgaaagagaaaacatcaacctgcaggcaaaaaaacaagaatataacagatcttctagtttagttgcattctcagtcagtttgtgataacataagattctcatctcaagaaactaaacactattcatctcagcttttcataaacgggaagataggtgactgttgcagaggattcatcattctagcagttaaagtggtaattgatatttactgtgcatcttatcatattaatgtttaccttttcagaaactttgctactgctcccgtttagaagctctggtgccatccacggtaaggttccacgtacaccaccagataccaacgtatttctcttgatttttgacaaaccaaagtcaccaacctgaggtagaagagcatgcggatattaatgcgatttattcaaaaatcatattaaactaaattcatcgacgggaaggtctagcaatcgtgttaccttgcagattgggcgagaaggatctttcaagttcacaagtaaattgtcacatttcaaatcaaagtgaacagtgtttttggagtgtaaatattccattccaaatgcagcatccatggcaatgattagtctcttacgacgatcaagatgcctgataatacaaagaaggaaaatagataaaactttataagataaacgaactggaaccaattaaagtgatatcagagaacctaacaagccgaactttacctgtccttccggaccagaacatgcctcagagaaccatcaaccatgtactctgtcacagtcgccaaggtccctccaggcccgtcttttacaacaccataaaatgctaccacgttcggatgatgaagctttgaaagaatttcagcttccccccaaaattcaccagtctagatagtgtgacaaattaacacaggtgcatgaattttaggcatggcaaaaagggagatgcattagacatgatctgcaaacaactcaccaatctctcttgctctgatgaccgcccagcaaagcaactcttctttatcctcttgatagcgacatctgatcctctccacttcccatgatacaccgttccaaaagtaccagaaccaagctccctcaactcctcaagatcttcattcttaatgatctagtaatatttaagagtatactattttacatctatgtaaaccaaacacagaaaaggagctcagcagaaacactaagaaaatagaagcagagaattgttttgacagaactagcgcaatgaaaatgaaacaagacgcacagacaaaaactagtcggggttaaacataatgctgattccaccaacatggaccccaacaaagaatttcccatgcatagatagtacgagttttgtcagacgtatattttcaaagtttttcatacctgcaagccactgtagtcaaactctgagccaagtggaggaagcgcagcatgccttgtttctgtcttttcatcctagatgttccattctcttcagaaacacagtggttttggaaatcataaaataaaaactgccactaactcatacctttggttcagaatccggcgtcctaagattctccaccatggcaccaaattcctcactctcagtgaccttcatctgttcattctctagagcagggggaatgctgccagtgccacccccatccttttcagaaaaattacccccataatcttgacctaaagtcaactgaggattagcaaggtttgttgaaataccatctctactcaatggcgagacataaggcaatctggagctctctccaccatctttacggtcagatggaatgcgagaatcagcttggtcaagtacaacatctctttggataaactgatcttcagccagctgctgaaaatatgaccagtttttacgatcgtgattttgcacattcatgctaacagcagctccatcgtgaggatatggacggacagtggatgtatcctctgagattgcctgtgagaatatttcagagaggaagtcacgaggaaaccggtcattgatatcaataagaatatctccctgcagcgaagcttgctcttcaggaataacatgactcatggctgcgtttacatggctcaagttggaaacaccaatttcagtatctgccccattgactactctgttcttgtttgcatcgtcaggatttacaatcttgtgcaggggctcggattccaaagtttcatctgatactcctactttttcaaagattgtttccacatctttgtgcgtatggtgattggcatcatcattaacagtcttgaattcgtcatgtgactttccaaccgcttcttttcctgaatcttgctgtgcagtgtttgctggtgactcagacgttacgaactgagagcttaatgagttatcggacttcgacaaacgatttagcaattctagctgttcacgaggtattctctctgagcaatataccctttgggaagactgctcaggctccgggtagttaagatcaattaaatttgactcagagtcgctatgaacaggggcataggtactgcttgaagttgaaagctgatcttcaataccagatagaggaacctgcccagtaataacagcatcacggtaggtagcaggttttgcagtagtgttctgccgtggatctctactagggggtagtaaatgtgcatcctggctaggtggagttgttgcaactgccatctcccggacctgattgtgattcctcacctcaacatcatctatttggggaggattctggtgatcattccccggagttttacggttttcaggctcaacttcctcacgaattttcatatcagatgatactttttgctcctctgctagcgcttgtgtgcttttgggtgtgctgccagggtacggatacccttcagcccagccaccttgctgactgacatgcccttggatcggtatggaactggtagtttccccgatagcggagtagttagaactgtgatcaggatagagaggaaaccgttctctttctcnnnnnnnnnnnnnnnnnccataatattgtgggtatattccataggagctggcagaaccaggtatgatggattgtggatactgataagaggagcctggcgtaatagattggggatactgaagagaggaacctggggtaatggactggggataatgaagagcagagcttggcggaacagattgctgcaactgatatgcagcattcagtggaatagattgagaataatgaagcgatgagcttggtggaatagactcagactgttgagcagacgtttgttggaaaccattcaccattaactgtgatgcgccgactccaacaacatctccagcaatggtattgatcccctcagtgttccgcacatcaagctcagctaagttgtttgctgaagagctgtcaagcccaagaagggtcgagttctttcctgatccaatgtccatgccatttacagctacaacatattgaaactcagagtcgccgtcatttttgttaacccccagaagagcatcatccatatcactgatggagaaaagaaacatcctaagcttctgagatcccccacggttttccatctcattatattcttccagcatattctggagatcttcttcagatgatacagacaccaacgcgtcaagatcttcaccaggaagctgatactttacaacacgtgtttggtaatagatttcaaggattttttgcctaagctcctgccaagatatatcctttcttatggatataatgtgtgtttcacctccaacgtatcgaagctttgaatcacctggacgtggaagtattttcccaccgaaactgcaaaggatcttcacctttgctgttacactacctgaggctgaagaagacgtgttcttgtatccatgtaaatttcctacactgctatctttacttagtaaagcttgtggtgctgactggacatgatttagtttatttccaaactcgtgaagcgaagagttagtcctctcaatatcactggtgccattttccacagtgctgaaccttgagacatctgaagcacactcagatcctgtgtgacttatccctatcaagcctcgaagctccatataaccagtgttatagttcatgtcgccagctccattgggattggaagacctctgaggaatcacccgatcacgcataaactcaagagagaattcctcacctgtttgtatggagaagttatgcaccgccttaacatctgaaccattagaattgggaggtcgcatattagcactcgcgctccctgtttgatcaggcataaatggttgaggaacagtctcgtttctataaccannnnnnnnnnnnnnnnnnnnnnnnnnntgatgtctagctttatccatcacaaaacaaaacagcccttcaaattactctaattcaaacacatgtatgacgaatctaaccaaaactagtactccttcaagatgctggtgatgccgttaaacattaagctgcaatgaaaagtataaggatattagttttaagtcccatggcaagaacaaaagatgacaacgcagcgaaacgcagacatcgaaaggaaaagggaaaatttcacatgcttcgatttcttcagatagcggaatctcttatgtgaatgatagtgagaataaaattctcaacgagaatatgatttaca

SEQ ID NO: 31519 - DNA, 915 bp, Arabidopsis thaliana landsberg
taattattttgttcaatttacatatgctcctcttggttccttgttttggtcattttccgttgttttttttgttttttttttggtttttttctattcctatttctattgttgataatatggtcatcaattgcaacctataaattaaaaataagaaattatacttatctacatatacatttttgcagtcattttgtgaaataaattctgtagttgagacttatttacaatagcagccactggattttaatgtttgttttgataattataaagaaaatctttgaattaaatatttgacaatcttcccaaaatctctccactttaactatacgattatttactaaaataaaacttccaaaatatttaatatcatttaattattacaaaattatcatttttaatattacttttctccataactataacaattcgattataatcatcaaagcgtagagatataatttgatagcatttaattactataaaattacaaaatatttagacaatgattcataaacatatcataaataagatcaacattaataaaataaatgagtttttttacgggacgggtttgacaggacgttatttaataatatttgtaaactataaaataaaaatattttataaatagatacaatttgtaaacttttatatatactaactttaaaaaataaattgttcccgcggtacaccgcaaattaaaatctagtctttcacataaatgcatccgacggacccaacatatcttagtgttcgaccattacatgaataaagttccccgatatcttttttttcttctcaattagatcacaaatacgtgtgaatatgtagtaatactataagtagattaaaggttatattaaacatatcctgatttttttagaaaaagaggataataaattaaaggtctcgagt

SEQ ID NO: 31520 - DNA, 3657 bp, Arabidopsis thaliana landsberg
taccgtccttgagtttcatttaatttttttgtgatggatattgtaaaaagtagtttgtaagcttgctaataatgcatccaaaaaggatatgtgacatgattaacaaaatttgatacaattgatttgtgataatgaaaacaaaaatacaactaaaagctccataaaccttgccttaagataatgacaacgaaaataaaagctagtttactgtctcggttgattcgttgatcccaagttctcctttatcttagagcaaccataccactagacaaacgagaattaatttttttactaaaaatggttcaaaaaaggtttatttagtggctctaattgtttcgttaatctaaactatacacgctttatctagttttcagataatcttatttcaaattaagaattaagaaaatagtatagagataaatctaattgttaaaaatggattatagtacatactaattatttgttaaaaaaaaagcatcgagtatatccgaatctgtggtccgaagttgggacaagctgacataagatctagctgtctttagccatcagatccgacttagttcccaatcatatactgccacgtcatcttcttccaaactcaaaacagagcatcgaagcactctttcgcggcgccttgtatctgtttttctcccacctctcaggcgggtccctaaccccttatccgggtcttacttaagccttcaatttttctgactatatatatcccttccacttatttctattttcttcatcgaaacaaaaaataattaagagagaaaaaaacaaaaaacatttccatatctctctctctctctctctcgcctgcttcaagaaatggatcggcaaagttccgatgacatcatgaaatttctcgacggcatggctagctccgacgatgttctttttggcttcctcgacgaaggaaaccagtcactggaggatttctccgtaaacctcaacgccggcgaagatgacggcgacgaagacgacaataataacaattctgaagataacaaagctttttggcaggaacacgaacaacttcttcaggtaattttttctcaaatataaaatctattatcaaaacaaaattatttgtcatttttagccaaataatttggtgtctaaatttgttatattattttgaattgtgtaggggacactgtataggacaagttccattgagacaaagattagacaagctacaaaagaagcgttgaaacaagttaaatctaagggtctttattgtgtttgccggcgaccagtggacggcggttgccggagttgcttacgtggcgaaatctctagacacctaagagatgtcgccggctacgattgcgtcatctctaaatctaaatggagaagttgtcaagacatccctgcaggtacaaactaactagctcatatatttttatattcattattattaaaagactggttctgaaatattcagccatcgttatcatttctcaaatggaagataattatttttaaattggacaaatattattatgtccacaagaacacgaaagacttttttagacccattcttttatttgttacttgtggatcaagcaatatcagattttgtcatcacatttaagtcatgattttatctagcacctaaatgattttttgttcttgttctctctacctatatatgtgaatgtttggactaactcatattttattttaattaatatcaggggaacacgaatttatagagattgtggaccgatcgggttcaaagaaaaagccagatgcgagtggtgattgagttatcatttagggcagagtttgagattgcaaaaggcagtgaagagtacaaaaagactaatcagtcgattgccctgaggtttacgtcgggaaaaccgagaggcttcgatctctgataaagatattgtgcatcgcgggcaaagaaatgcttgagagacaagaaaatgcatatggctccttggagaaaacacaagtacatgcaagccaagtggcttggcacatgtgatcgatctagctccttggaagcttcggtttccgaggccatggagccagaaaattgggtgccggtggcgaagcctagggtttctatgttgaactatgatggtctcttaggtggtttctctgccggtccggccactgtagcggtcgtgtgatatttttgtactatgtttttttgatgacttgtaattattaagtgattagggtgagtcatgagtgttaattatggtttctgatttgaacttagcaagaaatggtctcagcggctgtgattcgagcctctacattgtgtagtaagggacgaagatgctgttttgtgtcattggtgctggaagaaattagacatttgtgatttttttttatattgactgtatacgagtgattaacattaaaatttaacagaaataatatacattttgagtttcgagttatctgaaagttttatacataactaaagtaaaaaaagaaaaattgatttgtaagaaaaaaaaaacaataagagcaatacgaaaaacggtagaagtatatgataatcgttttgttttttgtatcactagctagtttttttaaaaatatggtaaattttatattcttgccctcccagttaccaccaatcaaaaaccaagaaatatcaaatatcgccatatatactaattaacaaaaatactaaaccgtattaaactggatttgagttcgggagatataggttaagaagtaattttgcggggacattggaacgtggtcatatattgagctttatctgatgtgatgttatagtttatgggctttctaagcccattccaactctcatttagtatgatattattttctctgggcttatatgttcaagcctgcaagaatttgttatttggttccttcccaaaagacctcatactagttagagttggacttgacttatatattagaaactctttttctaaacttccaatgtgggacctttggtttgtacccaacaatctccccttcaaaccaaagaccacgaacttgggcctcttttttgaggcacattcttatcgtgtcatgtttgagagattttcccacaccgatcatagcccaagtcctaggtccactttttcaaactaggctctaataccatttaatgggctttctaagcccatttcaactcctatttagtgtgatattgtcctttttgagcttatatgttcaagcccgcaaggatttgttattgggttccttcccaaaaggtctcatactagttggagttggacttgacttatatattagaaactctttttctaaacttccgatgtgggaactttgatttgtacccaacaatagttttcgagaaaaaatatatcgttttctcatcttattttttgcttttatatatatatatatatatatatatatatatatatattgatgaaattttaaatttatagatcaagagatcaagcgtttatgtacaatggagagaaaccaatttgaaaaggaaaactaaagcaaaacaaaaattaatggattccccaagcttgaaaccatctctggagaagtaatgtcaatcatgggacgtcttgatatctaagtgatatcacacgttgtcaaattgttttctctgttacgtgagtcaaccaaccaaccgtgcgatgagaagtaccaggtttcgttcgtttctggccc

SEQ ID NO: 31521 - DNA, 2203 bp, Arabidopsis thaliana landsberg
ttcttaatcaaagttacctgcggcgatcatgatccctcggtctttccctagaccgggaccgtgaactgcgccggcttcttgagtcatagccacgtgactggttatagtttctgtcatgttctcggtggtcatggtgcctgtcacgatctctactcctgcggtcaacatctcttcctcggtcacggctatctcctccgtctctgtctttacttgattctcgctctctactcctctcctttgatctgagattggtttaggttttcagcaaaaatgttgaagattaaaggaagtaaacaaacaatgtgttcaaatgcttgagaaaaataaacctcctttcttcgacccgttccttgtgaactttgttcttctcctcctgaagaagacagagagaatataactatacagtctatatcaagagagaaaaggaaaatcactagaaagattctactgtatattacctgaagctctgccaatttgtcgcggatcagcatgtaacccaagtgaagcttccctccaaaatgatcagctaaccgacgatcactaaaggcagtacaacagatttttgacattgccaaatgcaaataacagattggtgacaaagatatagtttaaagttccattatttatctctaacaggcacaataaatcaagaaagaacgcacatttattagctgcaaaagtaatcctcgtaaaactgggcccaaatagcctgctggtgaaaaggaggtacaatagccggggtcaaataatgaaccacttgcaacccaataatctatttctagctttcttatgaaacgccacggaaccataaaacataaacaaatttaagtaattaaagttaacctgtcatagacgctcaaaaatgctccgcatatgtcacatagacgcagcttctggtctgtctgagacaataagagaagagagaatgaggactaccaaccaacacagtgacaaaaaatatacagcgagcagagatgagaaaatggtatatacttcacttcaaaagcaatttctgtttacgctgtttgacaattgagaacactgaatacatgcttcaaccaaagcattttaattgtcctcaaactttataagccattacttctttttggatactaggattaggactatcttccttaaattctaatgttcatcagactaaacaaactatataagataataacctaagaattaagaatcttgagggcctctatgagaaatggatttcaatatattatcatgtcggagataaggtgatataaatgatgatcttgacttacaatgcgcacgtcagcagcagtgtacttggttgaatccactacaggttcttgtctagcagtaagctgaaacatgtacaggcacaacactcttaggaactaataaaagtaggggaaaatattatacaataagtgagtagggagagacataaggaacatgcagaactattcaagcaaattaaccaccaagacaaagagagatccctgtgtcaatagacttcattaacatctccaaatcttataaagtatgaagtaacttggaaacaagaacgaaacagaaaactaatttacgaaagaaaacaaaccttcttaagagcttccgcctcttctagtgctttctgcgcttcatcaaccatcccttgttcacctgaaataaacgtacagatatcataactgtactgtggctgtttccaacattgaaaaagttcagtttttatgtatgtatgtaaccataaactgtcttcttctaacattgcctatcccaaaggtttcctaagctcagttttgtacattcataaagaatcaattaataggccaattaaatttttagatcagccaccagaaacttccccgttggcaaagaagttgaatgtaaaaatgataagaattatcaaaagtacagaaaccacaattttgcaccactgaaacggtaacttaaagagctaccgattcaatatcaccacatataacaaaacagatacgaataagaggtttgctccttaccaagctcttctgctttctttagtttttcattgatcatttcttgagtacgaggatcgggcggaggtaaagttgcagctggttgctgagctggaacggcctgttgcaaggatgtcctatctttgttaaaggcatccaacagtagcacagcctgtaggtaaacaagacaaaagacttgactgttaacaatgtaccaggcgcagcagcaa

SEQ ID NO: 31522 - DNA, 3549 bp, Arabidopsis thaliana landsberg
  unsure (1)..(3549): unsure at all n locations
tctcaacacgatttagatatagaaaggcaatgagatagataactaggacagaggacagaaactatagtcaacttcgatcaaatcccgattctttaatgataatagtatttttttttaaaatatccgtatttatgcattagatgatttactttctcgaaacagttgtcataattatataaaaaaagaagaagatacaacagtgtcactgagattcgaaaaagaagccctacggtacgatctacgagttttctcttaaaagtgctaacttcccttgggatccgacggctgcgatccatcttactacattcaattttgaccgttagatcttgttttgtttcataacgttacactctgttactgacgtgtcttgttgtacgaccgtcgatccggttaaactcacaagatttctttttaccggcccattacgtggccactgtgccacgtgttgtgtagaattttgaatctgaatgaatactttatgagtttattttacactattgtgcttctactttagtgatattacaaaactgccaggcatagagagagcctgtgtgagtcgcgtgagctatctatgcctttggcccacttctttacgtccatttgctctatttaataaattcattaaattgtttcttttttctttctttttttctggaataggaataaactaaaactcttacctaatactataacaatataattatttgaacatgttgcttcacatgacaaatgattcattattctcgtcgtatttgaccacaacatttttaattatgttaacaagtaacaaccatgaggggatgcatgaattgaatatcctttaactggtggtgttatcggacaaacaataatttgaatttaatttggccatgtgatgtcttgtttacactactcatcgttattttaagatgggacattaaatgcgaaaatctactcttgtcttcctctctcacacaaacaaacccaaaggacactntattcattataaagataaacgaaaataaaaagtacacatgcaaatgtaaatgattagataaaggcatagatatattcataacctttcaaccttatgagttatcatgaaagaccatatacagtactataatacaaaaatatgttaactttttcgttgtcaacaaatcatgaatttgtaaattacttgttgacaagaatgggtttgtgcgtcttgaattgcaaaaaaaattgaagaccctctttagtttcattaaaagaaggcctaataattaccaatttcgagtagtcttattaaagcccaattaataaattaaaggcccaaaattaaaagcagtattttacatacacatcgtgagtctattcctccgacgaccaaaccgtgctcctcgctgtgactggtaataacacaaaatacctggagaaatagattatccatagaaagcgaaagcgaaagagagagagagagagtgtgtgtgtaagaatatggcaagtatagagcaagtagctgagctgatatcatcgctggagcaagcaactttaatggcacagcaaatcggaaccaccgttggacagaaccagttactccaaatttcctctctccgcatagcccaccaacgcctctctgccttcctagcctccataccaacggcggaagctgagaaatctttctcctccgtggagccgatgcaattaggagaagaagagaaaggagaggctgagcctgctgaagaggagagatactcggcgatagagaaggtggaggagaagatgagagagtgtttcattagaaacaagagactcaagcggccactgtctccctcgtcggctgtggtggagacttcggcgacggaagagaggagtggccgtgattatgggtttgattccgacccacatgccaccaagttgagagctttggatcttatctaccagtttcatgcttgattttataaattgtagatttccagtagagagattcttttgtgattgtaaagactatttgtcggtttggtattacaaaatcaacaatttacaaagatcatctcatagacagaaaaattctaacaataacaaaccagattgggactgtattctacttactccctgattcctgactgtatggatattggtcacattcgtctttcggcaatcaacagcttgcactgcaacgttgtatcttcctcgtcttgttgccgtcactgttctgttttcaggtggcttcgtataactctaaagccgacaaaacatggatactgatggtccttctcgttggtcttattctctggcgattacgttatgcaacttgacaaagtcatccaaggtaagctcttcaggccttgactgcagcaaggtagtagaacaaatatatatgactcaaggttacaagaatcgtttctctaagaagccggtttcaagataggaaattcctcttatggacttgtggtaattgatatgatcttagaacgagctaagattctcgtgtaaactgctgctacccaagacctcatataagacatgagagagattactcacagtggctggaagaccagcaactcctagtgctttttcgatatcaggagatgatgatatgtgctggagggactttctcaacattttcctcttcccattgaatgcagaattcacctgcttaggaattcgattcagatgttttcttgttaaaaatctaagaaatagtctgaagcaagttttagctaccaaagagaagaaatttttggtggaggaaacatcaggatagtccctcggatgcttcagcttgaatgttacgacagcagcatcaacctgtaaagaagcataatcatatttctgtaatggtatcaaaatttagttatgatgaaagtttgaagaatcaaaaccttgggctgagggaagaagttttccctaggaactctgaaattgtattccggttcttgaaacaaaggagcaaaactacattgacgaattgcaatacatataaagagttaaaatgtcaataatggaacaagtacgtaccagaatagaagttgatcaaaatgttgatgggacggtattcagatgttcgcagtgctggttcaaccaatcgcaatgctgcctcgtcctaagattagccaaatgttttttgtcacaattgaatatataagcatttgggatcataatactctaaaaacaagtaatgaatggttaacctggagtaagagaacaacttttgagaagatatcacccataggaagtagaagcttcacaacatcagtacttatattgaaaggtaaattggaaacaacctgcattaacatacaattccattgtgtaaataatgaattgagaaagatgtggttcctggtgctgagttagtaataaaatgtaccaaaagagaaactagagtgacctttgcaagagcagaatctggatgtgataaccttctagtctctaaaatggagagcatgtgagaacggatgtgacacttgacaaaatcctcttgcaaaaccttgaacttgtcagaaccagcaaatcgttcgctcaccaaatcaaccatatgaggatcctaaaagatgaagttgcaaaatcagaatcgaccattgt

SEQ ID NO: 31523 - DNA, 2239 bp, Arabidopsis thaliana landsberg
tggactcgacagctcttctgcaaacaatttagctgagctggatgtcaggaacaccgatggctatcaatggtgttggcccttcgcagttgacagggatagattttcaacaatcctctatgcagtattctgagtctgctccaccaacctcctttgctcagtatcctcaatctatcccacacaatggtgcatttcagtttcagcaagctgttcccccaaatgctactcttcagtatgccccgtccaatccaccaagttcgtctgtccactatcctcaatctattctaccaaattccactctccagtatccacaatcgatcccatccagctcgtatggattatacccacaatattatggagaaaccgagcaatttccaatgcagtatcatgatcacaattcttataattactctattcccatacctttcccagggcagccataccctcaccctggcatcacacagcaaaacgcaccagttcaggtagaggagccaaacataaaacctgagacgaaagttcgtgattatgtggagcctgaaaatcgtcatattctggcaactaatcaccagaatacccctcaagctgatgatactgaggttaagaatcgggagccatcagttgcaacaactgtacccagccaggatgctgcacatatgttgcccccaagaagagacacacggcagaacactcctgtgaagccttctacttaccgtgatgctgttataactgagcaggtcccagtatccggtgaagatgatcagctttcaacatcaagtggtacctgtggtcttgttcataccgactctgagtcgaatctaattgatcttgattatccagaacctttacagcccacccggagagtatatcgttcggagaggatacctcgtgaacagttagaaatgctaaatcgcttgtccaagtctgatgactcacttggttctcagttcttaatgtctcatccacaagctagcactggacagcaagaaccagcaaaagaagcagcaggtatatcacatgaagattcacatattgtaaatgatgtggaaaacatctctggaaatgtagtggcatcaaatgaaaccttggacaaaagaacggtctctggtggaggtattgagacggaagctcgtaacttgagccatgtagacacagaaaggagtcatgatatccctgaaaagcaaacttcttcaggtgttcttattgatatcaatgacaggttccctcaggacttcctttctgaaatattcgcaaaggcactctctgatgatatgccgtcaggtgccaatccatatcagcatgatggagctggtgttagcttgaatgtagagaatcatgatcctaaaaattggtcttattttcggaatctggccgatgaacagtttagcgatagggatgttgcttatattgaccgaacccctggctttccatctgacatggaagatggtggagaaattgccagattgcatcaggttgctccgttgacagaaaaccgtgtggatcctcagatgaaggtcacagagagtgaggaatttgatgctatggttgagaatttaaggacctcagactgtgaacaagaggtataagtttctggtatatttgattttacgattccaaaaccatgagtatactaatgaggatggacttagtaggatgaaaagtcagaaacaaggaacgctggacttcccccagttggcccgtctctggcagattacgacacgagtggcttgcaggtatgatggactataaattcttacacctgatagaagttttatttattctgcattagataaaggattgtaagtttcagattgttagaagaatcaaacatagtatagcccttgtttgtcatataaaataaatgtctgcttctaatctcctcttgtgatctttctattcttaaatgtttctagatcattatgaatgacgatctcgaggagctaaaggagcttggttctggcacattcggtacagtgtatcatggtaaatggagaggatcagatgttgccatcaaaaggataaagaagagttgctttgctggccgatcatctgagcaagaaagattagtgagtgtttctgcattttcttttggaaaattttcctttgtgcatatgttaaaaggattagagagtgataatacttgtcgattgctcatcatggaaagattatgactacctttcttgttcgctagactggtgaattaaaggaagaagctgaaattctttcaaagcttcatcatcccaat

SEQ ID NO: 31524 - DNA, 1576 bp, Arabidopsis thaliana landsberg
agacaacgccgtagaagaggcgatgcagttgttttggaagtaatacgctactctctacttcagaatgtacatcaactatttacgaatttatagtcctagatttattttgtatcaaagaaactaaaatttagccagaggtatattagagaataattattttcatattagcagtttttagctacaaattaaagccatatcagtatactagtttcccacagagaaaacaacaaataaaactgctaaaaaggcagctttagaaagagtagaccatgggataccatattttcccttctcaaacataccctttagaaatggaagaaacaatataaccaccaaaatacatccacaagcttctgctaaacccgaaccaccttctctgtgacgttgtagacccaccgaacaaccggctagagcggctagattcactaaaaggataaatgtgccaggcaagaaataaagcgagccatcaaattcaaatttaccggaatcttggtttggacaatcaacttctcgttgagatttttcggatccagatcctgacattgtcttgggcatagtctttttagtgactatgaaaacagttttcgagattccaagtagcttgagtatgatatcagggatgctaaataaccaactgcaagtggtttttatcctccaaaatgattgggaggcaaaccacgattgtactgagaaaccaaggctcataaattcccatagagagtaaagacaatgcattcccacaagtgtgacgactatacctaaataaactccctagagccataaacaaaataaaacattagacatttcccttttaatcaattatatgaaataaatagaaactatactaatgagaaaatgatacaaattaagaatttagtggttgtgctagttcagtcaccatgtcataatccaaattgagtttcggtaatttgttgaagttgaagagacagaaagaactaagagagagtcaccttgggaaataaggcaacgttgtggagtaggcaataagcaggcaagagacaataaataagctcagggattgaccttagaccccaagtgaaaatgtataaataagccaagctttgtcgaaatcttattttcctacaaaacattccgatcaacggactttgtttgttgaaaaggacttcgagcagtcctgtggcccatcgccgctgctggagcatcgcttccggacctcccggtggcatagccccaagaaacgctggtggtttcggagatatatatgagctagtccaccctctcgaatggattccgatactcgtgtttgcatcttccgctgttgattcgtataaccaaccaatctgcaggattttatgcattacaaatgacattactatgaataagaagaaaatttgagtttagattaatagtctactgtgatatagtttaaatctaattacagttttgccccagctagtttggtactcaaaatgacaatgtcccacttcttgagccgcttcgagggagtttgcaagggtattttgcggatttggttttctttgtaatgcctcgaccaccgatgtcaccatctcttttgaattcccaaatccacttg

SEQ ID NO: 31525 - DNA, 1421 bp, Arabidopsis thaliana landsberg
tctacgcacaaaatgtaaatttgatgtggcgtgaaatggctaaagcaagcaaaagaaaggcaaagccagatacatctagaagacaagacgatgagtctgtattgcctatttttcaacgtgactctgttgacaatgattctaaatcgacgaaaaaagaaaaagaaaaaaacaattttgctacaagaaagatggtttggtttggtattaaagcagcaaattgtgcgactgttgaaatgtgcagacttttgttttttttaatcttttagaagagtaaactgtacagggaaagagaaagagtctgtttcctccatttaaacgagacactctttgtactcgagatcactttttaaattacttctgagcactgatactttttgattgatcaactaaacccaaattatcttcgcttctggataaagggtatttatgtcaattaactttgttcttataagatgatgatgcgaagacactgagagaagctaagacaaagcgcagaaaatggtgggagcgactgtagttagtaaatggactcccctatgtgtggcttcgccgccggagagaaactcggcaagtctcaatccacactgttctccagccagggttaattttagaacagcgttggccgcatttcgtcctcagttccgtcttttctctcgcaattccgcgtctcgccgccgtcttcgcgcttccagctccgccgaatcgggaatcttccttcctcaccttgtagcttctatggtttgtgtgcttcccctccatttatgcgaattactttgttttcttagtacttacattgattaaactccgaaatcaggaatttaggattcaaattagtttggatatattctaatttgatgaatctcaatgcaatttagtgaccttttgattgttcttacgttgttttctgtattgtttcaggaggacgttgaggagacttacattatggtgaaacctgatggcatacaacgaggccttgtaagcgtttttgcttttcattttttttcttcttctgattttgaggttaaattatgtatcttggaactctatggagctttgaatgttatttcattacactatcttggcttaaattatgaatgtatgattcatttgatgtttttaggaaggagaaatcatttttcgctttgaaaaaaagggggttaaacttatggggttcaagatgtttcagtgtccaaaagaattgcctgaggtttgcccctctctcaaaacatcagtagtttgataactttagattgcttctttaatgtgatataactaataaatcattgccaagtatcgagaaattgaagcctgatcatgacttgcatatttcacttattcgccacatttgcgtaagatgacgctgcctcatttttttttcacattcgattgacataattaatattcttgtgtgtttatctcaa

SEQ ID NO: 31526 - DNA, 3050 bp, Arabidopsis thaliana landsberg
cttcttgattggaagacccggtttaacataatcaatggaatatgtagaggtcttctgtaccttcacagagattctaggctgagaatcattcacagagacctgaaagctagtaacatcttgttagatgagaatctgattccgaaaatatctgatttcgggttggccagaatttttccagggaatgaagatgaagcaaataccagaagggtcgttggaacatagtaagtaactccattcaaccatatgttacatctttttttccattaagatagtcctaaaacagagaaaatgtatcgtgcagtggctatatggcacctgaatatgcaatgggaggactgttttcagagaaatctgacgttttcagcttaggagtgatactcttagagattatcagtggaagaagaaactcaaattcgactcttttagcttatgtgagtctaccttaactctactaagtttcttaactctcttgaatttttctcaagccctaagagctcctctgttttataggtatggtcaatctggaacgaaggggagattaatagtctggtagatcctgagatctttgacctactctttgagaaagaaatacacaaatgcattcacattgggcttttgtgtgtgcaagaagctgctaacgataggccaagtgtttctacagtgtgttcgatgctcagcagcgagattgcagatattccagaaccaaaacagcctgcttttatatcaaggaacaatgttccagaagctgagtcctctgagaacagtgaccttaaagactctatcaacaatgtcaccatcaccgatgttacaggacgttagaacctgcagaaaccaaaatgtatgtgtaattcgcaaaactctttaagcattacaagagattatatcatctatctatatagatagtaatgtctcatacatctagtaatgtaaaagaaattatgtttatataacaaatcaagaaactcttatatgcttttgctaatccttgtagatgcaagaaccagcttcttttctgaacattaccacttgacttgacttttcactatatcaatatttgacttttcttttgagaatttaattctcaccacaccatcagctaccaatgtttaatgctacattcaattctgagatcttgctacttagttcttgttgagtttggtctttttaggaaaggatattacaaagcaaaagctatatctaaaattgagtagtttttcgtcttgagaggctgggactaaaagatatgagacttcatgagagcttgagtcctattgttcatgttctttcactgtcttgcttctttttaagcgtctctctagctcatgaaagagctttattttctggcacgctcaatgattccgagacgatagtctccagcttccgaacgttcaggttcggtttcttcagccctgttaattccaccaatcgatatgctggtatatggtataacagcattcctgtacaaactgtgatatgggttgctaacaaagatacgccgatcaatgactcctctggagtgatttcaatatctgaagatggaaatctggtagttactgatggtcagaggcgtgttttgtggtcaactaacgtttctactcgagccagtgccaattctactgtcgctgagcttttggagtccgggaacctcgtgctaaaagatgccaataccgatgcatatctttgggagagcttcaagtatcctactgattcttggttgccaaatatgttggttgggacaaacgcaagaaccggaggaggaaacatcacaataacttcttggacaaacccttcggatccttcgccggggagctacactgctgcactcgttcttgctccatatccagagctttttattttcaacaataatgacaacaatgctacggtgtggcgcagtggcccttggaacggactgatgtttaacggtttaccagatgtatatccggggctctttctttatagatttaaagttaatgatgacaccaatggttcagccaccatgtcatatgctaatgattcaactttgagacacctctacttggattatagaggatttgctatccggagagattggagtgaggctaggagaaactggacgttagggtcacaagttccggcaaccgagtgtgacatttacagccgatgtggtcaatacactacctgcaatcctcggaaaaacccgcattgttcttgcattaaagggtttaggccaaggaaccttatagagtggaacaatggaaactggagtggtggatgcataagaaagctccctttgcagtgtgaaagacagaacaataaggggagtgctgataggtttttgaagctgcagcgaatgaaaatgcctgactttgcaagaagatccgaagccagcgaaccagaatgctttatgacttgtttgcagtcatgttcttgtatagcttttgctcatggattaggatatggctgcatgatttggaatagaagcttagttgattcacaggtgttgtctgctagtggaatggatctttctatccgtcttgcacattcagaattcagttaagtattattccaaaccttttctcataatcatacttaagtgattgcagtttcactaattctgctatttcttgccaactctctattagaaacacaggacaggcgacctattttgatcggtacatcattggcaggagtcatttttgttgtggcgacttgtgtccttctggcacgacgtattgtcatgaagaaaagaggtcagagttatactaaattatctttgcttcttctaaccattggagtttttagttttaataataccttggattcggtctcagctaaaaagaaaggaacagatgcagagcaaatttttaagagagtagaagctttagctggtggtagtagagaaaagttgaaagagctacctttgtttgagtttcaagtgttagctactgcaaccgataacttcttttttagcaataagctcggacaaggcggtattggtcccgtttacaaggtaagtatgactgggtaagggttttggcaacaagccaaccagaattatgtttgacatattt

SEQ ID NO: 31527 - DNA, 2767 bp, Arabidopsis thaliana landsberg
  unsure (1)..(2767): unsure at all n locations
agaaacgcccaatttttcatactcgaactacacaatttagaagtaagggagccgaccacaattgcttccttacacgttaagtccaagctctctcgatgcatgaaaatcccacgtggcatggttcctcaatagaacgatcttattagatacgtgtcgggcgaaatgatatttggaagataagttggaaaataagaaaaatgcgtaccagaacacacgtggcaggttttgctttatcaaagtcatgacgtggcatctcattggaaccaaaacacttgctataaaaacaacaagcagctctaaatgcttcattaacacgacgagtattcggcaaagtttaaagaatcaatcttaaatctttacttggaacccaagcaaacaagaaacaaatcatggcatcaggacaacgagaggcagagaggtccgccaaggccgagagagctgaggctgcagcgagtctagcggctgaagatttgaaagatatcaacaaaggtgatgtgacgtacaaattaacggagaggacaacgacgaccgagcctgagaggcctggcctgataggctcggtgatgaaggcggtgcaaggaactaaagacgcagtcatcggtaaaagtcatgatacggctgagtcaacgagggagggagccgatattgcatcggagaaggcagcggggatgagagannnnnnnnnnnnnnnnnnnnncagtactgtgcagaagactaaggaaactgcagattacacggccgataaggcaagagaagctaaagataagactgcggacaagactaaggaaaccgcagattacgcggcagagaaggcaagagaagctaaagatagaacggcagacaagactaaggaaacggcagaatacacggcggagaaggcaagagaagctaaagataaaacggcggataagttgggtgaatataaagattacacggcagagaaggcaaaggaagccaaagacacgacggcggagaagctgggtgagtacaaagactacacggtggataaggcgaaagaagctaaggataagacggcagagaaagcaaaggaaaccgcggaatacacctcggataaggcgagggaaacaaaagataagacagctgagaaagtgggcgaatataaagactacacggcggagaaagcaaaggaaactgcggataaggcgagggaagcaaaagataagacagctgagaaagtgggagaatataaagactacacggcagagaaggcgacagaaacgaaagatgcaggtgtgagtaagatcggagaactgaaggatagtgcagtggacactgctaaaagagctatgggtttcttgtcgggcaagacagaggaaaccaaacaaaaagccgttgagaccaaagacacggccaaggtaatataactagcagagtattcaatgtgtttatatatgctttgttggctattatatgatgttcgtccttaattaataggaaaagatggacgaggcgggagaagaagcaaggcggaagatggaagagatgagacttgagggcaaagaacttgacgaggatgcttctagaaagacacaacagagtaccgaatctgctgctgacaaagctcacgagactaaagattccgtagcccaaaggtatatgacatgatgtcctgaaagcgatttaacccaatggtcggaattagtggatgtgttgataatagttgttggaattattgtttgcagaggtgaagaagggaagggaagtataatgggtgcgttggggaacatgactggagctataaagagcaagctgactggtgctacgacgccctctgatgaggagacgcgcgcgtcggcccatggagacgagagcacagggaagacagttgtggcggttgacgtgaaagatactaggcctggatacgtggcgacggtactgaaagaggcggatcagatgaccggtcaaactttcaatgacgttggagagatcgatgacgaggagaaagtgagaatcgtcgtgggagagaaaaagctgtagtaaaattagaactatacgttttgtggttttctgtaaaacgatgataacaagtttttcgtttctctctgttatgttatgtctttgttcaatcttgacttgtaataaaactacttctggtttgcatattcgattttgattttcgttgttgtgaataataattctacttaatggcgttataacactagcactaaaccggaaactggacttgcacacagatttaggaacaaagaagcagtcaggagtcggaaacagagtcggtggttttataagatcatattactaaaaatcaaatatatggtaaatgtgaataattggtattggattcgtagaagtacacaaacaagataccactctacgtatatgaaaatgttctttctattaaacagcttgagtggtacacagatctcagatatcgaacagacatatctcaggagtcaaattgctagcttaaagagtggaggagctttggctcatacctggtttagagtctaaggatgatataacaacgtttcccattttaacttccacagcttcttgctcctcattctccctcttgttcttctctgtatcgagcttatctgaattttcgtctttaagcgaaggttttatagagcggggaccagagttgatccaaggatgtaacagacactgagctgcagttggtcgtttctctgggacgaaatcacgaatcgaaacaagaaaatcactcaggtcatttgcatcttgctcactgaactcgtacttctcggtcagcactttgttcatgggc

SEQ ID NO: 31528 - DNA, 868 bp, Arabidopsis thaliana landsberg
cccggtttcttgtggcacacaggcaccgagtaaatataagaaatatccttataacttaatatagaactcgtgtctctaaaattttgtgaataaaacaaaaggttttgttggttgtgatgaggggagctcaaagcatgctgacccgtcctgcactaagcatatcttcttggtcatgtatgggaccccggcgcagagcctctgctactcagtcaatctcggaacatcagttagatacttctgaagcaatgtcccaagatatacccgaaacttcggatcctcttcttgttacggatgaagaaatcaccgggaaatggaaatcagaagccgagtgttctaattacgaggaaacatcacctcgtctcggagccactgatcttgacgagtgtgaggatccagcggaaatggacacacgggaagagcggatgactgaagctgagctatggcagcaactggagcatgacctttaccacgattcttcggagcaacctgaagaaaccgatgtggcaaaagaaataaaagaagaagaagaagccgtcattgcagaggccggtgtggccccgccggagagccagacggccgagatgaaagaatcccgcagattcctcccagcgggtaaaatcatgcatattgtcacggtgcggcccgaggtcgtagagcctaacgaagaagaagacgaagatggttctgccctcgagaggcctgagacagtggagacggtggaggagggtagagtaggaatatttctgacgccgaggtcattgatttagtaggggagggtttcgcagaggatgataagcgatcatttcatgcctgtttacaggcgacagatcgaacggctaatacaagagctaacagtgggaacaacatc

SEQ ID NO: 31529 - DNA, 5621 bp, Arabidopsis thaliana landsberg
agttgatccataatgctattctcctttttccttatccttattataaaggagttagaagtttatcttattatgcttgatgtttctgtgtgcttgtgttacatatttgttaaatctttttatccgatcgagaactcgtttaaatctcggatttaggtttattagcaaagtaatcggaaacaaagtccttatatgtaatgatctttgaagcctaatttggccgaaaaaaacaaagtaatagaactcttatagaagtcaagaagatttagaaacacgagacagatgacaaagcacataacctaattgcatcaaatatgtgatgttcttgtggactttaatgttgactttatcctttgatcccatcaaaaacaaacttgagatttcactatcttagcggtaaacttaaccaaagcccaccaagcccataatcggcccaagttatataagttacagaaaggtttatattagggtttcgtagacctgcgttaattttgtcctctcgctgtgccgtctccaactccatttcgaagagagagagcgaggcccgagagatcgaagcaaaatggagaaaggaaagggaagaaaagaggaggtcgtgaccagggagtacactatcaatctccacaggcgcctccatagctggtaaaacctaaaccttcaatacttttatgttcattctctcgtttccgtttggttaagttcgttctaggtttagttgataacaattagactgaaattgcaacttctgttgattgaaattaggtttcttgatgaatgaagagtaataacttttgaattagtctttagatgagtaacgatcataaacatccccttgcatttttcagtaaattagtaaaaagacagagaaattggatcccttttattgcatagaaaggttggcttgttgcttaggtgcattttccattggagcttttttcgttgtcacaattgatcttagtggttttgattgttttctaaattgaacagcaccttcaagaagaaggcacccaatgccattaaagagatcaggaagtttgcattgaaagcaatgggaacaaaggacgttagagtggatgttaaactcaacaagcagatatggagcaaaggtatccgaggtcccccgcggagaatcagagtccgtgttgcccgtaagagaaacgatgatgaagatgccaaggaagagttcttctctctcgtcactgtcgctgagattccggctgaaggattatctggtttgggtactaaggtcattgaagaagaggagtgaaaattggtgaatgtacactcacacaatccttatctttagatgaaagacgaaaagaaaaagactttgcttgttttgatcacttacctattttggtcatttatcatatcttatgttttaagttctatagacaacagatttggtactactcatacgagtttgatctttttgtgacgcactttacttcgcaatcatctttctgattctgtaccagaccggtttattgtctgggttgaagtgtaacgaattggtttgatactccacattgttaggttggtggagtttatcataactactaaaagggtagataatccgaaagtccatataaaatcaatgagtattacaaattttgaaggaaaaaatatttacttatgttctttgttctaaatcaaattaatccgcaacttttgactgaagtttcaatgtgttgaaacttgaaaccaaaactaaaaccaatttcataaataaagttattcgaaaactaatttttattttattgaaagcgattacaaaaaaagaaattaatcatagttttggtctgttaaacaccattgggttgatttgatccaaaaaaaaaaacaccattggtttttaaggcccattgaaaactcaatacgccccatttgaaacccaaaacggcccattaaagaggaccctaatataaacgactgtaaatttccgaaaccctaataagcaagcaagctatcgagcatcgtcgtctccaacagccaagagaagcagaagcttgaagaatctctgtaatctaaaaaatgggtaattctcctagacttgtttatctccttatgcttctacctattgctgattcttcttcaacaatgttgttcatgttttgtttgtctttgaatgcttgtaatcaatctcgcaggaaaggtccacggttcattggctcgtgccggtaaggtgagaggtcagacacctaaagtggctaagcaggacaagaagaagaagcctcgtggtcgtgctcacaagcgtctgcaacacaaccgccgtttcgtcaccgccggtatttagcttttactttaaaattctcggtgtatgattcttatatcgattgatccatctcttaatttgatgattctaagtctgagatcgctctccttagttgaattagggttttattgatcgtaggacttgtgattagacatcactaaatcagtatttggatcattttgctttttttttgtgaatcgcttttgacatcattgatgcataatcttagtgtgccttgatcataacaaacattcgtgttactaagtctagttcatatcaattttcttagaaatgctttaaatccaatctttagattagatgcactttttttagacgaatgaataacgattggattctcatttggttttgtttatgtttgttcgtcagtggttggttttggcaagaagagaggaccaaactcatcagagaagtagatagaagaaggtttttacccttttcagattttatgggatgtttttgatattgtgtcattagttggtccaaacttattcatatcaaagtggtttagccttggttatctacaaatcagtgggtgttcttgtcaattttgatttgtgtttctcctcagattagacctaagttcttgaattattgaacctctcttttgcagttatgtattcgtgtgtaccctttaaattccactattgtaaaacctctgctccgcatactttactttgctagtactataaatcgtcttgtcattaccactctttgaactcatcaattgcaaactaaagaacttgttaccattgattgtctttctttttttttttttctgttaatacgcctcccagttccacgattgctgtcactttttcaaccggtgcaaagatttctttgtaatcgtgactcgccatctgtttgatgcgataaacccacatacatccaagagctttcttgcctttcgctattgtttcaacagtctatgaattgttgtcttcatgtgcaacaacttcatctttcaatgcacatttccagtcatagtccttcttaactttattactgttttggttcaatgtttgttgtgaccgcgtgaaaatatgcttggtgaggagagaccatcggagggaatgttgcgatggagctctattctgtagaggttgcacttcaatggctgtttcaaacttcgccaccttgaaacagagaattccaaatagaaatttttaccatacaatatctctttcctaaacgaattacctacttacatcgtttatgtaatatctacctagcttacaccattctcaaatagatttgttatgtgacacgtgtacacgaaaatgttcgccaagccgaaaatactcatagcacttgctactaatacttggcaaactcttccttgtttgccaaaccaaaaatattttgaaccccaaatcataaaccgcagatcatttcaagaaaaagtaaaaatatgaagaaacaaaaatcaaaactcaatacatatggagaaaaaaggatgatcaaatgtcattacaagaacacacaaactcaaactcggtaacgaaggagaccaatcaatcacaattggttctaaagtaacaaatgatttgtgtttgaaagcattacaatcaatcacaataaaaagtgcattgacactctttagttaagaaaaacctgaaatgaaaccttggttttagagttcagactcgataaggtaatccccgagcctttccacaaccaagttgcattgccctccggtcattggttcatcatagataccaaagactagagcttgagtagtcttcttgatagtgactccaccaggtccctgcaagaagtaagcatgaactttaacttgctgatctaaaagactgatcctttgattcattatctcaatcaaaaccacaaaaaaagagtcttctcgaatgaaaaatgttacctttttccctcggatgacggctccagcctcaccttggacaaccatgtacttctcaccgccaaggaatagcccggttggggcaagatgtccggcttcttcaaagtctttgttgattcctgctatctctgcaggcttcaactaaatacatgaacaagaacaacaaagtaggcaattagcttcaaccgactgagcaatgatactactaccaatacaacagatcctttacatggtttatacaatactgagcagaggtgacaattcatatgcaatgaccctaagatctcaaattcaagtaaaataccaaattttgaagaatttggtgaaaagttttatcatttgatgaattgaaaggagataagattctgtgccaagcaaaacacctatagacaagatttgactactgaaaccatgaaaatcactgagaaaatcagattgtcagagagaacaagtcagaagctagcaaatcaaaaccagatccaagtttcctcagatcggatcacaaggaataaacctaaatcagacgattgaatcagatcgatgaacttatttgagacagaggatcggaagaaacgcgaagaagaaggaagaaaaacctgagggaaagctgagctctgagcccagacactgccgtcttggccgaagatggcggcgtgtgtgaggtggttgccttcgacctcgcacatgagatggtcatcgacgtatgattgccacgacatctttcttcttctccggcgagatgagactgtttcttcttcttcttcttgtctctgcttcttcttcttcttcctcttcttctgtagcgtgcttttggtttgtagacttggacaacctttgagcttaaattattaataacacgatttagccttccaataaaagaaaattcttttttaatttctactgcaaaaaattccattaaaatacatattttatttatttactgaatttgataaagacagctaaaagaaataccaaaaaaaaaaaaatacaaatgaaattcaaaatgttttgagtgaaagtcgataaataattttaaaatgataatcaaaagaaaatatttttaaaatgattaaaatttgcatccggttaaaagaaattgttaatagattaaaaaaatcatttcttttaaaattgataatctattaacaatttcatttctcggttctacagtttttatttttaaacaagatcatatagaaaatgcatataattcttgcatggtataatttgatctaacgctaaaagtatattgaaaatttgtgtaaataaaattgtcaaaccaaatgtgaaaacgttttagattttcttggaacaaatgaagtttacataaataaacaatacaaaggtttttttttcttttctaaaaaaaacattactagagaatttattttccaaattcaaagaaatgagatcgaagtatggccataatttgtttacagggtggatatgctcttg

SEQ ID NO: 31530 - DNA, 2959 bp, Arabidopsis thaliana landsberg
gcgccctttcacgattaagccccatgtagtcactcttgtcaggctgtgatggtcagagagtttaggttggggagcccaacaccatttcccatgacccagaatcccttctcgctcacgtgtgataatccagcgagcacaagatcagtgatcgacaagccgtaatgacccacaacagcaagagacacatcagtgacattcagcatctgaagcttaagttttgccaaggaacaggtggtgttagacagtagagaggcgattccttgatccctgacaagaggacagttcttgatcgagactgacttcagcttggagcaggatcttgcaatggctagcaaaccctcatctccaattcttgaacaagcctccaatgtcagctcagtcaagttggggcagctcttagcaatagctaccaaacccttgtcagtgattgtagagcagcggttcagctcaagcttctcaagttgagcacaaccctcagcaatctccaaaagtccattgtcagtaatggtagaaacgttccacagtgaaagagacccgagagaagggcagctacgaccaatagaccgaagaccaagatctgaaactttagcagagttgctacctcgaatcgacaattttccaagtcccccacgaccagcagttccaacagcaattgctgccaatctaacatctgttgccttcttcccatctaagctcctagacaaacacccttcacaatcatcaccatcttcagttatcttggaaggaacatcaatctccttttgacggatgctacttacaagcgtaagccactgtttggagacaaaagcgcaagcactcctctcttgtggtccagacaaacgcctaaagatctcaaaaagacactcatctggtagcacatcaatggaaactggctttttctcgaaagcactgaagatcgtaggtgcaacaacacgtgatctcttgcttggagggaaataaacatcagcgaaactaccaagcgataacaaaagactagcatcctttgggtttgggtatattgcgccacgacggtaaaaatcattttcacctgtaaaataccaaaggagaaattcttatgagctaaagagatcattgaatcaaaatcagattcagtaaattaacctaatgattctcagatccaatataccaaaacagagaaattgcagataagatctatagctcgtcaacggccaaaactaaaactcagatctatagatatatatatatatatatatatatatatagatctaggaagaatcaagtcatcggtgaacactatcctataagccaaatcttattcctcgtacgtaaatcacctcaaacacggaaacgtctaaatctaacagagaaataaaaaaattcaatctgataaatcaaattcaaagatgaaaaaaaattcagagatcaggaagcttaccggcaaaactaaagatctgagacatgatttgagctcaaaactcccaggaaaaacgaaaacgcttgatttctcaagcgaaaacccgtgggaaagagcaaaaaagagagatccgacgaagatgaagaagaaaacgaacgaattagctccgattataccaaagagagagatgcacatgaagatcgaggagatagagagcgaagaaaaccctatggatagggcaaaaaaaaaccagagagagagaggagaggaaggagaaaaaaaacaggaaaacgaaatgatcggtcagtaagaggtcaagatatgagttattatatacttagttgaaatttcacatgcaatgtatctgagctgagaattggggttcgtatttaatttcgtttattttattcccacaacacacaaaagaaagaagttgcttaagatagaccagttttttttcacctttgagagcgcgttaaggcaagttatgaggtgtttggttaccgagtttagttatagtattaaattgtttttgtttggttcctggaacaaccttactctttttgctacgtttgtggccgacgtcagaatcgtttatgttgtgttttttttttcttgggagttttgagctgaaatcatgtgtgttgtaacttgtaagtactcataaacgtactaatgatcccaattgggtacgcaagatcatgcctagttctatacttcacataaatgagacttccaacaacatctatcttatgaatgtggtcaagttgtttccccggcccaaaaactctcccggcccacaaaaatatgcaaacgcaaaaagtgagtgactctgtgccactttgtccgtccttcttgcaccgggtcgaccacaatctccttaagtgtgttaaagaggtgttggcggaaagtaaaatgtaacgcaagaaaaaaccataatcatgctaaactagttggatcctaaactactccaactctcttttgtttccgattaatccaaatctcatggatatcaaaagaaaaagggaaaaatgataatgataatccgatatgaaaaaatttacaaaagtaaacgcaacaaaaattataatcgagactttttataaagttttactgatagtttagagatgcgttaaggcaacaactccattttacaaaaccataacttacttgaaatctaatccccaaatacccaacatactgatgtttctatagtctcgtgcacattaatatacgagaacagtcgttccaacacaaatggtaacacgataatcaacttattaccgactgatgacaaattttgtattattttcttcatcttatttcgatatcttcaaaatcccccatgtgggaaatcaaaattgagatagaaaaaatcagatttgatgaacatacaaattcttctacgattgaatcaccaatacaataatctcctacaccagcatcaggacttagaaggttccttggtacatatcatgattccatattcaaccttctacctgtaaaaaagatggtcaaatcgtaaatgattaaaattggaatctgaatgtaactgggagagga

SEQ ID NO: 31531 - DNA, 896 bp, Arabidopsis thaliana landsberg
tccctgtgttcctataagacaaatcaatatacattaactcataataagttgtacttttcgaatcaggaatttttagatcaatatacactaagttgtactaatctctactttttgattcatgaatttttagatcaatatacactaagttatactaatctgtactttttgagaagtcaaatttttagatcaatatacactaagttatactaatatgtactttttgattcatgaatttttagatcaagatacactaagtcatactaatctgtactttctgttttgggaattttagatcaagatacgctcattcatactaaggtatactatgtgatttaccaattttagagatatataacgagacataccgttgaatccctaggattagacacatgttcttcgggttcagctgcactatcgttttcttcttctacgatctcatcttctggaattggattttatatatagcttgggttctttgtacgcaccatttgtcttcatcataccaaacaacatcaacaattaacacttcaactgaaataataaacaaaatcgacaatgaaagtaacaattggaagttaatgaggaattcacaatgattaacatgcaaagaactaaacaatttcgacttacaccaatttgggttatccacggttgtactctcagagaagaagagaagaagagaagaagaaaatgaaagtgacgattaaagtttatggattcgtgtttttagggtttttaaaaattttaacttaggctaggggggaaaagtgagattagatccaagttaagtgggtttttgagcttattggctttgggtatgggtaaagcttggttgggtctgtaattttcaaattttaacaagtccttaattgtatttagccagatttttgatttaa

SEQ ID NO: 31532 - DNA, 900 bp, Arabidopsis thaliana landsberg
aaagattttatctgacctttgagagtttggtagggctgcatgatgaagaagaacatgtgctctatattcaccttcttgttggatcagactagtaggttggtgagattgtaaaaaacaaaactttactaattcaatttcaaagtctcttcttttctccagatactctgttttaccattcaaggaaaaaggataaatcttgtagaaagaagatgccaaaatgatttttttatttagaaattaaacagcgacgtcgttttgcagctacagtgcgatcatctaatcagtcagtgtcttcaagtttaaaccgcatctctagtctctctctacttctctctgtgtacaatattcggaaagtgaggaagatacactgaagcaaaagagcaagtcatggcggcgacatcttcctctgcttttctccttaatccgttgacttctcgccaccgtcctttcaaatactcgccagagctctcttctctctccttatcctctcgaaaggctgctgctttcgatgtttcctcagctgctttcacgctcaagagacagagccggagtgatgttgtgtgcaaggctgtatctatcaagccagaagctggtgttgaagggctcaatatcgccgataacgccgctcaggttagattgtgtttcgtttgcatttggatagagacagaggaaatctaaattggtgatcaattttgtcaatttaggggaagatataaactaactgagtattattagtcttgtaaatttgacttctttgaattttgatttcgtttctaatttttttttattctttctgaatgttatgaattgattcagcttattgggaaaacctcgatggtgtacttgacaatgtagtcagggctgtgctgcagtgttgctgctaagcttgagatcatggac

SEQ ID NO: 31533 - DNA, 3770 bp, Arabidopsis thaliana landsberg
  unsure (1)..(3770): unsure at all n locations
ggagattattcgcactaccgccgccaaaatcccttaccgcctctacaaagttggtacttgcggaatccttcttctcatcatcatcccacacgtgacgttattgatattctgctttttccgcttttttccaaattaagactactaaactgcgtgccgtttccaagcgcctcacacaacaaccacttcttttattgtacgtgtggaatcgaacatgtcatcatcacttacacgtgactaactcacgtgacgttgcggttatcctgctgtttccaatttaaaatgcgggccgttttttagctcctcacacaacaacatttcttctccaacatagctaaacgcttcctttattaattagcagctgtttattttctttctcttctagtccttccaaattctttatcaaggaagataagtaatcacccagatattacattactctatactcaagtatcagattttgtctgacaagaatacaaaatattacattacaattataagtggtaaaatacccaaagaatatgtgtagagagagtgcttctttctcaacgatcaaggtcatcatcatcaacatgagtagctagtagtcaagaactcaagatgttctctaagcaaatgggtttggtttcatgaggaagagacatcctctatttcaggcagttcaaagtcgtcgggtctcaatgacaactgaaagtctggaagctctggcaaacactgcattgccctgtggttttatcatatcatcacctatcttgtttgattcgttaaaacaaacgcaaaaaaagaaaacactcttaacgacttacttttcttcttcttcaagcaagtatccatatgtctgagactttctaaaagcaacttctggaatcttctggctcaaatgcttcataacaccccagataggaggagccctgatagatacaaaataattctgaatcattcacaattcacatgtaggatatcatacaacaacacaaaccttgtgacaggaggagctaagcagaagctaagacaggcttttttgctttctcctaggatctctgcagctgcaaggaaacaacacacagcgctcaagtgacaagccggctcacttcccttgtctgttaccagtccatggtagtagtatgctgcagcctgttaagaaaaaagcagaacataatagagagatatagttatgaaagaacaatagagatgaatatatatcggatcactctcaacaatagcttacatacacatacaatacctttgcttccagaaacttccagtagataaaccggagaagtttcttggcgcatccatggctaactgcttcacaactagacaagcagtgatatgcctgaaatgataatgagatcattttatagcaaattaataattaaaacagagaaaagacatatgattgccccgaaagcatgccacagttataagaagctgaagattgttaaactatgaggaggacctgagtgaagtagatgacttgctcacatgcaattctcctcttcacagacaatgttgctttctgactatcaactgctaatccaagttgaatctcagttccctgcagtgagattcaaccaaacttacaaattgaaaacatatatacaagattcaggtttaggagtcacagtttcaaagtaagcatgtgtgtaacctggcctagtgcttgtatagagagagtttgtaatacactttcctgcatatcatctggcaacttactcctgcatacatatagcaaattttcagatatgtaagtattaatgtgatcctagaatttatgtatttgtgcttcatactttatatcatgaggaagttgagtcagaatctctcggacgcagaactccaagtatccagatgacttgagagcaagtcaaccgcatctctcctgcaatctgtttgaaagtgacaggttaattagttttttgtaaacacaataaattaaaataaaagtgtgaaagtcaacgaggccacaccagtggagaccacacggacgccattgccagaaccagaagcatagcaatcctttggaatcatgagagagttagcttcagtcaatgccaaagcagccatcatgtggatcactatcaacatctccatccaaaggtttgtgcaacatatctctgcctgtatacacccttcacattgttaagattttaatgatactagaacaaacaaaatgaatatccttaggatcagcttaatttaagcaaaaaccgaacttactcgtcgaccatcgccaagggtcctccatttgagctctacgcagccctccattccatctttacctgtagagttaaatattctaatatcaccatttgaatatactaaactgtttaagttaatcaaaacttgcaaacacgaacttttcttgataagaccggatagaagtgacaagtactcctccaaagctgtacgcaactcagagatggctgaaccccctgcagtagaaaagatggaaccttatgtcttgacacgcaagaaaagaggaagaagttggtctaatttctctatacctgtgtcctcagctaccaactcaatctgatttcttaaacatgtcaaccgatcgatggttgtcttgggagaaacacctttgagttggcgctgaagatcagactgaacaggaacacggaactgtagaacaaacactacagattcttgaatgatcctcttcttgttcttccttcccacaacagcaatagtagattgagcacaccccatgctctctttctctctctctctctctgctatgatcttttgctcacaaaatcatcctacacaacattgacatatctatatgtcaaaataaggatgttttggaacaacctgaagcagatagatccggattaattttgaagctctaagtaaaatataaaaagaacaatctggaagagagaatctcagagagctaaccagaagagataagtaagcatgtgatgatggaaagagaagatttactcaggtttcagagttcgatgcaattccctccacatgatcttatattcaacgatagatatacgtgatttcgttcncccccaacggaacctcacatgccttttggtttaatccaagtattaattatgtttctttcgggtagctgtgaattcttattctatatcggcacccacgtgcctactttatattccctctcccgttttagttttagtacttccttcctcgttgacttctttccttaactttcccgccaccttgattaattgaatcaaatcaactttttcagtttttaccctcttttcttactccaaccaaaagattgttagaaatgaaaatgagattatggtaacaaaacctccattgattcgagtcaatatgtcttttgaatgatatgaatcgttggctattacatcttaagtagactttataattagacgagataattaatagacaaagtcatctatgattataaaagtattagagaatatttggatccaatcgaaatgtggtgtgggaaaagaaacatgttagattgtggcaggagacaggctgtgttatcttcattgttctactgcaagtgcaaacacacttcccttctttaatttggacggtatattaatacactttattattagaatgggcttttataagtaggcccattatcaggtgaaaaacaattgggcccatcattgactttttttgttaatgggtggtggtggtggtgattaatatcgtcgtcggaggtttcttgagctgaagaaaacattcgtagatctatttacgcatctgcttaaacacctacatcgtcgtagatcgcaaaccat

SEQ ID NO: 31534 - DNA, 2056 bp, Arabidopsis thaliana landsberg
gtgggcttcccgtttaacagtaaaagggacaattttgtttttccaatcatttttttttggtgtgttcatccacattatttattaattaagagcaaatgcatttttttctatatataagagattcagccgttcagatagcaatttatttatttaactagtaagttgttgagtttgtatatgattatgttactattgcatatagtatagtagtatagccatgtatgctggtttacacaatcaaaatagaaattagacgaattacttccaaatttagctagactatgcgctgctctattataacttcttcttgtaaaaaaatttcgtcatcctcaccatcaaatgtttactcttatagttactacaatgctgaaaggttttctaaatttgatgaacttattgttcacattacaatatatatatgataccaaatcaacattaattttcttaaatccatttacaaataagtttgttagtaatctttcaggataaatacctcccaagaattttatatttaaatctattgttaataacatagttgtttatgattatttatttgcaacaaaatcattgtcgttttctaatctttaaaatatgcttgtgtattgtttttttttgttgttccaattacatgtacaatctatgttgactcgtcgatgcagtttgttacggtttttctatactgtatttgttaaaatagctaaaatgactgcaaaaatgtatatatagattattatataaagtaatttagaaggaaactaaaaattgtgaaaagcttttcctttgcgatatgtcaatatggcatgccatataattattatttttaaaaatcagtttagtttctaagaatgcttctcagttctcaattatatagaagggagttaatctaggcgtgggataaattagtttaaatacttttatacagttatatataatgaaagcttgaaaggttaacattatgtatatttttaaaaatacatcttataatataacaaaattatgaaaccatatcatttttgttattaataaaataccataaataggaaaaaaaaacctcttgtctatgtccgtaaagaacatatcaatttaccttgacttgagaaaatgacaaagttacgacggactgtagcagctaggcaagacgtagttacacttttagaatatatgatatcaatcatttaagttaattacattgtaaaaaaatttctcacgtacatatatatgattggttcctagagttttttagaagttagatgaataatttgttattgaaattttgtcaatttgacactattgcagcaaggagaaggagaccacgctcatcgataaaatcgttgacgacgttttgcaaaagctgagtaaaataccggcggaagaaagcacaagtggatcagtggatcaaggtcggggagaagaagtagaagaagcaaaggctgataagatttccgggctcaaccagcgcctaaaggaactggaagaaaaggtagccattacgggtgacaagagagacgagactcgtattgtcgaagttgttgggatgcctggcattggtaaatccactctcttgaaggccttctatgagacatggaaaaccaggttcttgagcagcgccttactccaaaatataagcgaacttgtaaaagcaatgggattgggacgcttgactgggatgctcttgaaggagttgctcccagatgaaaacatagacgaggagacatacgaaccatacaaggagaaactacttaaaaacacagttttcattgttctagatggcataagtgacgagacacatatacaaaaacttcttaaggatcatcgaaaatgggctaagaaaggaagcaagattgtgattgcaagacgcgcagtgactcgtgatctgcttcatgaggattcaatggtccgttatacttattttgtaccgctggtgagccatcgagaagggttaaatcacttttggcactatgcgttacgaccttttgcggcccaccaaaaccacccgggagcttccatgaaagagtcaccaagaagttgtgcgctacccccagaggggccttcccta

SEQ ID NO: 31535 - DNA, 916 bp, Arabidopsis thaliana landsberg
  unsure (1)..(916): unsure at all n locations
ggattatccttccaacctaagaataattaaccatatattcactttgacatatgaaaatactaaataaaatccattagctataatttataaaagtatacaaattacagcacaaaaaaagacgtttggatgaggattactgactgatatatattgagcaatgcttgatttggcaattgttgcagtctttttactgttttcttcattcaatttgtccatacatttgccgcttggatatcacaccatgcaatgtcttgtctccatctaccatcatactttcatatcattccattttgaaaaatatataacttggggaccagagagtgtaatgctagtgcctataaacatgtgaccaataaacgaaacaaccatgtaaaaagattacgaaacggtgcggattggttcaatccacttccccgcgatctcgcttcgtaaaaagaaaaggagtttctgacacgtcatcatcatcatctcccaatgctaataaaaatggctaatataatattagtacatgattctaaaaataaaagctacacttttcttttcaatggtagtttttaagcttataatttttccaaatactacaaaattgcacctaataaatacaaagactaatggaaaataacaataataaagagatgtcggcattaattgaccgattttaaaataaaataaaggtttatttttaacttacacaaaattgagtggaacaagtgtttttatttgtttgtttgaccaatcaaagagtgatccaattaattgaacgggaaaaacaagaccagttcatttacattataataatataattattgatttttccttaaaaatatttgtattcaaactcatagaatcagtccatttaatcacacgatttatcatttatctgcnaattgtagtatntttttttcacctacattac

SEQ ID NO: 31536 - DNA, 1278 bp, Arabidopsis thaliana landsberg
atgattcagagctaaagggcagatggaagaagtttaaacaacttgaaactatgggttattaattacctgtagtcttgctttgactagtcaatttcttctccaactataatttatctttaattaatgacattcggcttacacttttattttttgtaacgctagtcaaacaaaaatttagagaaatttaggcaaacatatatttttaggtaattattaagagaataaatattttttatatatatagaaagtgattaacaaaacgaagaaataaagaaattttaatgcttttcaaagaaaatttaatgttaaaaatctgaccacacatattataactacgtagaagttaaaaaaaacggacatatacaatattaatttagaaaagcaagctgtatgtcgtcgtattgcgagctttggggatgttgtaaaagacactatttgagtagtggtgataccaattattgtttttttgtgtgtggataattaatcaattttagacttatgagtattggtgtagtatttgtcttgcaactaaaaaaccttgttattcgtcacgaattgtcccacgataagtaaaagcccacattaattataacgtacgtggtagttttatgggtaagggttttctattaaagggaaagaaataaagtttgtacgaggctacgagctactttgttagctagaatttaataagcaattaaggaggagagtccgtaggatcttggacttgtctattgggtctctccgaaactagatttggagctaatcttgagtccaacctaagttctttagttttagatgttttttcttttgctaagattgtaaataaatcataaatgtaaatggtttaggtttataatttcgattagaaatctctatttaagaggtgaaaatacatgtgagttagagtaaattttacactaaaaagtatagagataggttggagatgctcttagaatcttccagttcaaatcaagtgatcactcggtttaaacatattagatagtaaaccaggattagttgaagacggtttggcttcatcctaatgaatgtatttagtatacggccaattttcaaattatatgtctttcggccgttgggctataatagtatattacccctgattttacataacgtggaatccttgagactgggggaccattgggctctacattgctccttccagggccagccctggacgagagttattacactgttcatagtactcaaaatcgccatcaaaaactacttcatgtattatgcctgcctagataacataac

SEQ ID NO: 31537 - DNA, 1944 bp, Arabidopsis thaliana landsberg
gtcgactctagaggatcccctcatactgtttgctttacgtcacaaatgacacaaccatgcatatagacaaacctgattcatccagggctttgatgtcctcttatttatgcataagaggatccaaaattttgaaaacattcacattgaacatttttttccgaggaagttcgagaattttgttagcatgtcttcctcttctgggaccagtttgtgataaaacacatcctctcggaaaagagtgtagagcacaacttcctctcgaatgtactaagaccactagactaacgtatagaagctctcaagtaaaatggctacgatccaaagagaatctgaaggtatgtgcaatgaggcatgaaccatcatgatggtggtgataataacagattaacagcattgacaatttgaaaataatagtaatatgaacgcacaaatcatatttatttcttaaatagaaatgttttacaaaaacgattaatgtctaaattaattcaaggttctacgaatctacataaaggaaagtagaaaggtcagaatttgtatatgtagataagggcaaataaataaataaacagatattttgtagaattgcaaatatatgtgaataatcaaatataatagaacaagttggtcctcttcacatccttctaaaaccctataagtacccacaccctctcttcatatatcttcatctctcactctctcaaagacactgaataaatccttaaaacaaacttttgaaagaaaaaaatggcttccaagaactcagcctctattgctcttttcttcgcccttaacatcatattcttcaccttaaccgctgcaacagattgtgttgcaacccaagtcctaagcacaagcctgtcccaagtcctaaacccaagccggtcccaagtcccaaacccaagccggtcccaagtccttcagtaccaagctcttcggtcccaagtcctaaccctaggccggtcacgcctccgagaacccctggctcatctggaaactgtcctatcgatgctctcagactcggtgtatgtgcgaacgttttaagcagtctactcaacattcaattgggtcagccatcagctcaaccatgttgctcgctcatccaaggtttggttgacctcgacgctgccatttgtctttgcactgcgcttagggctaacgttcttggtatcaaccttaacgtcccgatatctctcagtgttcttctcaacgtttgtaacagaaaggttccgtctggcttccaatgtgcttgaaggatatcagctatgcatacgacgcacacagtttactctttaaaataatcacagtttgaataattgcatgcatgtatgcaagttaagggttcaatgtttcaatcttttgtttaagtgtgaggcgttatctttttccgcgcatatatgtttttgttgtaacttttattgtttaaatgaaagacgtttcatagtccattttatttgttgtcaaaaaaagaaaaaaaaagcgtctagtattcaaatatttcatgtaattttctgtatacaaatattttcctttataattttggatgagaatatttcgtgtatatttaagccaaattgacaaaatgaggttctgagtagaatccaaaactaaaatctagtcaaactacgatatttatgacagttctatagccagctgcagctttttgttgtactagttactataccttccaatcaatgaaatcaagattgtatgatttgatatttctccaaaactgtagtgtagttgaacataccaatgattaattctttgttcagccttcgataatcaaaagttgaaccttgattggagatattgaaagttccaaatcagatagtatgctacatttactacttataggcctctgactatggaccgaacggttctggttcaatttggatagtcggtttgtgagtaattcggttagaaggtaaggttatttaataa

SEQ ID NO: 31538 - DNA, 1317 bp, Arabidopsis thaliana landsberg
gagtatgtggtccagactcaagagaaactaatgttcatttacaaattctactatcgatcaaattcataaggcaactggtccaaacacgtataattttcagtataccagtagaacaatgatcagtccattcaaaaccatcatcaactgttttcctggaagaattcagaattacgaacttcgcaagaaaattggaaaatcttaattttgtagcgcatataaacgaaaaacgtcattacaaagtcaagtattctgtaagaaagaagggaaagttgtatttacctgaacagggaaatccatttgcggtctcctagaggaccagttgatattatcccaattgacagagggtggaaacattttgtaatctttttgcatgaagaatccctacatcacattttgatccaagtcccttacaatgttagaacagtttctgattgctaaaaagagggtaaaagccggacactttagttgagacctggctttcttcagcgatgacattgatggaatcaagccatttgaccgaacgagcaccaatcacaccagggacaaccacccttaacggaaatccgtgatccctgttcagggtcttcacagaagaaacacgttttccaacaaataagcacatttccgagtactcactcatactcacatgtcaaacaagtgatgatttaaacacaagtgagactaatttaggagagcgatatcaaacctctccattcatctcataagcgagtagaacatccgcttcaggatttgtggcttgacttagagtgattgacgccttataagggcccccattttcctcctagagatatagaaagagcatagacttttcatgggaattcataacaaagcataaaaaggtggaatttattaatatatatctaccttacagcgatcaacactaacgaactcaacatgtctggctcctaaattggtagaagcagtcagctttggtatccccacaagctcaagaacatcggccagtttcgccccaccccagacagctgaaaggcaaattctttcaagacaagtatgtattgaaagcatgggaatgggagaaagagagacgaaccgttgccaatagcagaaacatcccatccaacacctctaacattcctaactttgctcatggcagtccttctgttaccggcacactgcattgaaacaaaagtgatgttaaattaaatgtggagaaaaactaaaggtagaagatttactcaaaggaagaatgaacctgaagagtagcagtaacattgtactttgggagggacctgcaattttgaggaggaaacaagagtggtgcttgatggagagata

SEQ ID NO: 31539 - DNA, 1006 bp, Arabidopsis thaliana landsberg
tttctatcgtcttttgcttccaacttatttgtagagcacatttattgattcttttcgttttggactgtggctttgattttaaatatgtaaattacgggcccgtttgaaacagacttgtggtgctgtggatgtctcgggtgtataaaataaatgtctataatcgtttctgtatcggcccaatagaccaatcacctagtgtccaatcggcccaatatactaatataggatataataggattcgattaaagtcaaatatgtttttcacagctcttatttatttaggacaatgcatttctttttcccaaagcttaatcactctttcctaaattctctactcatgcttccaatgttatatactgtctcccagagctaacacaatactacaatagtgtctcatttgaatgaacataagcatattcatatcagctctagaaaaacaaaagttgaacaataaaatctggaacccgagtgtcgtcaaaattgtgcctagaaaaagaaaaaagaaacgcgtaacaacaacattctaaaccaaagaagaggacaaagcgaaaaaggcaatgaaaagggtataatcaatggctattggccttgcgaaactaaaaacaatgaccaagcatagtcattcggttaggcatttacgaccgttgaataagacatcaaatcaaacatggtcccttttaataagaggcccaaatcacatctaccatttttatggtgatgaaatcgatttacgccaaacttaccttggttgttgaaacttgaaaggtgtttgatcactactatcgtggtttgaagatgtaaaagtattttcattctttgattgaatatgcatatttattttaaataaaacccactattatgagaatattgtgccaatgacatctctaaaagaaaagaaaaaaaaggtcactttctttctcaactttaggatccacaaacatctcatttctttttggtatcttttctttcttctaaagcaaactttttggaaaataccaaagataat

SEQ ID NO: 31540 - DNA, 1761 bp, Arabidopsis thaliana landsberg
ttaccataaaagatttaacaattagttaagactcaaagccaaaatttcgatgccaaaaacattcttcaaggatattccattgcgtgtattacatctttgctctccaaaatgaaagatatacaattattatgtctcatgttacttgttaggtagattgtgatcagcccaaaatagtctttgcacataaacctcaaaattggaggttgtggtaggaatgattttccgtgcatcaaaacgaattatatcaacaacaaaaaaaggttttcagaaaagttatttcgccgtatatttcaaggtgttaaatatattaaaacaaaatgtttagcgttttttgattattccacaaactttttatcaagttcaactctttccgcaatttaattactcggctatttcgttattataatatttttctgtttttttaattgattttctagaaaaacatacatattaagaaaatatattaaaattgataataagagtgttaatttgtgattctatttttaataattctaaatcaatgatatttaattaattttcttaacgtttaaaattttaaggtgagctcttcacagcccattaaggtccaaatgcgaaatgagaatgaagcagtgggccgtcaacaaactcagcccatgaaacagacaaatgctaataaattactgctagccaacatcacgttggtcttcgacacaacttcaaatttcaaacgaaccaatatgtagtatgggtaaaaaaataaaagacaacgcctttatttgattttacaataagataagcaaacatgtttttatttttttcttgaaagagataagcaaacgcctttagcaaaacaagcaaaagaaaagaaaagaaaagaaaatgaaacgtctttattttctgacaattagacaagcacacataatatatttttcacttttcgtcgttgtgggaactcgtcttggatttttattctccggctgctacacttccatgtccggtggatagctctgtagtatcccatgctattgatgctgtaaaaaccaccaaaagccatttaaaactcactactgctaatctgatcagatactaattttttttcccccaattaatagattcaaatatatagtataaaaaaaacttgcaaaaaaattatttccgaatgtgataattcaaatttaaggatatagtaaaaagaaagttaatgaaaacgaacctgcacgagataggccaaaattatcatcagctccaacatgccatgagaagtaaccaagcaaacctttctgtttagcgtattttactttagccacgacgctctgatgatcatcgtacccaatcaaactcgtcccggcaaagcagtaatctccaaccaccgtcgagtcaaaaaccggtcttgctttgtgatccactattaacctttttatctgatcgtagttgatagaaccctcagctgatgtagctactcggctggtggccgcatcattgccgcttcctagactccaggtccatccaacgtatggaaatcccaagactgctttcttcgccggaagtccggccttaatccactctttcaaaccagagtccccacatggacctatcaaccaaattatattacagttaaacccttgaccaaccaaaataaattacccacctgattttactttttaattgataaatcctatgatcgatctggtcagtcctagtaagaacacacctactgatatttgtacaaaaggttttaggcaaaagtttataaaccttctagacccggaaccaaagtat

SEQ ID NO: 31541 - DNA, 1945 bp, Arabidopsis thaliana landsberg
agaaactctataaaattaggaagaatcattcaactggaagtagaatagtctcaaagagccatggttgactgatcaactttcgccttcttcatccttttctttattttctaaattagtcatttaattcattcattatatatacttctctctaatttcttaatcatctcttcttatagtttttaccctaaagaaaatggcaaccgtcgatgtcatcaatggtgattcaatctcaactcttcattctgacataatccaaacccaaatcttgacccgactcgatggtccgacgctagcctccaccgcaacaacctcttcttacctccaaactctatgcacggaagagaaactctggcaagaactctccatcgacacgtggccttcgatcaatgatccacgtgttgtccaagctatctcctctttcccttccggttaccgttctttctttgctgactcgtacccgttcactgaacacacgtggcagtctgaaaaacatgatccaccgacgggattaatctcagcccgtgatttatactacagaggagagattatatacttcgaggtacaagagatggaaacagagaaaggtaaatcaggatgttcttgtcatcaccgtttcggtcgatatactcgacccgaaagagtcggtccaaacccggattcgatatccgggtggggactacgaagcgtgggtgaaagatatggaagagagcatgaaacttaattggatactaatcgatccgatcaagaaacgagcggcgaatatatctagtcgaaaggcggtgtcggcgcggcggaactggctaacgggggatttagaaatacggttttcaacggtagtgacggcggaggcggcggaagtggcggcggttgtgtcatgcgggtcagcggaagcgtggaaagaggtggatgaggaagtgggaggagaaatacacgtgagggacgtgaggctacaagttgaggacattgaaggaaaatgtatgaaaggtagggatagtttggtaattttacaagggttgttagatggaaagagatcgtgtaaagatgatgaagagagaagagctaaagaaaggtatgaagaatacgtgcgaatgaagatacaatggagagagaataaagagaggagagaaaaagctcaagacacaatttgtatgatctttgggttctctttgtttgtgcttttgtggagttttattttgttaaggtaaataactatagaaaggtacaaaaatacttaaatgatccaataatacatacatttctttgtcatctttttttttcgttctttgaatttgtaataaagaaaattgttgagaaatatatacaagatatttggttagagaagcatgacgtaatactgatttttttttggtgtttttttgtttgtttatgatagataagttttgaatatatatagtcgttaaaatgtcacttttggacgtattacctaatctgaaaacgaaattggttaaagaaataaattgcggtcggaaattagtcagtgaaggaatttggcggccaaagaagattttttggtagttatggaaatatttttaataattttttagtatagattaaaaattattgtttccgtttgttgcgaacgtgtgtgggcttagggcccaattcagtttgttagattagtaggggttcttttccggcagattagtaggttagggatttatagacttgatggtttgggtgaagaaaaaacacaaatcagtttttatgttaaccaaacggcaatatccacaggcaaacacacaacacatctcatattcattgcctggaaagcaacaatgagtataggtatgatcaaaattttgtaaccgcatttcgaaccgtaaccagactattgcttaacctggaaaaagactgtaaacgatacctggaatatctgattagttactattaaaaaatatactatccgttaattattagtaactgt

SEQ ID NO: 31542 - DNA, 8151 bp, Arabidopsis thaliana landsberg
ggcatgtaagcagagaaaaagtaagctttattttttgtaatacccacaaaagcatgtgatgagtggtgtctccttttcaaactctttaacctttcatgggcatgggagaatataaccataaagctaataagtagcagcacttgtcagatacagtaccatagagagagagagaaaagccataatatcagaccaataagacctaaatcaaaaccgatttaaattgaaacttatcctaactagtattaacacaaagcaatatgaaattgtaactgggcaaatcacaggagacaagtcacaatcaaagcaaagaagagcaataatggaagaacaaaggggagataatgatgcaacatttgctttacctttcttttgaaggtatcaaaccccacaaagagatagacaacaagagttggtatccaccaacagaatagtgatgcaatatcaatgagccaggtcccatacagtaaacaataaatctgattgttaaatggatcagttacacctgcagtgtctttaagaaccgaccaactcatctcctctatccggagaaggatttgtattacacacttgctggacatatcattcggtagattaaacaagagccaagagtttcactcacacaagcagcaatttcttggattcactaataaagagtcttaaggatcaagaacttacaagggcataatgctactgactctgaaaggtaagataactgaaagaatatacttagagcaagtaagaataaacctattccaacttttcaaagagaatcatgcagagaaaagatgaagcagcaatttcttggatatactaagagtgtctgagaacatacaagagcataataacgccttggaaatgtatctaactggaagaatctacttattagcaagcatagttcccacatacaaagaaaacagcaacagtgagagagttgaaaccatcttacatctctcagtttttggccttgatggaattgttctccttgattttagctcgagtatcgagcttgacaaaacgtttgagatcatcatagggaagagtctcgacattcttcctcctaagctcactgagcgctggtcgcttatcgaggagatgccagagccaatcagggtaatcagaatcaggcaagatcttgggatcagatccgtctttgagagtattggcaccaacaacagtggtggatttgatctctttggtcaagctggaacctttaggagcatcgctggctccacctcctttgccacctttcttggctttactagctgctgctgcaaacgttctccggactacatccttggatgatgatccccttatcaatccaatacggttcatctcctacacaaattttagataccaaaaacagagcaacgttttaaatcacaaatcgccatttcgttgaatatcattgtttccagacgaaattagggttagccaaatccagaaaaataaaattaaaattgccacaagagcgaggaaacttaggattgtcaatcgagagagaaacctttgagaaggaaagagagaaaacttacgtcgaagaagagcacaagtgaagaagaagcttactagcggcgagtttcagagaggcggagcgaaaaaaactcaacagtcaacaataatactaacatagtaacattccctttttctcactagtttctaatccggcccaaatatgttttgggttgggcccgataatataccatatacgagagcccaatattgatagcaataattactcgtcagttttaaatagaagtcaacgagggataatgagtgcactttgcgaacatgttgacgtgtctgaatctgtttcggtgaccaaaaacccatgaatgttctgtcacagctgtgaataatagaaacagcgacatgtacttttgcatattcagacgaccaagtagaaattctttaacacaacttattattaacgggcgttgatctcgatcgttggatcatcacggtaatagaagccgttgatatttgattaatcataagaaccaaaaggtgataaatttattatgaataatatacgtataactttttattcatcttttaccaaaaaaaaaacattttattcattatcaattaattttgagtttggaatctcatattttcaaaatagtattagaacaaattccgatttctcattttaggaccacaattagattttcattcccacgcaacttcgtgtttatatgttctgccctgatcgcaaaaagaaatgtaatgtttcagagtaatatgtagtatatgatcaatgctaatttgttttaatttataaattaatctatgattcttaaatgtaaccaaacaataattatctaaacaataattttttgctaattaaagtctataatactatgagaataaaagacaacaaattaaatggggatagtgtactagtttcgtttatcagtacatcgcaaaatttatctgatcgttgtgaatactcgtagtcgaaggttagttggagatcagtatacacgagttgaacttgaaaacaaaacaaggaaataaattcaaaacaaagtaaagaagaagaaaaacacgtcttatattagaagacgaaagccaaggcactaatcaatgttgaggtgattaacagcgggcaagtggtgaaagtggcggcgtttggaggtggtagaagcgtcttgggttcaccaaagtgaccgccgtcagtaccagttggtgacggtgaaggagccatcggaggaggaggagtgagtgtctcgtcgttcccactataggaagacttagactcggccaccataatcaacgttgccaagacgagaacacatatcattaagctgaaagctctcattgctacaatatttgatctcctctctttcttttaatttctctttctgtatttttagttagttgatacagtcggatcatcgcaaaggaaatagtacttatatataaaggtcaacgagggagaatgattctaattcgagggaaatgtgattatacggtcttagatcttgttacgttagtggctaaccatctattttgagtaccataacgtgatgtccttcatcttttttggatcgacacagtaataaaagatatatatcaaaaaggcaaagcgataattacttataagttccaatccaagaacaagtgataattgatcttaaaccaaataataaaaaatgataattgatgaactgatctatgttgtctgtatattattattctacgtttctattagttcatgcgagattcccaacagaaaaaatggagtatactcctccgaaaagaagaaagacataatcaaaaagccatttatataccaaatgtatagtacctaatgacagaaataaatgtatattattgtattaaaaataaaatggatatatagaaaatttggattggtctaatactctatagtatgtttttttgtttgggtgcaaaatagactaatcatgtttagactaataattcttgtaagaaaattgttattgtatttgtttggttattaaaaaaaatatttgtgagaataaaaaaaaaaacacaggcaagtcgccgagttttggacgtatgtgtatgtaaaatggttgccggagtccatggcagccaaaacttgggcgattcaaagagagaatctttgatttattattcaaatgccaaagatctcaactttttttatttattaattagtcacaagtggcagttcttcgtggtcgccactacctaatcataaccatcgacaggtttatagagaagaactaggcaacgcatcgccatggatcaatcatcctccatgcattgactttttttagatcggaggaaaaaagtatgcaaatttagttagggttttgaaattcgaaaatcgagatgcggtgggatttgatcacggcgattgtggctgcgctggtggtctcggttttggctgatgaatcgggtcaaatggcaccgtatcggatccacacgctcttctcggtggagtgccagaactacttcgattggcagactgttggtttgatgcacagcttcttgaaatccggccaacccggtccgattacccggttattgagctgtaccgatgatcagaagaagacttacagaggcatgaatctcgctcccactttcgaagttccctcttggagcagacatcctaagaccggtgactggtaaactcccaacaccattactgactctcttttctttctacttttctgctcggaaacttcttgttgttgttgtggaacattagtgctagacagaaccacgttgttctgtctcttgcaccagtttgccattgctaacttgtgaaattgagttggatcaattagggccaatttggtttaatccttagtactggtcgctagctttggaatcttggtgatgggttagatggatctttgatgtatttattgaatgaactctataggtacccagcaattaacaaaccagttggagttctttactggcttcaacacagtgaagaggccaagcatgtggattgggtcgttattcttgatgctgacatgatcattcgaggtcctatcatcccttgggaactcggtgctgaaaggggaagaccctttgccgcccattacgggtattcctacctcctcttcagtcataacataaatcttaatcctttcttttatttgttgctcactccttttttctatatgatttagctacttggtgggctgcgataacctccttgtgcggttgcacacaaagcatcctgaactctgtgacaaagttggcggtcttctcgctatgcatatcgacgatcttcgggtcctggcccctctctggctgtcaaagaccgaagacgttcgccaagatacagctcactggaccaccaatcttaccggagatatttacggcaaaggttggatcagtgagatgtatggttactccttcggtgctgcagaggtaaagtcaccactttcctaatttctcttgctcatgctctgactattacagtcctcagtacgtctggtttcgattataaaactttgtgattttgtttttgatccacaggcaggacttaagcacaagattaatgacgacttgatgatatatcccgggtatgttccacgagaaggtgttgagcctgttcttatgcattatggtttacctttttccattgggaactggtctttcactaaactggaccaccacgaagacaatatagtctacgactgcaatcgcctcttccccgagcctccatatccaagagaggttagcttaacaagttctaaactcaatttcatatatctctaatgggtgcaattactgacgaaacacttttcgttgattaggttaaaataatggaacctgatccgtctaaacgaagaggtctaattttgagtttggaatgcatgaatacattgaacgagggactcatactgcgtcacgcagaaaatgggtgtccaaaaccaaagtggaccaaatacttgagctttctgaagagcaaaactttcatggagttaacaaggcctaaactgcttgcaccaggaagtgtacatatcctgccagaccaacacgagccgccacccattgatgaattcaaaggaacttatccaaagattcacacactgttttctactgagtgcacgacttatttcgattggcaaacagtgggcttcatgcacagtttccgccagagcggccaacctggaaatatcactcggcttctcagttgcacagatgaagctcttaaaaactataaaggtcatgacttggccccgacgcattatgttccttcgatgagcagacatcctctaacaggcgattggtaagtttagcagttaaacctcaggtctccaagttataacttgatcttcgtctgattttgctatgctcttaactgaatcaggtacccggcaattaacaaaccagcagcagttgtccattggcttcaccacacgaacattgatgcagagtacgtagtaattcttgatgctgacatgatccttcgtggacccatcacaccttgggagtttaaggcagctcgaggccgaccagtttcaactccttacgagtaagaatcttgagaaacaacaaaattctttttctctcttttccaatttatagatgatgcagaagtccccttaaaccgtctctctttcttttgtttagctatcttattggatgtgataatgaccttgcaagacttcacacgcgtaatccccaggcttgtgataaagttggtggagtcattataatgcacatagaggatctccggaaatttgcaatgtactggttgcttaaaacccaggaggttcgagcagacaaagaacactacgggaaggagttaactggggatatatatgaatccggttggatcagcgaaatgtatggttattcatttggtgctgcagaggtaaaacttattctgaactttcagctcaatgataatgattggtttcgactagtgtctaaatacaacatttgtgcagctgaatttgcggcatagcataaacaaagaaattatgatttatcccgggtatgttcctgaacctggtgctgactatcgagttttccactacggtcttgagttcaaagtcggaaattggagctttgacaaggcgaactggaggaacactgatttgatcaacaaatgctgggcaaagtttccagacccgcctaatccttcaacagtccatcaaacagacaatgatctacggcaaagagaccttctcagcattgaatgtggacagaagctaaacgaagctctgtttctgcatcacaagagaagaaattgccctgaacctggatcagaatcgactgagaagatctcggtttcaagaaaagttggtaacattgaaacgaaacaaacccaaggaagcgatgaaacaaaagagtcaagtggttcgtccgagtcggaagggagattcagcacgttgaaattatgggtgattgcgctgtggttgatatctggagtagggttcttggtagtgatgctattggtgttctcaactcgtagaggcagaggaacaacaagagggaaaggttacagaaacaagagacgaacttcgtactcgaacacaggtttcttggacactaaatgatcgagatagaaatacagaaacctgagaaagaagcaggctccttgattcaagtgtggagggtttctgttagaatctgagaaatgtgtagatacaactaaaccaaaaaaaggtgagacattttgcttcccccaaagtcgtataggtttctttgtattattctttttaaaggtttttttttttttgtcaagagttataaattcggattgtaattttcaaaaacacacaaaggaaccaaaatctcaatctctgttacacatattaataattaacaggcaaaggtgatcgatcaacttgctaaagacggtttttgaagttcctgctttgtggtttgtgccaacttataactgctttttatttttttctgacatcactggtttttcactataggtaatccaactaaataaaaacactttagaaaagtatagtttatttctacaaaaattccatacacagttttttggcggaccactttctctctcatgtggtgtgagtctgagagaatactttaatagtaaaactaataaaatctcataaagcaacggaaaagaagaaacagacagagaaacctgcattttgttttttttgaattcaaattttaaacagtaaaaagcctttttgtacaacggatacatcttccttctactttcttttctttcattttacccacttatatttcttcttaactttaaaacttaacaaatacatttttggaattgaactacaattgttccaaaagaatgggagaatctgcttgtctcatgcagccattctcttatgcagctccacaggtttgttagttgctttctcttctatttcagttacatattcttttaaaaaatcatatgttttcttagaaattaagctctctctgttctttctttagggagattctcttggtgctttaggacagtctgtgtccttcggaagattcatgtcggagaaacttgactgggagaaatggtctgctttctccacacagaacccttacgtggctgaggcagagagatactctaagcccggatctgttgctcagaagaaagctttctttgaagctcactacaagaaagtcgctgctgctagaaaagctgctgctgaagaggcactcgtgcttagc

SEQ ID NO: 31543 - DNA, 5882 bp, Arabidopsis thaliana landsberg
aaacggccttgtttctaatcaatctatgccaaagtcaatccgttttttataacccaaattagctataaaacctactgctatataaactggatgcaacgggacaaccaaatgcattatgtagttttccacttatcgaagaaatgaaattgataatgtgagacttctgtagcagaaagctcatcatgatcaagccttataaaacatttcaaaatctaattcataatgaaaatttgcctagccatttaactagctagggccattaggcccaatgtccaaatagcctgaacgctgggaaaaagtggggctttcggaacagaacaaataaaatttgacgcactttattgtgttgcaagctacttcttgaagtatatattttgattctcgaaacgtcttcagttctgtacaaatttaaatattctattgaaaaagaaatcttggtcgtcgtcgtcgaatcggatacgttaacgttacgacatacgagtcaccattagggccgtagacgaaatactaggagacgcatgaaggtcacgtgtatcaccgttgcagcacataagttttcacctctcagtattgaacatgcgccgtatttcaatttcaagcttataagaatattattttctgttttgtctcgtcacgtagaagaacactcaacacaacgggtcatataaaaacaatcaattgaccaattgaaacacttaccattagctgtactaaaacaaaaagtgctacagctcaattatttcgacgtacttttttttttttttttttttggtctttgggggcctatttcgacgttctttaaaaccacgatcatagtggtttgggatatagtaattaatttcatgtgtttaaccaaaaggtaggaaaagtaattaattattagttgttgagaaatcaagttgcaaaggagattaccggcgactccgttggtttatgaaacaaacaatgagacggtttagaatgacggtggccccaatattttaggtctgctcatattattttgaatgatttaattttttttatttaaataaggtacccttatatacataaatgatttaatttagtaaaagcttttgtttatattgcttttatacaagtttttgggtatgactattttaacctcaatcctcaaaactataatatctattattgcacgcttggattttatatatatatttaatctataagaactaaaaaataaaagtgatcatagtcaaataatttttgcataaatacttaatattgctacccaaaaaaaagaaaattgcataaatttatgtataattacattatgaaaaattattgatatgttgatatacagttttctaggaaatatcaatatgaaaagaaaaaaagaaaaaaaaaacattgtaagctatttcccttgaattacactatatgtatgtgtgacagtatatatgtgtgagcttaatcatataattaccgtaacatcactattgatcttgaaagttacgacgacaaaaacaagattccatcatagatctacgtgtctcttttgtgtgattagtatataaccaaagcgattaagtgaatttaaaatttgtagatatttcttacttaactgattatactataagaagcaaaccccaaaaccatctgcatctcaacgacgataatcgtccgaatagagtttgctgaccaaatgcaaatggcatcacgtctcttgccgtttgacgctagcaattacacttcttcattgaaactttaaaagtgaacccaaagaattaactcaataataactgatgagtatacaaattattgtttccggctaaaaacctgaaattaactcaaatttggaatggggatattataactttgttcccacgtataacaaattagttcataattaagaggagaatcacaaaaataactgatgtattgatgttcaattttggaaaattaagatatttccaatggtaataatctgttacagccttactgggagtagtatgatactaaaacagtaaatgcattttagaccgacataaacaataattaagaagaagaatgtttgggtcaaatctcaaagttagatattatttttttgctttttgcacaagaaaacagaaaccaaaaaccactagtcaaaaaaccacccatgtattcctcctagtctctaatccaacaactatataaaaacctctcccattctcattttgttactcatcccaaaaataaaaagagtatctctctcacacacatacacaaacttgacagttttttaatttctctgttagtgaactcaaaccttcccatttccatggacaccaaaatcggatcgatcgatgattgcaagccgacgaacggcgacgtctgtagtccaacaaacggcaccgtcgcaacaatccacaactctgttccttcctccgctatcaccatcaactactgcgacgcgactctcggccgtcacttagctcgtcgtctcgtccaagccggcgttacggatgttttctctgttcccggagatttcaacctcactttgcttgatcacctcatggctgacccggacctcaacctaatcggatgttgtaacgagctaaacgccggttacgctgccgacggttacgctagatctcgtggagtcggcgcttgcgttgttaccttcaccgttggtggactcagcgttttaaacgcgatcgctggtgcttacagcgagaatcttcctcttatctgtatcgtcggaggtcctaactctaacgattatggcactaaccggattcttcatcacaccattggattacctgattttagccaagagcttaggtgcttccaaacggtgacttgttatcaggtaatcacaaaaaatcagatctaattagaaatattttgaagattaattagcgtcggattatgaatgattttggttctgtttttgtttctcaggcggtggtgaacaatttagatgatgctcatgaacagattgataaagcaatatcaacagctttgaaagagagcaagcctgtgtatataagtgtaagctgtaacttagcagcgattcctcatcatacatttagccgtgatcctgtccctttttctctagctccaaggtaatttatacttgaactctgatcaatactctgtttctgcgagaattaaaactcacaaatggttttatcagattgagcaacaagatgggtttagaagctgcggtggaagcaacattggagtttctgaataaggctgtgaagccagttatggttggtggtcctaagttgcgtgtggctaaagcttgtgatgcctttgttgagctagctgatgcttcaggctatgctttggcgatgatgccttctgcgaaaggctttgtaccagagcaccatcctcatttcattggaacttattggggagcagtgagcactcctttttgatctgagattgtggaatctgcggatgcttacatttttgcaggtccaatcttcaacgactatagctctgttggttactcgcttctcctcaagaaagaaaaagccatcgttgtgcaacctgatcgtatcactgtggccaatggtcctacttttggttgcattttgatgagcgatttcttcagggaattgtctaagagggtgaagcgtaacgagactgcatatgagaactaccataggatctttgtccctgaaggtaagccattgaagtgtgaatcaagagagccattgagagttaacacaatgttccagcacattcagaagatgctctctagtgaaaccgctgtgattgctgaaaccggtgattcttggttcaattgccaaaaactaaagctgccaaaaggatgtgggtaagtgtccagaaaaaaaaagagactctaatctttacacttaatatagtgaagtaggcacaagatttgaacctgctttcttcattgtaggtacgagtttcagatgcagtatggatcgattgggtggtctgttggtgcaactctaggatacgcacaggcatcaccagagaagcgagtgttggcattcatcggtgatgggagtttccaagtcacggttcaggacatatcaacaatgctgcgtaatggacagaagacgatcatcttcttgattaacaatggtggctacaccattgaagtagagattcatgacggtccttataacgtgattaagaactggaactacactggtctcgttgacgccattcataacggtgaaggcaattgctggactgcaaaggtaattaaaaagattgatgacaatggagttttagccagactttggttataaactaacatatgaatttggtgtgtttgacaggtgagatacgaagaggagttagtggaggcgattacgacagcgacgacggagaagaaagattgtctatgtttcatcgaagtgattcttcacaaggatgatacgagcaaagagttgcttgagtggggctcacgcgtctctgctgctaacagccgtcctcccaatcctcagtagaagaagcaacacagaatcttcaatgcttcttaccaatttagtgacattttctgataagtgttgatttttcgaccgttgggtttaatcatgtttcaaacttattagtatctctttccatgtacgctttatcatggaataaagtaaagctccttttgcagtttcattagattgaacaaatccaaatggttcaatctaaatcaatttggttaatatcatatgatcttttttgcatttaaacttgctaaaaaatcgaactaaccatgttttgctagaattttgaaccacatatcctagtgaagaataccatccaacctggatgaccaatctattgaagataaatgtcagttgaagggcttaaaatcatatcacttatatagctaagtttcctacatataacatgtattaacacattagttctgtatcattggagctagtgaccttatttaagatgctcattcatgtctctgaatgtatctaagtttaaacaggagagattttgacagtgaacgggcatcttaaggatcaacataagaaaacaaaattaaatggttaagatttccaaactcaggcaagagattttccagaccattctcgctcccttcgtttttgtttggcttgcattctgttgaacttctcttttcccttttcaagaagagggtcaaccaccatatacgcatctggatcatccctgcgtgacattttatcctgcaggatagtttcacactgtcaggttcttccacaggacactataaacacaaacatagctcagccttctgatgaaatcatttgtgattagcatgcactatcctatgaactactggattttcgattttaatgttaactaaacagaacaacgtagtaatgaatccattagatccgcactcaagtaagatggaaccttagagatttaccttgccacgctcaggagcaaacttgagctttacattcttccaatcagagagatcttcttctttattgtcaactggttcactactcgaggtcaacactactggttcattactcgaggtaaacggttttgcagagatagactgcttaaacttctcgagttttgctaacacctgaagaaaacgcaggagggaaacgatgatcagttcaagtaacaactgaaagagtatcgaattagatgagtagtaatacagttgctctgacaaaattagatttaacttttagggaataagtatgccacaataaagcaaggacaagtttaggaaacgaagaaggggaatatataataagccagaaaataaatttaaaattaagccacaaatttggtaaacaacttacagaatcctcatttccttgcagtctgcgctttttcaacttatgcaactgccgggcgcgttcagaagcgttgtaaagctgtaaatcagtgtctcctttctccatatgttcggctttggcttctgagcctattcctttttt

SEQ ID NO: 31544 - DNA, 6503 bp, Arabidopsis thaliana landsberg
caactgagcaattgagaggaaaaagaaagtatgacatgtaaaaaaacagaagaaacagcagactgaataaaaatgaacgagaggactaaagcccggacaaataaactctacaaatcactactaaaccaccaccaaaactgacttctctaaccttttaacatcttaatttacacaccccctgatatcttcaagcctcatcgtttctcgtctatggctcatctttttctgtacacatgaggaacaccaggaggcagatgttacaagtgttttttggagcggtatgtatgtgcacgagtgcctctttatctgcctcacatccaagccagagaacctcctcggtcatttgaattttgtgggcgtcctcgggttggcgtcgctggcctatttgcgttcagctcctgcgaaaagtacatactacgctaagtaccaatgtttcaggtcaataactatggactaagattcagtaatgaaatgaagcaatatgaacctgcatccatgtgtcttctatatgtctttctggtgaagtttcaggcgatgaaagtgctggaggtaacggatgaatgagcttaggtaccactacaagatctctccctagtaccaagatagccccagcattgtttgcagtacctgagatttagtataaaaactattaagaaaacagaaaataaccccatcaaaatatcaaaatccggttatggcacttagtgagtccatgtacataccacaatagtttgtagcagaaaagagcgttatcaaatgcccctgagcaaaacgctcaaatccatccattacgcattcgtgtgctcgtacaatcaactgaagatcgttgttgttgcagaactccatgacacggtcaggctacaattgccaagttttggtgagtaacagaacaggtaaaaatgaaaagcaaaagcaattaacacttcttcatatggtaaattattgggagcaaactagactatattccttggtttcaagaaaaaaatatcatatattcttggtctaacaatagcagcacctcattgcacagaataaatattgtgagaaaagaaagagattattggttttctgaagggaggaaaaacgaaattcagacaacataaaattaaaacacaagaaaattacttaccccaaaagtaaccaatccagggcctctagcattgggccttaaaccttcgacactgtcattttcagttggatccgacctagcaaatccaaattaacaaattagtaagactcgaccaaaacattaagcagaccaacatatagaagctaaggactaaccataataaatccataagaacaatggagccagcttccattgtaattggacgttgaatattttctatctgctccacatgatttatagaacgaccaatacccccatgcatacagataattttcttctcaatcgatgcagcaagaggtagccaattgaataaacgatttattcggtgccacacccagattccatcacgttcaccctacaaagcaaccacaacatgagacaaataaacatggaaacaagagattcagaagcagattacattaccattcgctcaatacactctatccggaagccaaaaagggcattgatatctgcagcttcatggtttccccgaattaagtgtacattatgctggtactcaacctgcagtaccaaaaatagaacgtcaaaccttctatggtcaaaagcaactagaacacctgcatcaaggcaaaactgacataatacacttaggactacctttagtgcaagtagaagggagattgtttctagactgtgttgaccccgatcaacatagtcccctaagaagaggtagtcgatatatctgacaattaaacaacaaaatgagcaatgtccagcaaaaagtagcaagaagtagggccactgatgtcacaagttttagtgatgcacttacgatatgtctccagctgtagatggtgaaccatattcatcaaaaaggcgcataagatccccaaactgcccatgcagatcaccaaatattttgataggagctttaagctgtaatacagtcggttcacttgcgaagatacgttctgcactatcacaaagatcagctatttcattgcaatctaggaaaaactgccgtcgaacaggaggcttccaaccacgaggcttcaaaagatgagctataacctattaagacatagttaggtcacatattgttaaaactccagaatcactaagcgagtctttaggcacccgatgcttaattgaacaataagaggatgcaaacgaatcttcaactatgagttaccagtaatggaaaccaggagatagtatacctatacaatagcttattcgatttctatcacaattaaccaatgccacagaacgaaagtattatataatagttcaagattgtacccttttcataatttcatcacactttaccagatgtattactgtgtttttaaatccacatgtaggatcccaataatacagaaaattatgtcgataatcaaaatctttaccttctttggaacactgttgattgacatttgtcgatctaataatttccttgctgttgtcgcactttctggtgtaccataactgacacgccgtccctcattttcaaattgatcaatggataactgtctaaccattccacctaaggcgccaccggtttcagcagcaaccaccacctaaataacaaagtgccagaaacattataaaccagaaatgctttagtggtgagaatttggggtaagaaatactagtaaatgaagaacatggtgttcaaagtagtataatgcaagacttgatatattcaatacaataagtgtgacactcacagctctatgatgaagacgaatccctgcaggtgtaacactcattgagcccatagaatctggcttgattagcgaaaatgtaggtttcccactgggtgtagcctctgcaccacaatccctatcagggagttcaacttcaccattgacttgtcttgccttggcagcagccaacgtcgcactgatcgcctcagcttccgctgctgatgcttcaacaagatactccacacccttattcgttctcctacaaagtggtgatggatcattgtcactaaattcatcactgttttaacaatacggcacaagataaatcattctttagggaagttagctaaccgagttcctggaagtaatgcattttcagggctaatatcagtatgcatatcaccatttacagggggtgcaacagggcttcccagcaccacagcgccatcagcagctgattcagataactccctgttcctttcatctgaaaaaccataccttccaggtaatcgacctggtggagaatttgttgccgcagctgcagcagcatgagaagcagcatatgttgtttccgcagcagcaagatcttcagcaaccaataagtcatcgagtaacacccctaaagtatcaacaatatataattaagtagtgaaaccataatttctaaagaatgcaggaattttatatattcgctatttctgttatggtctctcagattctgacgaaaagcaatacctagtaaagaaggcgtaattctacagtagcacacactggctacacaatgtacattatgccacatttaaagaacaatccaaccgtatatattggtttatcctcattaagaagcatgcaaaagaattgtgatatctaaacaatgttggtctgtaacaaagcatcaaaggtacattagcaaagttctgccagctctttacctccacgtaaaccgccgtagataaatatcaaatcaccgactgcagcagcagcatgcctacaccgcctagtcagctcaaccgaagcatcgccaccagctgcatcggcactatacctaccagttctaggactagtaacaactgattttgtatcacaccatacacctgctgcagtatccaatactgtacaaagacaatagatgaaataatcagagaattgtagatgaactcaatgcacattttagtacaaaaccaaaatatacaactatcgtctatacatgagacacatttcaacaatggccaacagaagactaaaagtggtgcagaaattatatggaaactcaagtatttcctcaatgataatccaacagcacaaacatcagactgcctcttttcatttgctaacctgcaacactggatgagtcttcaaccatgcgtccaccaccaagtgccccaccggacacatgaagtcttgcatttacaaagacctaaataattaaccaaagaatttaataattctgatgaggacagaaaagagaaccaaagaggaagaagcatccatactgctgcatgctgatatctggaagatggtgagacaccaggggctatggcccattcccaacgtccatctctgtgcttcgcaagtccatatgcactggccagaggctatcaattcaaacgtagaaaaaaattaagctcctcaatcaaccattcaagattaaagcagtccattaagtttcatatttcactttacgcagaattgacaacttctcatgatcatgtataaacacataattgataataagctcattccttgttgacaaaagaaattatagttccttttctcgtagaagcttcacgaggtcttgcacacaatttatgtttgttacttcttcagagtctgtgttgaaacacacacaaactcttgattaatttacttagcagagaagagttacatctccatctgctctggaacatagaatgaagatcgttcattggaccattaataaatttgtagctggggaaataaaatacttttcaatttgctcagtgacaaaactcaacctctacaaattaattgactaaatctcacggtcccatttttatctcacactaaaagcaaaagccaaaatagaatcatgcctctataagtggctcagtgtttgtttcaaagagataattgggtatgactgtaataaatctcttcacttaccacactgtttgcatcccttccaccacagaggagaagaagaccatcggagcgcgcacttgcagttgcatacctagttacaacgtacaaacagatataaacaattactccagaaagctcacaatcataaaggagtctaatcaaacttacatgcaggaaggtggaccttccccttctggttccaacttacgccattcataaggcttggcggcagtatccaaggcccatacatcagcaagtggacgttttcctagtagttcgaatggagttcagaagggtgaagctttaatgagaatatgatacccttacataaaacactgagaataagccaatatggaaaactgcttaccatcatttccaccaattgccatgagatacctttgccccacgagtgccatgacatgtccataacgaggtcctggtccaggaccctgaacaacaaccctggatagagacataatcaatatcaagacacgaactagtaaaatgaattttcaaccgagatagtggcaggcatattttcaaacctgtgccatcgtggccgttgttgagtgagatcaagaacatgaaggtcttcagccgataaaccagcaggaccaattccaccctgtacaacagaaagaatttataagcactttcatagctgactggaaatgctcatcttacattgataaacttaaatcatacacataatataaaaacatcatttctcccctacctgaataactaccatggtcccgactgcagttgcaacatgtgcggccctcggggttggtggttctccaaaaggtgtaagcctgtagcctcaattcatttaattaactggtatccacacttttaaacggggtaggatctcatgcatttttcataattagcgtgaaaacccaaagacattcacatttaatgctcacctagtccacttattagaaagtacatcataacaatgaacatcagcagttgccccagctagccctgcagagaaaagaacacccaaattaattaatacaaccagataaatctaggaaccttaagaaataacaagaactagaacatagaatctatcagcaaataaacggaattagtgatctaacattccacagccaatactgtgccctggtactacatcaagctctttgctctaccgattccaaatgaaataggatgcaataaatgttgaggaaacactgccacctcagattgccagttaaatttaacagatgtgaagctttcagaactaaagtttccaaacttagacgatctcacaagattgcaagcaaataaccagcgtatatctttgaaataggtaaatctttaaaagttcaaggcttggcaagggccctctatcagaataattaagccataagaaaagagttaactttttcaatcgttcaggagagaaccttcaaagcaaggaaggcaaactacaacttcacaatagttaggcaaaggagaaggaaaatgtagagcggtgatacttaaaactatttaacaagcagagaaggaaaacgtacgaatgccggcacttccagctgaagtaggagttccggtgccaccagaatttccct

SEQ ID NO: 31545 - DNA, 1689 bp, Arabidopsis thaliana landsberg
taaccgttcggttatcgtttggtttcgaattgagccgtgggaaacaaatcaagttgaattaataatgtttagttcctttcttctcgtcttccgtcggagttatatctctccgcctctgtctccgtcgagactctgaagtctatatctctctatcactcatcttctccgacgcctctcgttcatccaaaaagctttcctatctgtagatttttcaatccctttttttagcgattcagatctttagattatttttttcccgatcgatttcattgagcatactctgttttcatctcacctgttcaatggaatcaagactccgaatttatctaaagagtcttgatatagtcactgttgtatagttttgtttcaatttcttagattatcaaagtttcaaaaatcgcttttttagatcgaaacattgctctgattgtttctctatattaatgcatcattgtgtgtgtttaacttctctttagaaagaggtctcattgatggaagaagacgaaagacgcgacattgttatgtcaagagcttcttcttgtatgcagtggagtcagtggcaattacttgattcaattttaccaacaggaggatttgctcattcgtttggtctcgaagcagctattcagactcggttagtttcgtctcctgaagatttagaaactcacatcattcatgtgttggataacacagctagcttattgcttccttttgtctactctgctctcaaatctcctgatatagagacatggcataaacttgatggaatacttaacgctactttaactaaccaagtttcttcaaaggcgtcaatgtcacaaggatcagctttgtttcgtatagctgcttcggtttttactgaggtaccaaatcttaagatgattcgtgatgcttctttggggtcaaaaaatgtatgtttccaccatgcaccgatattcgggcttgtatgtggtttactcggcatggattccgagacttctcagagagcgtatctgtttgtagcgctcagagatgttctttctgctgcaacgagattgaacatagttggaccgatgggtgcttcggtgatgcagcatcgcattgccattgttgctgaaaccgttttagagaagtggatgaatcgtgaagctggtgaagcatgtcagacttctcctttgctggatgttgtgcaaggttgtcacggttacttgttttctagactgttttgctcttgatgaaaacatatgatataacctcacttaggttacatcgattagtgcatattgttaattgtttgtagtttatgtgcttattgttaatttttcagttggatcatatatgtgtatttgtagacaaatctgtttttatttcgttattactaatcaacaatatatatgtgacctagaatccataaggaaatatgaaatgtgtttcagaaagtcattgcaatcgtctatcaaaacctctcacttccttcactcagaggaccgggtctcgtggtgtggtgccagtgccctgccgcagagaagagcgttcttcgggatcaagtactcatctctgagggaagtggagggtgtgtaaacacgcatgtaaaactgttgtcccaggtattgtctttcccataactctgatcttaggttccacattcctacattgtccagtgatacgtatatggcagtccatgatcttggatacacctgcacaaattca

SEQ ID NO: 31546 - DNA, 2665 bp, Arabidopsis thaliana landsberg
ctcatttaccaagtttgcaagatctgccctgcaaaataggacaaaagagtttacgagatatacacccaaaaaagtataacagaataaacttcaaatcattgataatatacaaaagcttaccccgtgaaaccagtggtcattgaggcaatactaccgaggttgacatcatctcccaaaggaagctctttctttgacacatgtactctcaaaatggattctcttccaattttgtctggcgtttccacctgaaaaatgcatcagtgcctttgaaataaccttattaaactgcataaacatttacaaataggcagagctaatccattctaccaaccgtaacaacacgatcaaatctcccaggacgacgcagggccgggtctaagacatcggcacgatttgtagctccgagaacgattaccgcagaattgctgtcaaaaccatccatctcctgcagaaagtttccaacatgtgaatgggtcatggaaagatcaagaatgctacttacacaggaaaggtgcatgatagcagacttacagtgagcaactgatttaaagtttgctccctttcatcgttgctccccattctgaatttaccatcacggctttttgccacagcatctatctggagtatgaaaggcaaatagaaaatcttgtttaagatgcccagaggtttaacagaccggaggtaatctgacatcgactacctattctaacctcatcaataaatataatcgatggagcttccttcttggcccgtgcaaaaagatcccttacacgtgaggcacccattccaacatacagctctacaaactcacttgcagagcaacttatgaaggggacttcagcttccccagcaacagcctttgcaagaagggttttccctgttccgggaagaccaacctggaaaagaaaggaattaaaggcatatcattctacaggagagctcttgtaaccaaacgttaaaccatgatatatacgtaatataagaataaagtgaaatcaaatgatataactcaccaataggacaccacgcggaggacgtgcacctagccggacatacttgtcaggattcctaagaaattcctgcattgattaacccatgtgtaaaagacaattaccaaaccgagaataaagctatgaaaaacaatctgatcatcaataagcatgtgcagcgtctttaaggactgaaaaacctactacgatttcttctagctcttcctttgcttcatcaacacctgcaacatccgcaaaagtgattgtttcacctccaccagagacttttcccccatcaggaccaccagcctttcgggtcctaagctggccggttgaactctgtgtacacccatagttctttaggaaattcaacattttaaacaacaacattaaagtatagtagagatgcaaaccgtggagaagctaacagggaatcgaataagcccagcaagtaccgctatgtagaaaagagctatctgcaacaaacaaaaatagaaacttttgaaaagacccaacctattttatagcacaatcaccattcattgcaaaactataaagcatcatcaacaaggagtagcaaaaatagtaaaaatgaaactctaccaatgcagagttgaagaagccaccagaacgcttctcaggcgatccaaattccacattattcccaagcatcttctcatacggtgttttgatatcacccggcctagtagtggaatacacaacccttttcgtaggagccacagttcttaacaacgattcagacgactgagacaacctactagtttcactctcttgccacttcccatcatctcttaacttaaacaaaacttgaaccccatcaacctccactttctgcacctggttactgttaactttacttaagaactcactatacggtacactcacaaaagtcgtctgaattcgaggctccgaaccaggtaaaggtataccaggtcgaagcaatcgcatcacaaacataacaatactcaattgcaacaacaaaactccaatcccttgcgcttggattattggctgccactgccatttcttcccctttgaccaccacaccttatcttctttcttctctcttttcctctccgacttcgccggagtactctgactgctttcttcctcctcactagaactctcgttctgatcatcttcttgacaattcacaactaatctactcttctttcttgaaaacccatcccaaagattaaacctttcgtgatttctcaacactgtaacttgtttcttctgcagaggaagcgtgattgaattggagacaaaccgattcggattttggcgataaaccctacaacgatcgttgaaaaatctcgaagctttcgagtacaatagactattactactacaacaagttgcaaatccgtggattcttggttgcagaaattcgaatgtagtagtcattatttcgaaaccctagaaattggggaaatcaaaggtaacacatttatatcgatctgtctaattattcaatgaagacgatgtttgctgggaaatacgacttcgaattgtgaccgttggatcaaagatattaaaattcgaccgtcgatacaacggaggacggttaattatctcatcggcaaagctgagtaatcaagtgtgacacggagaacggacaagaatggtgcaagaggacacgtgcacatataatt

SEQ ID NO: 31547 - DNA, 615 bp, Arabidopsis thaliana landsberg
gatacaacccaatattcaaaccccaaactccgctcgtaaagcatgatcaaaccctagattagaaaacaagagagcagaggaaagacaagacccatctacgaggaaacttgggtggctactgcagataccattgagttaatcccacatatatcgtgcccacgacacagcttgtagtatccattctctccccactttttcccccacgagtttttgataatccaataaggtttattactaagccgcaagatcgaaaacccttttgatccgtacccaacaagaagtaccccgtggttaacgtttcgcttgctgcatataagcggacatgacactcctcctatatatgtttgcatgaacacggcgtttaatcccactgtggaacacaacaacaaagcgtgttaagaaaactatctaaagactcggacttcaaatctgttttgtggttgcacatatacattagctaatatatatcacctgctaagggaccatgccgaactaagtttgctgcgatttggttctcatccagtggtatagtcgtgaagttcagtactcttaccgcaaccttctcaggatcaaacttgcaatggcctcgtttaccagtgtaaggatatgatcttt

SEQ ID NO: 31548 - DNA, 1525 bp, Arabidopsis thaliana landsberg
  unsure (1)..(1525): unsure at all n locations
tgattcttttatgcagcttttcaaactagttcatgattctcacatgtaacttttactttcttctatatatattcttctggatataactgaaccaagaatatatgtactttaaaaaaaaacttgatgacttcaaaattttattgttacaaaaaatgatgatttgatcattactttgaatagaagatgaaaaatgagcatataggtgacatggtccaatctctagcaaagattgtagatttccattttatccttgtggtaggtaaacttacaccaatgatgcgcaaacttgtctttttcgtttattttattatgtctttattaatttctgcatgaaagttattagtttctcagaaatcacttttcctttctatgcgaagtaatcttaatttactagaaaccatgcatgtaaaagcgtttctgtatatatattggaaccattttcctttacccatagaaatctttagctcttaaaaattttcatatcttgaacagttgcactgcttcaaatgcttgtggaccggcgatagaacattacaaattaatctcttttactcatataacaatgagatactactctgtttcctttgttaagaagtaaacattaatcaatctttaaaccgttgccttaattagcggggttaatatataggtcagtggcatgatactgaaaatggtatgatcaactagaaataccatctcattaattcaacaatgtatggtaccttatgaagaaaaagtgatacaaatctactgtaaaactcttgttcaagcgtgcctccagtcgcacttctggacaaaacaactttataacccataatcccaatcgaaacttgaaggtatggttgcgagtaagagattagaagaggaagacactcaagggctttgaaggttcttgagatcttcttctttagcgtaccaagctggtatgatcttggaaaggtgagggtaaagatctttgtaagagtttcttatagttccttccgcgactccagttgccactgatatatctgcaggttcaaaatttcaattacagtttcagtgatgttaggctgttttcagttcacaaaatgtgaatggaacatacctcgaagagtcttcttgtcatcagacagctgggttatgatatagatgactactgctgctattgatataggactcctcctgcaatttcccaaaataaacatctttaagattctgctgtgtttatctccgtcccgaactgagggaaataattgaaatgtaccttatatcaaattcctcagatttttgcacagcttcctgagcagctttcaccgcatggttagacattgcaaggttggagcagaaccttctctgcaatttcatcaaatacagagttatgaaaccacgtagtcaatgcagccagcataatcaactgtttcataacataattagcacactctagctaggttctggtatcagcaacaattttagttntagacaaactcaccatgaaatcaccagcgtgtatagttcctaaatccacagactgaccaggctccagtcc

SEQ ID NO: 31549 - DNA, 3774 bp, Arabidopsis thaliana landsberg
  unsure (1)..(3774): unsure at all n locations
atataagcaattatggtattaaaggaattgttcagacaatgtaatcatatatgaatgatatacatagtatataccacttgtttacgttttcagttttcatgttttgataacatgattccgctgttttgtaccattcaaaatattcatcatgttttcatgttttggaatgtgattttgctatttaccactagtgtgttaaaaatataaatcaaagaaaagaaaatggtgataatctaatcaaactagctggctttccggcgttttacaattatttttcttaaaaaaatctagtttagttcgttccactaacaactattctttaattcgattattttgttaattagctaacataccggtcaggaatgtttttaacaaatatacaaaaaaaaaaaaaataggtgacataccagtcatgaatttatcatataacaaatatacaaattaaaaaaaaaaaaaatagatataattttttagtgttaatattttgtttaccaccctcacaaagtaatatatgttattaaacatagatttatatatctcttagaaactacttgatcaactcaaattaaataaagagaaaaataaataagagtacttgatcaattcaaaatacattagtaatttagcagttttgtatcatttgtcaatcgtatgagagaccccttctactactagctagcgaagacctacagggcaaaatgcttccactagccgtacataaggttgaatatgtactagtgggttcaaggtcaaaccatgcttgactcagtatttttgctggctggaattttattctgaatgcgtcaaaatgaatggtgaggtaatggacacagaccattcacttgtgacaaaaattatttgctttttttattattattaatagtatcaataatgtacgtccaagtacttcaatatatatgataatgtacttttgatttttgataagtcacatagggaagaaaaaaaaataagtgggctaatagtcattcaaactaaaaccctactatttttgggtttgtcggagtcagatactaatcatatatggcttacaacataatggcggttgcggttacagcggtgctgtttctagcggttgtgatcgctcctcagtggacagagacaaaaaaaccaccacgaccgtcggatacatcgggtacatcgggtagagacagacgtacaatgtgcccgttatcaatccctggaatcgtccaaaattgctacgcaacgttaaatgcgtttccatcaaaagaatgctgcaaggatctcaaaacggcaagcaagagagaggtgacttgtctctgcaacaatgtcattgcacatccagatcctctttacaccaacaccaaccaagtcaacaaggcatgtggcgttcttgacaaatacgcatgcgacggtactttctttggttttccttttggatcttttgtggtttatcagaagttatagttttaatcttgtgattgatttttgcatgttgttatgtagttgcacatacctttactattgtttacatagctaatcttacaccaattatgacatgatgatcatcgctgttattcaagatccataaaaagtaaattaaattaaacatcggttaatatattccgcggttttgcaaatatcttaaaaaatagtacagtatcttaccgtaccatattaattagtgcaatcttttgtcaaagataattagctaactagtgcagttttaaacaagacttatttatggtatctaattgatttcggttttgtgtggcaaagcaggcaactctaatggaggagcaacgaaaaagattgttgcatcaatgggcctttttggtgtggttgcaagtctgttcttttaattcaactctacaaaattctgtgtaattgttcttctcatcatttttgtttgttttcaaatctgactactcgaacatttatcgaatcaacaaaccttaactttaataattccgcttcgtcaatgttggtattaaaacctggtctgcgtaatttgacagatgtgtatagattattttttaggtttgcattggttaatgtgattatcacgtcttcatacaaatgccccacccgaaatttcatttcaatatatattatggtaagccgtacgcagatgcagatcatttaaacatatttgttactacaagggtctcaatattcttatcaatttttagtaggtctaattaagatgtccagttatatacatttaatttgaattacagtggatttaatgaaacataccaaagtacatacattcaggtcaaaggcagtgagatattttattagtagataactatactagcaaaaacaacatactgaagaagcaagctgaaatatatattggtttgcgatgaagttgtaatttgaccattcacaaatgttcttaagaaaaaacaagaattgtttcataaacaagggaaaaaaaaaaaacgcatcatcattattcattagctaacagcaagaaattgaagaagcaagttgaaatcatcatgtatgcgaaaagcttggtaagaaccatcgagcagagagttcaagtaacgaacaatcgaaatcatattttgtgcagtggctccatctcccgtgtctcgtaattgaacagaaagagatcttttgtggtcatgtcatggctatcactgaaatatatagtatttctatggagtccctcaacttcattggcgagcacggtgatgcctagatccaaaagcattgcctcgtcgcccaaagaatcagcaagttcatatttatcaagaaatgtccctgacgaataaaacttgtagacgttgaatgactggattctagaccaatgtcttaacattctttcaaccaagaggacatctccggttactgtgactacaagttttgtctcagcaacgcaccatgaattacttaattgacgactacgaggacttaaccactcagatctatagacatgcataaaacattgaaaggcttttcgaggaatctctccagaaaaatctaggattgtgaaaagatttctgtagctaaatgagtaaagcttgtgatccttgtaaaccatgtcaagagaatctaaaataatttctggaatttgattccacaacttatctccgttcttggcataaaccacacaccaatatccaagcccccacagagctatgtactctttggttttctcgtcaatccaaaacacaggggtacgtacggtattattacctttgaataacttaacgtggttgtgatcgtcgaaagttagaaaatcatcatctatggtttggtcaacctttaccatgccaacttgttgtgattcaatagcgggaagaccgatcttctcgtaggtgaatggattcaaaatgtatagattatactttgaatcttgcatcaggagccaacttccataggttgctagacaaacactctttgcaaattcaacaccaagatcttgcgtttggtaaagttggtctttgtcctcgggattgaaaaaaatcgtgcatgaactgtttttgttgttgtttttgtctttggggaagagcatcagccaagggatctgatttttgggcacggattgtttcgaagcagagtaccaagacgaacacaccgatttggcttgtcnnnnnnnnnnnnnnnnnnnnnnnnnnnnnnctaagttcaagagatctagaggaagatccgaccaggtattagggttttggttcttctccatgaaaacgacaatatttgagatatatagagagagttctcttatcaacaaataattatttgagtgaggagatatctctaacaaaagattgtacaacccga

SEQ ID NO: 31550 - DNA, 1098 bp, Arabidopsis thaliana landsberg
tcatcatagtagtaagcacccaaatttccccaaaattccaaaggtactctcttcttttttattggtcataccttaattcgcactatttcaataactagtatatctcaaaattctaccaaagtttaattttactatgagttaacatgttggtgaaattaaagaactaaaagggattttatcttttaaatagctcattaataaattttagttatcctcttctttgattataataaattatatagattgtactctcttttttcattgtaccacaacaacaacaacaacaacaaaaagcctaataaattaccatcaaaatttatttcatattgaaaatctgagttagaaagaactattgcccaaaataacatcataattatataatatctttgttcatatcataatccaaacgaattattcctctgatgaaatttgatttgcatctctagattctggtacaacccaccggtttatatttttcaacgacgtagatacctacagaaaaaagtggcaacaaacaatataattaagctccaaaccaataacatagcttgcttgaacaaactaattattttggaaggggaaactacaattttgtttatttaaacctgttgatcccaatctgttctgagagtcatgatggtaagcacacaagtctgaacaaatattccaaaaagcattcctatccatacacctcttcaaaaaaagataagtaaagttttatgttgttttcaattgttaattttattacttgggttcattatgaagaaaaaatatataaagagaaaaacttactttgacttgcaaaccaacaacgtaaccaaggacaagaccaacaggaattccgagaaggtaatagcaagcaaggttaatgtaagccacatatccttgccatcccgctcccactgccactcctgataaggtttgaaaccaattaaaggcatatactacgtttcaaatatcagttcgaattcgatacgatgataaccatcacgcttgaactagctaatgtatatacctgagagaacgggttgaacactgttcaagaggatggaaaatgctaaaagtggagaaagatcagcgacttcggctgccacagct

SEQ ID NO: 31551 - DNA, 254 bp, Arabidopsis thaliana landsberg
ttaactagagtaaactaacatgttgattgaaaccaaaaaacaaaaacatattgaagaaaaaaaacatagttgagatcaacatcatgtaagcgtgaaactaggtacgaaccaatgagctctagagaattgaaatgaagaactatcaaatgtgtgtagtggctccgtcttctgtgtctcaagattgaagataaacatgtcgtaagtgtgcttttcaatgtttcacaatcattattgaaatagatggaattctaatg

SEQ ID NO: 31552 - DNA, 1674 bp, Arabidopsis thaliana landsberg
tttttttcttatatattttccaaaccaaagcccgacggagaaaataattcaagtttagtatccaaacatttatatcattaaatagttttcataaatcatcaaaaaaagtttgttaatttatttctattaaaaatatatatatgttacaattgcagttgttaaatgagacaaaaaaaaattcagttctattagtcaacaaatttgttttaaatgttttaaaaccaaactgtcactatttagactttagagcatcgctctatggtttcttaccatgaatatctcaaatagtacaaaataaaattggtgtgattttctatactatttgagaaggtcacccaaatattttaatttttgttattcttttcacataaatagtaaattttttatttttatttttatttttttggttataaaccccaaaataattttgtgtttgatgaatcatagctaaatgtaacactatctagtgttaatccaaaaattaggatctcgttttcgttttttggttaaacattagaatcttattacaagttagttgcgaggacatcaaatcgacccaaatttgtcatattcttgtcttcacaatcttggaacatagcctaaaagttacattttagcttttaagaataaaatgtgacggtgctaaagacaatctagaatccaatttattcctctgatgatacttggtttacgtctctagattctggtacaacccaccgatttaaacgtctcaacgacgttgacacctaatatatttggcaacaaacggtataagaataagcaccaaaaacatagcttgctaggaacaaattagaaaacatagtaatcgatttataacctgttgatcccaatctgttctcagagtcatgacggtaagcacacaagtctgaacgaatattccaaagagcattccgatccatacgccctaagaaaatttagagaataactttttttatgttaatttttttactttcacacatttttgttttcaagaccgttataaagaaggagaaaattataaagaaaataaaacttactttcacttgcaaaccaacgacataaccaaggataataccaataggaattccgacaaggtaatagcaagcaaggttaacgtaagccacatatccttgccatcccgctccgattgccactcctgttaaggttttaaaccaattatagataaatactactccaaatattggttcgaatccgatactataataaccattacgcgtcaactagctaaaatatataccagagagaacaggttgaacactgttcaagaggatggaaaatgctaaaagtggagaaagatcagcaacttcggccgcgacagcttcacttgtagtgaaaatgtaggaaattcttcccctcaaaaacaaaaaaacgaagaatagaactattcctatagagagtgacgtgaaaaccgctatcaatgttgcaaacttggctcctttggggtttccactaccgagctcgttggacactcttacactatttatatagataattacaaataagatgatatataaataaaagatcataccaagaaaaaaagataatatagaaatagtatcaataaagtgaagtgtgttgtatataatctatatatgtatcaatgcaccttactgctgccaaaaacccaagtgctatcatcatctccagtgcatt

SEQ ID NO: 31553 - DNA, 1934 bp, Arabidopsis thaliana landsberg
  unsure (1)..(1934): unsure at all n locations
ataaattaagtttgaacgaagctgggccatgagcaaagttctttggttcacattggtttaggcaacttggtgctggtttggctttcttgacttatccctcgttatgaatcagaccggttcagcttgttgatgcatcctttgtctaggccttcttgctcgttggcaaatttcgtttaggtagtctcaactgcacagaattaagattgtagatcagactaactgtgtaaacagaaaccggaatgcatgttattattgcctttacagacctttgattttgtagtcctccagcctcctgattcttgctgctgatttggggagtatgcaaatctgtctattgactttaacacatcactcttatccacagctgcattagtctcagcaagaggttcctacaatacccattaggttattattatttttgcacagataccacaagctttgtcctgaaagagtcaaaacaaattcgcttctatttcaaaataatttgcagctccatttgttccaaactgaaacctcaaattgcttctaaagacttaagggtatgcaagaataccttgtgctttaacgttgaatccttgcttgcagcttcattggtgacttctagatgatcagcaaagaacaaaatctgcaaagtaaaattagatcttgatattagcgagcgctcaagacaataaaccgaatcacaaatgagagacttgagcactctaaggaatcaccactaagtcagcttactttgctcaaaaactggacatttgatgaatcagtagccatgacttgcactccgagacatgtgtttgggatgctgcagaaagggcaatagatagtattgaaaacacatccatcttgctcgcaccaaataccctgaccttttaagccttcaaattttctgcagagtctctgattaaccattgagcaatctgtcatgataattgaaacacttgttgnnnnnnnnnnnnnnnnnnnnnnngacgtttttttcagaagagacagcaaatactttttcgatgacgaagtcaacaagcaattgacatatgagtgattctcaggtagacctaatggacttctgcagagcgaacaagatagctgcactttctgattcacttctggaaaagaatatatgttgtagttttgggatcttggttcggtaaacccaaactcaattcttcttgttaaactcgtatgatccgagggtctagtactaggcctaggagcatcactgttttcgacttcaaggtcaatgacaggagagctggtaaactttcttcgcttcaaagcttgagaattaacgctcatgttgaaagatgactctgcttctagagtcaaactacgggtgccaccaaatgaatatctctcagaagttgctactacagacgactcggttccaagaggagattttctgaaatttggagtagatatatgctgctttaataattgatcagaagaccccggagatctcagacctactgttgctggactagagctttgattcatcgagcaagaacatggactggctactgaaataccattgatcataccagatgtttcctggacaaaagatgtttctggagcttcatcacagttggtcaccgatgatacctcacagtaactgcacataaaagttgttaggttttatcaaggatctgcataatataaacttccattctgcggtatttcaataagaggtccatataacatgctagttgaagctaacactaacaaacggactactttaggacaattatcaagcattagatatctattaagaaaacacgtctgatttatttacccaagatcaggttggacaccgcactcaaggtcaataacttctctacagcattcagcttcctctttaacttgaacaaatgtctgcgccgaatggcccatggatctcaaatcttcagctatttttggtttcacatctctgtgatacccaa

SEQ ID NO: 31554 - DNA, 582 bp, Arabidopsis thaliana landsberg
  unsure (1)..(582): unsure at all n locations
atgttttataaactatatattcccttttacatcgcttaatgtatttttccatgtttactattaagtgtgactatgtttgatgcacgtcctttcctaaatgagacgaataagtttcaatcattttatttctatgaagaaaccagatgaaaatatcttattaaaggttctaaggaaggggaaagagcatgagtacaatannnnnnnnnnnnnnnnnagtcctcatttgtaatgaaaattttatgactcctttccaacctgttggctatataactatattagttcgcatcttgtttgaaaataaataacatatttccaaccagatgaactatgttattttactattgaactatcttattttacacattcaagtgcaacaatattataaccttccaagttattacatattcggtggttttgtttttgtgcctctccctaaatcgtacattgatgataagtactacaaaattaccgatgaacaacatgtcataatctctcaggtttgcttttctttgttaacaataaaaaatcctcttttaagctcagttctaagctgaatattagtttattgtaaagaatgatgat

SEQ ID NO: 31555 - DNA, 2049 bp, Arabidopsis thaliana landsberg
tgctggctccacgtccatagacggtggtaccggagttcctatgagctccagtggcaaatcattagccaaccctttaagataaaaagtgtagaacagttttgtcggatacacaagctgttgaagcttaacctgtccgtaggcaccttcaaagattccagcgccaccggtgatggcgaggaacgaatcctcgtaagtcaagtatggtccttgtacggacaagtggccatagtctccgaagtagaagctgtacgtagcttcgaatctatcaccgttcttctcagggacgtgttcgatcacaacgcagagaccagccgtgattcccacgcgtttcttgagatcgccggtgtagagtttgtttgtgaatgggacgagatctccgagaccaaacctaaagctgaatgcgtttttaagaatttttgggctgtgtcgatctaaatcattgatttcgtacacgctcagttcttgaactttgcctgaaaaattaaaaactcaatttgtgaattaattatacgttcttgattttgagatctgatattatgtttaaattatcaagtttgcaaatttttggttttaaggctctggaatcatataaatttaatggagttagaaaaattatgaaatgaaaaactgattttaatataaagataatgtatttagaaaatgttttgtaagtatttcattttttttggaaaaagctctgtttatatgatttttcgaaacttaagcgaaaagatcaagaagaaaataaacttacttggtctggggttttcggtatttcccaagttctgagagagagctcgagtaggagtgagtttcttcttgggcgtgaaacttgtcagagaggaggaacctggaccgttagatgagataccaaaattttggaaggatttagagaaaccaagaagagagcttcgatgaaattgtttactatatgagagattgttgagagttgtcatggagatagattggagagacattgtagaagaagccattgctcaaaaaaagaaagactagagacaaaactttgaaatgattagttttttaagagatgggactttggttttatgtggtgagtgatttgagttttacgaaatgtctatgtgtatatatattggatgaatgattgatggctaataaatggtgaatgggataatgctaaatatcccaaaaatgggtcaccaacgaatgatgctatttttgattcggtttccattgacggcaagttgttagaaaatggtccaaatttttgggtcttagcttgggtctaagttgatgtacttttggccggtccctaaactacaaaaagaaaaatgaaaaacgttctaaatgtaatgaatctaactatatttttgtcccggatacatgtatgtaaaattgatggggaagggggggatattctgtggaaagatatttgcactaaaatcacttcttttttgaaacgccaatacttggattaactaacaatgttttcagcataaacggataaggcaagcttagcaagagaatctgtctcaacattggctgctcttggaatgaaaatacatgaacaacttaaaggatagaacactgatttttatatcaggtaggatgccataaagctttttatatcaggtaggatgccataaatttctggcatagactgtaataaattgatagcttagaccaagctttaatagtcgattcagtgcgaaaatgtgggagtttcatctccaacgctagcgtggtgcaccaaaatcacatctaatacgaataacaaaaaaaaaatctcgcaggtagaggtgttgggttcgaagtctgttgggagggatctcttctccaaaaaaaatgaatttaacctggtgtggatcatatctctaggaaatgtatggccttcggacttgcacttctaaatattcaaaaaaaaaatacaaaaaaaaaactaggtattttatacaactagaatcattatttcttgaaaatccatcatctcttaactaatattaggtaatttatgtattttacatgtaaaatcattttttatttaagctataagagttctaggtgtttgcc

SEQ ID NO: 31556 - DNA, 1502 bp, Arabidopsis thaliana landsberg
atgtgtccaactgtccacggaaaaaatttacgtttagttaatacttttttaatactcattaaaagtgattagtgtaaatatgtaataacttaatcgctaagactcatatttaaattaggaacatgaggaaactgaagtacgtggacaacttccatcaataccacttaagcttcaagaggcattgcaaagaagggaagcttccaaactatgtggttatagaaccaaggtacttcaagattttgtcggctccagctaatgatgaccatcccaaaaacgacgtcgttgaaggccaaaatctagtcaaagaaatctacgaagccttaagagctagtcctcagtggaacgagattctcttcgttgttgtttatgatgaacatggtggttattatgaccacgtccctactccagtcattggtgtcccaaatcctgatggtctagttggacctgagccctataactttaagtttgaccggcttggtgttagggttcctgctttgctaatctcgccttggatcgaacctggaacgggtacgtatgttttgaattggaaccgagttgtgttagtttagactttagtgtggtattgtcatgttggtcaaaaccggttataataatttactggtgatgacattattttttagtgttacacgagccaaatggaccagagccaacgtcgcagttcgaacattcatcaattccggcaacactgaagaaaatattcaacctcaagagctttcttacaaagcgtgacgaatgggctggaacatctcgatgctgtcatcaaccggaccagcccaaggacggactgcccctgtaaaatatttagttggttatatagtccatattaaacgcaatatatgtttaatgagtttttggattattacacagtcacattaccggaacttcctagggcaagagacatagacattggaacacaagaagaagacgaagatctcactgattttcaaatcgaactgattcaagcagcggctgtactaaaaggagatcatatcaaagacatttacccgtttaagctcgcagataaaatgaaggttttggatgcggctaggtacgtagaagaagctttcactagattccatggtgagtccaagaaggctaaagaagaaggccgtgatgagcatgagattgttgatctttctaaaggatctactcgtcactcgactcctaagtcttttgttcagaagttattctcgtgtttgatttgtgataattgatcttgagttgaaacagatttgatctctctgagatttggtgtatttctcggattttatgtgaagagcgtttgaaatttgatatttgtttgttttccaaattttatgttttacatttccgaatgaggttcattaggagaggtacctccgcgaaaaacagagtattttaacgaagggttcaacaaaacagagcaaaaacagaacagaacagaggaatttaaattgaacaaaaagcaaattctagcaaaacaaaagagtgactccgtttgt

SEQ ID NO: 31557 - DNA, 592 bp, Arabidopsis thaliana landsberg
tgtggtggatatacacgatcatagagcaaaatacagtctgctaatagctgttgcataaaacgagtttttccaaagtattatttatggtttgtgtcactaggtattatgagtcaaatattttctttgttcatccatcggagattaacttagtagtgtgggtggatctgaacataaaatatgatatggtgtacaagtacaatgaccaactaattttcatgatttatcaaatccagaaagtattaagtatcgtatatggtggcttgttaacgagtatattttaaaatgataaaggctgtctcactggtggacatattttgttcacatgtttagtcggctgtagtaatgaaagcgtgtattatatcacacatactttatacggatcatgcggatgacttaattcgatacacattggagttttgacgacagataatacgatcttaaatcttgattcacttgataacagatatccaacggcagaaatatacttgttatattttcaacccgcctaaaggcaataattaaagacgactaaaatctttttatagcaccatttttgttttattagggtgaaattactggccactcttacccg

SEQ ID NO: 31558 - DNA, 844 bp, Arabidopsis thaliana landsberg
gtgtagtttcgatgtcattgtaataagtttgttgctttcatttggtttaatcttattggtaaaccataaatttcgacactaaactctcttttgaccaaatttttaatttgttcattcatgtttgcctctaaatttagcttacacttttaacaaattatttgctaagtaaagaaaaaacatctttcacacaaagaaactataaatactacatgatgatgtccttgttaccacaacaaatatttcaagtttgaacaaatgagtcgtctaatatttttcatattagttactgccatttattttgtaggaaatgaagcttgcaaggaaattgagattgtaattaagaacacacttggtccaagtagaattcttcaatatcattgccgctcagagaaacactaatttaggagtccaatatttaaactttaaaggtacaaaaatcattaaatttaaggatgacggaagtcggaaccaagcgatcgatttggaaatgtctttttaggcaagagattaacatgaagttttataacgaggttgaagcatatgttccaaagtttttaaactatcctacaattccaaattatattcaatgtggtcaactacgtgtgtatattgctagagtagatcatatatattttcgaatggatggacgtgcggcattgcctgtacgttctggcgttcataatgtgcttatgacctcctacataagccataagaactaactctttagtcaaattgtttttttttcttctaataaatagctcatttgatatgtttttgtatttttcaatgttttaaataataagaaaacataattttcatatactaatgttatgttttacgagat

SEQ ID NO: 31559 - DNA, 718 bp, Arabidopsis thaliana landsberg
gcatgtgcttggattcttaatatgttatctcatgaaacatttgtctctaacactctcataggctattttttcgtagggaacgtggcaacaaagattctctgccgaatgattttacattaaaaaaaaaaaaagattctctgtaagtttacattcaaaaaaaagattccctgtaattttaggagaataatgtaaaagaatgagtcagtttttaaaaatgtatgaaaaaactccaattataattttatatctgaatcactaatttttttaatcgaaccaaattatattccgctgtgcgcacaccgtaaaattgataaaactcaacgtttgctgattcaaggaataccaaacaaagagataactcaaaaaccgttgattccaaagactggccgttcaacgaaggttgttgataatataattattcacgaagtataccgataaagaaggaagaggtgagatcaaaacggtactaaaaaaaagaacccaaagttctaatcaattcattaattttttaaaaaagatgatcatcgcctaatctttttgaccacaaaaaaaagaagaatataagacagtgacgacgacataaaatcaaggatgatcattgtctaattagaagatttgtatttgtaacttgtgtaaatatagtgacgcaagaaaagtaaaatgattgaaaaagcataatcccctgtgttagaagatttgtatttgtaattgtatttga

SEQ ID NO: 31560 - DNA, 3126 bp, Arabidopsis thaliana landsberg
  unsure (1)..(3126): unsure at all n locations
atcatgttttgagcttcttgtgaactaatgtcactgttattagataagttgtcactttcaaaacaaaccagttgaagtaacatccaagatttatttatgaaagtaatgctattagtcaaatgcaacaactcttctgttcgttccaaagcatccattaaggactatcaactaactgtataaagttcaattactgtccagcgacttgtttattcttgaatttgaatacaccacttatgatctaaaaaaatgcaattcctatagctgtcttattcaattgttacctttgcagatgtctgaccttgcctctagatttcccgannnnnnnnnnnnnnnnnnnnnnnnnnnnnnnnnnnnnnnnnnnnnnnnngtggcatggtatgagttctttgtgacatgcgtatgtactttgttccacattaccgcattgtctctcttagaatccattactctacttttgcaggtacccaatttacaaaatacccacaggaccgacactcaaggatctggatgcttgtttcttgacctatcattcccttcacacaccctttcaaggtaagattggtgttgagcattgttgatagtaagaaacacaagttcttcgttctaaccatgaccacatcatcagaatttgtatgtttcaaatgatccgagagtaacaactttttgagtaaagatacatgcactatctatctttggctcttgcaggtccaggcgttacaacagggtctatgcatgtggtgcagccaagggaaagtgttgagaagatggaactgcctgtctttggtctcgcctcatacaagttgagaggttctgtatggacaagctttggtggctcgggccaccagctcgcgaactctctcttccaagccgcagataattggctgaggttgcgtcaagtcaaccatcctgatttcatcttcttctgccgccggtaatgatagattatactatgatgacgaaaaatgatataggaagttataaaaaggaactctttatgattactgtcttgaggaaaccttacatataggatactgtcaaaagtttttcatttggtagcttctgtaaattcacagaatgctagttttcttattgtgtgtaaaactgtttttgcaataaaggctaatagttgagaaaaaaggaggactctatggtcctatctgtgtgttcgggttctagtagttttctcttgatggcattggagcaaagacgagccatcatatggtggaaggaaagcatatcagacagccgctccgccgaaagtttgtccattgctctctcttgttcctctttcattttcatccttttcatatacacacatgagttcctcaccgtcgctcccatctgcttcagcctattctcttgttgcttgcttagaactgtattagcctgcatgattcattcagccatgtcagaaaatccaatattgagtggcaaaacatagagcctgtatgtatgtaaaacaaacgaatctctgacctctagaaactcagcttgggagaagcttttgacgagtgtggtggtcttcctcttcatctcaacctgtgttgcgtttacttgtttcttctgaaatgnnnnnnnnnnnnnnnnnnnnnnnnnnnnnnnnnnnnnnnnnnnnnnnnnnnnnaactcatcagagcctggaagcctcatcctctctggatgaaactgcagacccatcaagaactgaccttcctttggatcatatcgattcggatcataaaatccttcaatcaaaccatcaggagcataagccatcggcacaaaacgttgagccagtctcttcacaccttgatggtgatacgagttcaccattatctccatctcctcgaacaacttatgtaacggagtctcctccacgattctagcctcgtgtctgtgcccatcgtagttgtcataatctatatgatttgtcgttgtcatcgtagttccgagttctttgtcgatgtcttggtaaagagttccacctgcggcaacgttgagaatctgagagccacgacaaatgcctaagaaaggaatgtttctttcgagacagagtctagctacagtcagctcaatgctgtctttctctcggtcgatggtcatgtcctctgcatgcgccttcttaatctcctccatgtcttctggcgagaggcctgataattcatcgtccgcgtagagagaaggatcgacatcttctccttcgcagaggaggacaccatgaataggctcgaagctctggagcatagaatggatcccattgacacgtgggacaatgacagggacggcaccggaggagacgatgagatcgagatggtattctcctacgaagtccacgtacttgttcttgcggagagtccgacgagagacgatgagaactctggggagaatcttggacgagagatcattggcgacaaccatttttatgtaataaataaatctcttcttcttgttttgacttgtttatgtcttaatcctctctttcttaattggatggttatgtcttagttctcgatctttatttatagattggaatggaggcgtcgaggcgcagcgtccactcaaagctgacgcacactttttattatctgtatacgtttttggtcaaacctttcctattgcctattggatgctgagatggacttctctggatattccaaattattccttcgtttgatttggttatgttaaacaaaaaaacattttcttagtaataaatggatatggatcagattaggttcttaggaggattagatatgaatggatgactcattgacttgtaacaatattaagcatgcagagcatatactgtatatgtctttattttatactatataaatgcatgtctttctgtatttggagggtgttgaattaattatggaaatcacgtcatcctaatcagccaccggttcagtcactcttacgtgtaaaagataacgtcgtagactttcaacaactccgtatgaatgaaaatgtaagaaaaaagatcgaggttgtcgccggagttgagctctcttgtcttcacaaggccttcgatatcctactcatttttcgtttatgcggattatgaattgaaaagtatgaaagataaaatggcaaattcaccatcgtaattacaccactatatcttaaaactggatggttcacaat

SEQ ID NO: 31561 - DNA, 1158 bp, Arabidopsis thaliana landsberg
atagtatttcttttaataggtttaaactcgtaacctccaatgcaaaaataaaattatataaaatgaaagagagcgaccccaccaacgctgaaatattggggaaattaaaaaagaatatctaaaaagagaagtggacaagttgcatgacacaaaccctaacaccacaacatttacatatcccatcactttacaccaagtcttccacttttgcttcgtttgtttcgcttatatatatataaaaataatttaaaagaaagcataaccgtagggaaatggtccttagattcttcaaaagtctccaaataataaaagtaatttaaacaaacatcaatcggtcaagcgtcactctcttttctttctttggttttgcttcatttgttgcttagtgtgtacgtgacgattggttccttcccttcatttactcttatctccattttcaaaattacatttattaaaaaactcttcaaagttggataaagttgccccaaattgctcgaacccaatgctaatagttataaccagtactttttttggagcttgagtaagatttctactctttaattactatgaaagatgatttaccacttgatttgtcttatcaaatattagctgctgaccaagaataattctaagaaaattgatgttgcatgaagatgcatacaatataatggtagtgtattatttcacattcaccacctctgcacctcacatgtatgttcctcgatattttactagatttctatttctaagcatgcaacacatacaaacactagatcacatgttaatgtatgtgtaaataatgtcacaatatcgatagtggaagttcttttattttgtttcgtgacatccgatagtgcaagatttaaccaacctttgcttaaagaatttttttactttcggccttagaaaaataccatatgttctgtcaaacttaacgtgtgtttctttaagaataatacttgattaattagtagtagataatattgaacgtttcaaaaatgtcatgatttataatattcgacctccattggttgatccgcctgtgaaggcacaaagatgtctacatctatatatctaataatatacaaatcagaaatccacttagaatcgtatgattaacataaataaatcaaatagagatgatgttttgatattctc

SEQ ID NO: 31562 - DNA, 1224 bp, Arabidopsis thaliana landsberg
taaagcgctccttatctacatagaggtgtgtgtatttctatatacatataatcgtgtggttagatctttgtttataaatgcaacgatatatgtataatgcagcataggtattacgggaagacgatgccatttggatcagcagaagaagcattgaaaaacgcaagtacgttggggtatctgaacgcagcacaagccttagcagactatgcagcgattctcttgcacgttaaggagaagtactctgcccaacacagccccatcattgtcataggaggatcatacggtgggagtaagtccagtttatacatcatatgtgacaattatcgtaaccacaacttatatggcttatgtggtatatatagttacgttacgtactgatcttgaacatgttcctatacggattactatatgaccaaaaaaaaaacaattacggattactatatgaaattttgtatggggaggagtatataatctccatactcttaatgatagtattttaaaataataattttcgtttccatggtacacagtgttagcggcatggttcaggttaaagtatccgcatatagcacacggagcattagcatcttcagctccacttctctactttctagactctcgtcctaaattcggttattattacatcggaacgaaggtttttaaggtaaaaatatataattattcaattacatttatatatatatgagttttctcttctcacaatcaatccatttaaactatttcgtaatctcatacttttagttgctacacggttaattagtctaagctaaagtgagtaagatctttctgcgttgtattcataattaacatgtagttatttagtcgtcagcaagcgagtgagagatgttatcaaacgatccgtaaatcttggaaagaaatagatagagtgagtgttaacccaagcggtctcgtgatcctcagcaatagattcaaaacgtgcgcgtgagtaattaaaatcttaattttcaatagaatacactttatacttcatttatttaaaaaaaaaaaaaatcatttgtcagcccactgaagggaagcttggacgtaaaaagatttttgggcacaatatagtgctgaagtggttcgatacaaccggggtccaggttattggctgaccaacatgtgcgaggcaatcgacgccaacccacttgtaccggaaagggatatcctggaccgtatttttgcaggcgttggcgctacatt

SEQ ID NO: 31563 - DNA, 4380 bp, Arabidopsis thaliana landsberg
caacagaataataaataacattttataagtcaaaagaaaagcagtatatatattcaatatattaaaaaaacatttaacgtttaagagtataaaagttcgcttggtttttaaaaatgtaatgtagatgtttactatttaaaacagtagatagtcactgaaaatacaagtttaaaatgatcagacaggaaaatgaattaatttcaaattaaaaattaagtggacaaaacgtctaggcaacctaatatgtactaatctactagatacatgaaatttcgcaactgatttaagtcggccgttgaccagatcgaaactgtagccttcactagttgtgtgcttgatgaatacaatttataaaaaatttagataattgcagcttcattacagcttcccatcaataaatctgagaacttaacatccatcaaaatgacataacatgactcaaactatggattgtttgagactttaaatagcttgtgacctttcatcgcagaagtgaacttaaattttgttatacctcgattttacgaaatatggtggtactttactagtatttaagagaattgattcgggtaccaaattaagtgtacttacattttccgttcgaacatcttgacagatttctaaagttaggtatttttgaggtggagcgatttaaggttggctgacatgccaaaaagtggtatcgtgtgagtgtaggaacaaagtacgggaaatatcttgttttgatttgtaatatcaataaataaatatttcgggtctcctgtagtagcgtatatatgggtcttcgtacgagggtagggcccacaaatcgagagaatgcgtggtatcaaagccgaacctagacatgtgtggattcaagtagcttcacattgcctttgtgaaggtcttgggaagtggggtgattgtaatccctagaattttagaaatatataggtgtgattaggcgcgattaaaagaaactgattttggtacatatgtcacatatttcttttctgtcaaatatattgacagaacattagagtttgtgaccttttatccttttgaaagtcttcaaaaatttcaaaactcattacattgaatacagttgttatcgcgagcttttagtaccaaccacctaattgctgttaataattctctggtcgcgctatatataagagtagactgctccaagttttcattagacactctttcaaatcctcgtttccccgaaaatttctcaaaattatgtcatcttaagtacctcaggatacgtgatcctacgttccttttttaggattgatggattgcatgatttgtctctcttttaactatacatacatcgactaatgggggtggttggaactgtaaaaattacgataacttttcttttatctgccttcacctcctaatttctcatctaaaattgaactgtaagtatcatatgagggaagaaacccgattttaacttataatcacatgtttaataaagaagttcattgctcattaacaaagatatatatcacatagacaaattcattacatcaaatagaaaataaataaaaatccacgttacatatgacgagaatattaatttgtgtaatctaccgagccgttgggctgagttcggtatcaaaggtcaagctcacttctatggaactcttcgagtccatatcccgactagctcctcctcttgaattttcagatgccatacactcgtttagttcaataacaacttgggacatggtcggtcttcttgttgaagaaagattgagacaactcatggctagctcaacagctttccaaacagaaccagaatcataatcttcatttaaattaggatccatgatgctgttgatatctccttttgtaagcattactcctacccattctgctatatgtggcttttcatggctttggtcgatcacaagtcgatttgtgataatctccaacaatacaatcccaaaactataaacatcactcttttctgtcaaccaatttgttctgtagtatctggaaaacaaaatattatattttttttgtcaagtttctttatcactaaagaaaaatgaatttcttaaacagtaatacttactcaggatcgagatatccaggagtttcagcaacaactgttgacccatgagtttcaccttcgatcgggaatgatctcgaaagcccaaaatcagcaagtttggcctcaaagtgttcgttcaacaatatatttgtagttttgacgtccctatgtaccatgggtggtttgcatccattatgcaagtactcaagtcctagaccacaacaataaattttaactaaaagcaaattaaaaaatggaaaatagaaggggttaatctctaaacaaaccttttgcagactcgatgactatttttagtctagttccccaatttaaaatgaagttgtttcgtgctcctgtgtctaaaaagaacactttgagataaatgctaaagtcttattcgcactatagaactgattaaatacagttagtcattattgtcttacctgacatgtgttcttttaaatctccattggccatgtattcatatataagagccaagttctctccttcgtcacagtatccaacaaggcctaccaaattcttgtgatgaactctaagaagaaggtctacctaaatacccagccagaaatcagaagttatagatatatatccttcaaaatatttgaatcattgatgcttttgtttcaattagatgatgatgaaagtgtgaatttacctcagctttgaattgtttatatccttgagatgaagattgtgagagcattttgacagcaacttcttcggtaccattcacagaaccataatagacaattccaaaccctcctttcccaaggattctctggaagttatttgtcatcttcacaacttccgagtaagtaaaccttttattcgttgccattattggcggttcggatgatctaccatccatgtttagcatacatgatgtcggctctaaatttgggagataaaattttaaagagtctatatgcaagtttaatgtacaaacatattgtaataagtttctcagggttaagattattgtgcataccttcatcatttgatggcttattgttttttctgagaacacaatatagaatcgatgcaactacgagaatgaccactaaagcaactgatgcggcaatagatactaaaatcttggttttctgatatccgtcctcttttgttccatttatacatgacctagttgagcacaaaatctctggatttccttcaacactttaaaggtgaaagtgttttttaagatattgaaattgaatcaagtgtacacggtaatcatcaaacaaagataatacgggcgatcttacttcaatttcaatcctttcttctcaataagctttttgggaactgaaccattgagcttgttcctacttaaatttctgtttaacatatgataaacgtttacggagaaacacaagaaaatcatgtaaagagaatatgatataaaaacttacatgaccaataatgatttcatgtcagctaggaattctggcacaccaccggtcaaattgttatttgacaaatccctgacatttgaaacaaataactcattttgaagtttattgacgaagacttaactactaatgtttacctttactaatctgttaatgatacttacagttcttgtagatgggtcagatttgaaaatcgagctgttataatcccagtcaatgcacttgatgacaggtttctagtaaatgacacgttcacaaatgtaagaaattatgaaaataaaaatggtcaaagtcttaaaccagaaaaagaagatggtcaaagcataaacttacaagaaagtgattaaaggtggagtagaatcatcaacgctattgcattttagaccagcccatacaaatttgttgggaacgcatggatctccttcccagttgagtctatccaatttataagcagaacggatattcttgatagcagccactaataattttaaaattttgactatataattaaccaacagattcacacaaggatatgtaggtacgagaatgaaaaagtatttcaacataccatcatcttcattactttccagttgcgggagatttagtacagagtaaatctctatagcgttcattagaggcggaagagttgaacccccggatgcctcgagttgcaaaagacatgttccgctcggacatcgtcttggcgttgtgtcgtataatgttttggctgttaacgctgtaggattgtaaggtacattaatgaaatctccattcaacacaatataaaattctctgtaatcatcgggccctagagcttgtagctctgcaaagtgcatgtagaggtaaaaatctgtagtaggatccatcttccaagatatattaaccccactctaaagc

SEQ ID NO: 31564 - DNA, 1579 bp, Arabidopsis thaliana landsberg
acttttttatccattttcgtattttatatatattacatgctgttttccaaaatcatacgtaacatttaaaatcatctcatttctcttaattccaccaccacaaccaccacatcttccaccatcacatccaccaggtctctttttcgaaaaatctaggctgctaaacgttatttatattgacggatcatctctccttcaatttgcagaagatttttcattttattttgttcgattttgattcttttttggaatctccgtcgttatgttttctttttaaattgtatgttattttcttttttaccacactactttttcaaattatacatgataacttgaaatctctctctgtcaacatgctactttttcatataacacattatttattaaaatcacatgtaacttcttctaaaaacatgatttaaatgttaaaactttctcaaatctattattttatcttcgtattttcatttgctcttggttcaacttttcaaatgaaacgatatttgtttatataacatgctatttgtggaaaatgtacgttataaaatgtcattttttaatataacacattatttattctcataacacattataaaatgtcactttttttttaaatatcatgctatatctacatactcttgcttttggttcaacttgcgaaaacatttttgtattttcttatgtcgtcataaggttatttactcacatacaaactgacaatggttacttacttcattcttttcaattctatggttattttctaatattacccaataatattagcttttataataaattatactaactacatttttaagagtgtacaccaatgtggatgtttttatgcccttatttttagttaccatacttagatttcgggcaaaagcccataagaccacccacatcgcatatattttttgtgtgtattctcatataaatattattaataaagtatgaatagtctttttaaatggaagacccatttttcaatgtgtttcaaaatgtcttctttgacacatttttggaaggatatctttcatttaaagaccattttcttattttatgaattaaatttatgtggaaatacatttaaactaaatgtgcaatgcggatgctctaataattttttatgttcggattagtctttaatatttttacttatacccgcagtcactcgatgtgataattttaaaaaaaaatagtatgtttccggtcgagctatccacttctggttaaatggacatatttttacgagaagaatttgaaatagaaacaaatggttgaaaatatgtacgaacacatcaaatttgaattacaagatggtgtgtattaaagagtcaagcaaaaagaaagggcgttttctctctccagaaaaggtgaaaagtggtttctttttcttctcacctccggcgtctccaacggcgccggctcctcgcctccgtctctccgggccttcccctccccatggggaagcaaaagcgtctcaaggttggttcttcaggcgagaaatcatcccgatcgaaaggtggttcctctccctcttcttcagcctccattagcagttctgcggcccctccgc

SEQ ID NO: 31565 - DNA, 1441 bp, Arabidopsis thaliana landsberg
acacaaatcatcttcgtataaattaatactaaatgtaaacatactaacaacattaacaaaaaaaactccatagaagtacaagagaagaggttagattaatttggaatataataacaagggaaaataattaactaaagctaatctgctagtacaacgatttacgagaaaagtcaatgtattacttatcatatagtattcatattcaaatcgcgttagtgatcatatagtatatttttttcttttggcatattaatcagaaattgatgtgtagtttcgtaattcggactcatagaaaaaattgtcaagtcgtggtgaaaaggacaatcactcaaaactaaaggcactaacaaaatattttgtcactcattcgtcaaaacttaattgatactatagaaagacatcaatatgactcatgtatgtagactgagactccactacaaattgtagactacaatctccctgggatttctcttttttttttttcatatatcaattttatattcttttaataaaaaaatctgataactgaatctccaaaatgaaaattaaattactaggagtccaggactaggtttcgtttgatataaaagtggagccgcaagcaatattgcttgatcaattagtattatataatggtacaaactaataactaggagaatggtataattcgtactcatgatcattcatcgcgagtagggaatgtgataggctctccatgttcacatatatatacgttgacatttcagtgaaactacaaattgcaagaaaatttccttgagtatcacaaagacctgcaaacaactctatttccatataagatacgcggtaccaatcaggtagataagtagctctacaatacgtctacgttgtaatttaaaacgacaagttaagaacttatctgaggaccattttaaccgatgttgaaaccagaagaccgagtcaattgaaaaggattagtagttgacaacaacgaagaacatgaagttacaataaactaattttaattattaatcgccggagcaccccacatattctcggcgctcttttcgccgccggtaatgtttattttaatgggccaaaacggatatattatatagttaatcagattgggccgtttaagtttttttgggttttttgctttcttcttgggtttgaccgattgatactttttgtggtttatgggcttctcttaaatttgctactataataattttttgataattttttatttctaagttttgttataccataatcaatatataatcttgacaaaaatcaattacttataattttattttttgctacgttggcttgtaactggaggacaagaacaacggtaacagtgagagtgcgtttaactctcagaaataaatcacgtgaataacttggtggaagacagcacgtgccaccctcgtgattcatttccagaagctatataagg

SEQ ID NO: 31566 - DNA, 1360 bp, Arabidopsis thaliana landsberg
gaaagttctttaattcttaagtattaccgactagttttttttctagaatgaatttttctaatcgaatactttgaaaatagagtcgacgaaagagattaaatataacaaaaccaaaccacgtgaggatcataagctatggacgaggaaaatcgtcaaactttgagataaatctttgattgattaggtgtttgttgtacttttttttattaatatccagaattcagaaccttctcttcctcaaatctgtctttatcctttttaattcaattttaatctcaacttttctatattttatcgtctaaatttaaagaaaagaaaaaacccaaaaacagaggattttgatcaagtaaaagaaagaatattttctagagaaagcaaatcgattctctcacctttatatatataacctctccacctctgtttcgtctctcaatatatatccactggtctttcctttttccggcaaaattgtaacagaaccaaaaattactctgttttttttattttcttgacaaaattactctgtttttttttattttcttgacaagtctgcatttttctcctctgttttggaattttctcgtttctggttttccgatcataaaaaacaaacaaaactaccgtaaaataggctctctccacagaaaaaaaaagaagacttttctttcattcttctgcaagtaactgagcagatttcggttttttcttcttcaaattgatatttttaaagttataaaaatttcttgtccataatttccgttttccttaaattcagctgtcctaacgtcaaatctcagacactcgcttgcgtgtctccctctcttaaactctctctttctctttctcttttggtttctgggttatttcaaagaaaagaatcaagaaacccctctttctctcttacaagaatcccatcatggtgtttggaaaagggtcaaaccttgatcgattccttcattgcataacacccttagtgccaccccaatctctccccaaggtttcataacgtttctttctctctctctctttttgttttcgtttcaatatgtcattattgattgattttgatgggtgttgattttgcagacggagattagaaccctaaatcgattgtggcatccatgggagagacaaaaggttgagtttttcaggttgagtgatttgtgggattgttatgatgaatggagcgcttatggagctagcgttcctattcatgttaccaacggagaatctcttgttcaatactatgttccttatctctctgccatccagattttcacctctcattcctccttgatccgcttaaggtttgacttttgattgtgttacagctcaaagattgaaccttaatatcttttat

SEQ ID NO: 31567 - DNA, 495 bp, Arabidopsis thaliana landsberg
  unsure (1)..(495): unsure at all n locations
aaagcggcatccctgccatttattctgacgtcgttccatcaaagtcgtttaaatttgaaatttcaccaatcagatccgggacgatgaagaagacgaagaagaagaagaagagagtttattnnnnnnnnnnnnnnnnnnnnnnaaatgaattcgaaatcggcgatgattgttacgttaagagaagagaagatttgaattcagatgaagaagaagatcctgaaattgaagattgtcagatttgtttcaaatcagatactaaggtgatgattttttaggtggatttcatttgaaattcttgaaaccgcaattgaaggaaatttctcaaggtgattggatctgtcaattctgtgaggttaaaaagtctggtcaaagtcaaacacttgaccttcctaagccaccggaagggaagaagttagcgagaattatgagggagaagcttcttccggtgatctatgggcggctagaatcgacacgttatgggaagaagttgatgat

SEQ ID NO: 31568 - DNA, 3390 bp, Arabidopsis thaliana landsberg
gttgcgattctgtcgctgtatccgtcattgaggttgtcggcgtcttataaggagtcaagttctgggaggaggagcccggttaggcctagttctgaagcagctgctgataatgagtgtaatattttgcttcatggtttggatccagtgaaagttatgcttaatcggcttgagaatgaagttagaggtgagatcaatgcttgctcgatctagtcgttttcgtgtcgattcagatctgattttgtttattgactttgttttttcaaatgtggttttagataaggatcgagaattaagtgaagctaatgctgagatcaaagcgttgaggttatctgagagacaaagagagaaagcttgtgaagaggtgtgattttttttttccttttttggaagattttgtttgttttttgtggcttatggattaggttatggcaatgttgttagagaagattgatagcttatgtgtagtttcaagttccttattgtgcttcttgttagctgatttttatcttatgtgctttggaattttaatagcttactgatgagctagctaagttggatgggaagctcaagttaactgaatcgcttctccaaagcaaagtatgtatcaaaatctccctccttacgatcatgatttggctggatatctgattatgaactatgttgcagaatctagaaatcaagaagatcaatgaggagaagaaggcttccatggctgctcagtttgctgctgaagctaccttaagaagggtccatgctgctcaaaaggatgatgatatgcctccgattgaagccattctagctccattggaagctgagcttaagctagctcgctctgaggtatgttttactcatttgaagtccaaatttctacttgcaaatcggatattaatttatgatgtttctgtgaagattgggaagcttcaagaagataacagagctttggatcgtctcactaaatcaaaagaagcggctttacttgatgctgagaggactgttgaaactgctctggcgaaagctgctttagttgatgatcttcagaataagaaccaagagttgatgaaacaaatagaaatctgtcaggtgctgtactcattatcatcttctttgtatctagttagtcaggctttggatgccttctacttatcactcattgtttgttaataatttctattatctgtttgattctttaggaagaaaacaaaattctagaccgaatgcacaggcaaaaggttgcggaggtggaaaagcttactcagactgtacgggaactggaagaggccgttcttgctggtggtgctgctgcaaatgccgtgagggattaccagcggaagtttcaagagatgaacgtaagttaatacatttccgaaaaaagaagtatagaatctttactcaactgatgaaggaatatttcttgctctacttttgcaggaagaacgaaaaactcttgaccgggaacttgcgcgtgcaaaggttacagcaaacagagttgcgacagtggttgcaaatgaatggaaagatggtaatgataaagtgatgcctgtgaagcaatggcttgaagaaagaaggtttctacaggtttactttgatatgattgcccttttcctaaatttgtggaatccagattctttgaagtgacaaaggcacacaaccttacattctcactctttaactctcttcttgcagggagaaatgcagcaactccgcgataagcttgccatatcagatcgagctgcgaaatctgaagcacagctaaaagtattcatcgtatttatgcattagtcattgtcgaatttatgttcttgtttaactgaactaattagtaaactatttccttatacaatttctaggacaagtttcaactacgacttagagtgcttgaagagacactgagaggcacatcaagcatcagcataaggaacacacctgagggaagaagcatgagtaatggaccgtctcgcaggcagtcaatcggtggatcagataatttacaaaagtttgcgtcaaatggctttttgtcaaagaaaactccgatgagaaattcctttacttctaattccacctcggtattgaagaatgctaaaggaacatccaagtcattcgatggaggcacaagatcattggatagaggcaaagcactcttaaaaggacctgggaattattcgttcaacaaggcttgtgatgaaaccaaagaatcagagtcacctaatacctggaaagaagattcagaagagaagccaccaagtgaactccctgcaccagcaaccgaagacaatgtcccaggggttttgtatgatttactacagaaggaagtagtcgccttgagaaaatcttcgtatgaaaaggatcaaagcctcaaagacaaggatgatgccatagaggtaaaatctctctgaatgtaccatataaaatgttgttaaaaagacgtgtttgtaatggaagtcttgatatttttcttgtagatgttagcaaaaaaggttgaaactttaacaaaggcaatggaagttgaagcaaagaagatgagaagggaagtggctgcaatggagaaagaggttgctgcaatgcgtgtggataaagatcaggataatagagctaaaaggtcttcaaacaccaaaccctcatccaacaccgcccagattcttgctgcaaggtatctaacaatgttgaatatctttgtctatttttatgatcaaattgcgattttagcaatcagactaagcttggtgttcgatattctgcagagctgctggccgaagtgggttaacaaggagtacacaatgagatgagggaggagatgtgactagttcttgtggtcgtatcagtttaaacaagtaaaaccgttataggctggtgtgatttttaagctctttttaacctttatatctcttttttatttctcttgctttcctttacatcctctgtgatttattgaattaccatataacttaaggatgaaaaagataagtatgctttctgacttagatcggcttacactgcttagcgatgacgacaagaaaaaagggtggagggagagatgtttgacattttcgcataacattttctgtcctatggaagtagtttgtttggctgtataggttttagctctgtattgaagtttgtgtactttactttttccggttcttcattctatttacttaaggtgtgtgttattatttctacttttgggtttgttaacatatgtcataactcaatggcttctcttttggatgttatgtgttcgcatgcttcaaagaagccttttggtacgtcaaaatcaaatgctgcatggtcatgtaacaaggagtaagtatattatagaaggatctcatacagcaaacccattaacatcattacattaatatctaaagcgtacaacaatcactaatttacctt

SEQ ID NO: 31569 - DNA, 5174 bp, Arabidopsis thaliana landsberg
ttcagatccatatagctttagacttctttatgttcttatgtatcaaggctttaattagaattgctgcttttgccttttgcaggagaaatttcaactgcggcttagagtcttagaagagagtttaagagggccttcaagcagtggaaaccgatcgacacctgagggaagaagtatgagcaacgggccttctcgaagacaatcccttggcggagctgatattattccgaaactgacatcaaatggatttttctccaagaggtcaccaagttctcagtttagatctttgaatgctagtacaagcacaatattgaagcatgcgaaaggaacatccagatcatttgacgggggcagtagatctttagataggagtaaagtactaacaaacgaacccagatcgaagtttccattgaaccaatcttctgaaggaacaagcggaggcgggtcacctaattcaacaaaacaaggagattcagagaaagcagcagggacaaataatgatagtgtcccaggagtattacatgatttgcttcaaaaggaggtgataactttaaggaaagctgctaatgataaagatcaaagccttagagataaagacgaagctattgaggttagtcattagttttacacctttccaagaaacgtttgcttatatttatttatattctctgatcaaaatacttgggcttgtgtttgcttttagatgttggccaagaaggttgaaacactaacaaaggcgatggaagtggaagcaaagaagatgcgaagagaagtagcagcaatggagaaagaggtttcagctatgcgtgtggataacaaaggatcagatagtagaacgagacgtcactctactaactcaaaaggagcttcaacaactgcacagttactttctggaaggtacctgatgttttcttattataatgacccaatgtaacgattataagttggttaggttagttttctttaacacttgaacgtttgctttgcattgttgttttagcagaggctcaggacgaatggggatgacgaggagcacgcagtgatcaaagaagtcgattccacgagcaaaatatgaatctcaattcagtgattaatagattgaaggaatgacaaaaagcatacaaatatagaaatccaatatgggaggtgtgtgtgcttcttaacatagtaagatttcaaagttaaaaactgattcttaatttcttggctgatgtttattgttttcctcatatatagaaaagagttaggtttgtgttttaactactaacttgagcttagtgtgtgatttattgtatctctctctatcttacctttgtccatttttctcattttggggtatgttatagatttaagaaattagttcagaaacagaggtgagagttattagtgaaaaaattgaaattgtcattagtttcattgatccagacacaacattcactaacattagttgagtctggtctccttgaaggcttgaaaagagatgtccctttgaatgtaatgaatctgtgaaggatcaaaaggacctctcactctatcaatctttgtaatgactgctctctccggcaacacactcctcgccggatccaccgccgtttctccgctcaagcacgacgacactcctttaaagattacaacttccacttcttcatcgtcgacaatggccgtcactataagcgcttcttctctacacgactggctatatatctccaacatcgccatttcctcgttgtatccatacatttcatcttcatcttcaccacctccctcgtctctcacccttctccgagcaccgcaccagaacatcttcaaagctcttcttctctccgccactggagggacggtgaaaagttttttccggtagttatacgagtttgtgagcgagggtattttagtcatttgatctttctgtccgaaaacgaataatccggctatgccaccggataaattcgccggcgtgataagcattctgatattgtagtgcatgaggaccgtgactttgtctatagataagattttaaaggactcgtgtatatttacaaataagggtagtaccaattggattaattacaacagagtgccactacagctattaccagtcgctttcgttgcctctctcttcaaaccagtggctacttactcaacactgtacgtcttcaatcatttcttcttctttcttctccaaccaaaatctctttctcagttctctagggttttcaatactcacaccaaagcttaatgccgatcaacgatcagtttcctagtgggttaagaatactcgttgtagacgatgatacttcatgcttgttcattctcgagaaaatgcttctccgtctcatgtaccaaggtctaattctttatcaaagttcccaccttttaatagattttctcaagaaagttttaacatttttgttttatcttctctttgtagttacaatttgctcacaagctgatgttgcgttaaccattctaagagaaagaaaagacagttttgatttggtgctaagtgatgttcatatgcctggtatgaatggttacaatcttcttcaacaagttggtcttcttgaaatggatcttcctgtcattagtaagactctgttgttatgttttgtctctaaagattgaatctttgcatcaatgtttcttacatttgctctgtttctagtgatgtctgttgatggaagaacaactacagtcatgactggaatcaaccacggagcttgtgattatctaatcaaacctattcgtcctgaagagcttaagaacatttggcaacatgttgttagaaggaaatgtgtgatgaagaaagagcttcgaagttctcaagctttagaggataacaagaacagtggtagcctcgagactgttgttgtttcggttagtgaatgctcagaggaaagtttgatgaaatgtaggaataagaagaagaagaagaagagaagtgttgatagagatgataatgaagatgatcttcttcttgatcctggaaactcgaagaagtcacgcgttgtttggtctattgaattgcatcaacaattcgttaatgccgtaaacaaacttggaattgacagtatgatcctaaacactatcttattgcttgtagaagaaattcaaagtaatttgtgcttataagaatctctcttattgtttcagaagctgtaccaaagcggattctcgagttgatgaatgttcctggtttaagcagagaaaacgtggctagtcatttacaggtttctttgattgattgattgaatctttcttcttattagggtctctataagggttatgactgaatcaataccatttgcagaagttccgattgtatttgaagagattaagcggtgaagcttcgcagagtaatgactctgagtctaccaaaagatatgaaaacattcaagctctggtttcctcaggacaattacatccacagacattagctgcattgtttggtcaaccaatagacaatcatcactctgctagttttggagtttggattcctaatgacaatcttggtagatctcaaaatgaacacttctcggttgatgtatcatccgcttctaaccgtcctgtttctgtggcggttcatggtctatcttcctcagcaaatttcagacagagaggtgacgttaacaacaacagaatcagacaagggtatggatcaaatgtcaatgaagaatcttggatcttggaaagatcttcaagacaaagatagtgaccaatatatggatacgcttaagaagagaaggctctgcaactgtttcttttaaatcttcaggaatggattaatgtcagaagaaaacttgtgtgtctgcaatgttagcttaggaaagtaattatgtaaccaatattttgaattgttatctctcactttattatggttgccaaaagttttagcctgataataaccacaagacatgcaacaaacaagtctcaaagtacacaaaacatcaaacgcaacactagttttgttactgctaatgctgcacaactttagccaaacaaaaagcagcagctgaagcaatcgctcctataaaggcggtttcaaacgcacttctgaggggcttgcttccagtgaaatgcccttttgcatagccaaatatgaagagcgcaaacagagttataaccacagacgccactaccgcatccatggcatgcggtatgagcatgtagggaagtaacggtataaaaccgccaagaacataagcgattgcaatcgtgaacgcgctttgtaacgctctttttggatcaggcttctctaatcccagctcaaacctgtaacgaaacaataaagtctcacttatataacaagttacatgcttatagtaggaatataaacattatgtgataggtaaagagtgttaaacttaaccaaatcaataagataagtttttatattcacgtaatttgttgttttctgtttgttactattcacgtactttatttgttgcaacaaaaaagattaaaattggaagtcggaccatataagaatcttgcccacacctggaaagtataagctcagcttttgcagaaatctaaaagtatccctcgattttctctttaattaagactatataatatacataaaataatactaatggactatatagtatacataaaataacactaattttcattagtgagactaacctcatcataaaatcaagccaagcttgaggattcttacgaagagcattaaccacaggtgaatattcatgtggctctatcccgtactgtgccagaatctctgccacttcagctgcctctgttttcaatccatatagtaattaaaatgtgttaaaccggataattttcttatggatggctgagattgagtgtaatttggtcttaccagtttcaggaacggccacgatctcttcttgttctcgtttcatctccctcgcgtaatgatcttcttcgctctttgccgctaaatacctaaatttgttatctagtttttaatcttgcattgaactcatatagttataactcactacttttcttacaatatgattactcaagagactaactaaatatgaatttttttttattacatatggatgcatgcattgtatatgatcatggtaacatggttgcatgatctaggactatttttgttttggtaaattagtctaggactaatttaacccaacaaaattatgtgggacttacgtgtaaattta

SEQ ID NO: 31570 - DNA, 643 bp, Arabidopsis thaliana landsberg
  unsure (1)..(643): unsure at all n locations
tttgttcttctcttcgttcccaagtattattatttaattgagatcttgtttctttccttgttttttttgtaggatattctcattgaaggaagcataaaaaaaactggatctaagattgtgaatgnnnnnnnnnnnnnnnnnnnntcttactctcttcgtgtgagcttctatttctatttgtcaataatgtttagggaactgtgtatgcttatgttcatgtgcaagtggttacggtgatattgaatcatacatgtatgtgtgaatgtactcatgaatactcttgggaaatacgtaatacacatagacatagaaaatgctgcagattgctgtatatccgaaagaaatacttgtgcaactgtgtttatactaaacctagataactggcatgcaactgaaatcctttccgctgctgatacctttgagcaggtttacctatctatattatacttgcggattcctgagactttcaagataattttgcgtggtaaggttgtcgaacatcataacgttgctgatgatctcatgcatccgcagtacatcttgtataagcctcaggctgctggatctgaagaggtgcgtaaagtatctgtaggcttttgtttttcttcgtttaaaacttcttagtttttttcctttcttatga

SEQ ID NO: 31571 - DNA, 725 bp, Arabidopsis thaliana landsberg
  unsure (1)..(725): unsure at all n locations
ggttcacccattgcatccgattttttaattaaacgtgttcattatatgtaggatttgggcttaataattacacaacattatatgtcagtttttgagttcatatatatatgaattggagtttactttacaattaaccccaatgatatgtcggtttgagtttataaaacgtaattagggtttagatttaccaattaaacacaattttatgttggtttgggtttacaaatgtggattagggtttagatttgacaattaaacaaaattataagtcggtttacgtttataagaaaatggttaggattatagaatttataattaaatgaccttatatgttgatttggatttataaaacagtgattagggttttagattttacaactaaatgagattatatgtcgatttgagtttagaattttttttcaggatttacattttacactaaattcaatttaggggtgttttaatgcatttatttatttatttagagagaataaattagattttatagtaaatttttattggctaattaaaaggaaacattaaccctaattaatattttttgttaatgatttattatcataatttattttattttgtttatttaatttttaatttttatttaagtattatgacatgacataatgattagcttaaagtaaaggggggtgaatatanagttcactcataggagaatgccagcaatgaaattatattatatattaaaa

SEQ ID NO: 31572 - DNA, 1451 bp, Arabidopsis thaliana landsberg
agctctgcacagagcagtctcagaagcaaacttggagattgtacaattcttgttagagaaaggagctgatatgatcaagccagatgtttatggttggtcggctcgtgctcttgctgagcatcaaggccatgaggatatcaaggctttgttttataatcagagaccagtggagaggacaacgatgcttgtttctggcccgccagagattggtcctttgatgcaacattccagtgagcctgtaatgactcaccatcattcaagggaagcaatgccgcctctggccagagccgtttctcagagacggaagctcagtaatttcaagaactcgctgtttggtatcatgtcagctgctaaaactggtaaaacgcctcttgctctctccatccttgacttaggttgcgattctttcagcctttttttcatccatatggttaaagtaatgaattcatgtttttcaaatgattcaggtgatgaaggaggagcatctaccaggactggaataagtgaaggagttggtggggtttatccggcgagagtgacaatcagtggtgaggcttcctcctccggtaaagtagtaaagttaccggattctcttgaagaattaattgaaattggtgagaagaagctgggattcgtagccacaaagattctgagcagagaaggagctgaaatcgacgacatcaggattataagagatggcgattttctccttcttcttaaggtttcttgatgacttcgcaaattcaatatgtaagaggatttaatatgttgtagtcattacaatagacggtatatccctgtcaacagtttttgtgagaggaagatcataaaaatgcaattcacttacttgcagaagaagttagtctgttacgtgacctataattattaacatctaacataaacgtgcaaaccaaaaataagacaaggataagtacttctcaatcagtgactcgatatggcagtgaaatttaaagtatccttatcgcactagagtttcaatcatcctgcttttttttctaagaaacaaaaagaagtaacaaaaagcttcctcttttagccctaaaggcagaaatgagagaattgtctagtgatctatttacttcttttcttgttgttcttgttgttatgtagtagaaaaaggtagagagcaaacaaattcatcaaaatataacaaaaagtgaggaatccaaaaaaatgtttcatagaagaaacaatcagcaagtttgtatcctctgttcccccatcctttctctgcttacttcttcttcttactcttctgtttctttgaagcaaagatgttcacaagatttgttttttttttccttttcaaataagacttagggagtgtccactgttttccggatatacctgagaataaagtaaaatatgtaaaaaaggtgcgaataaataagattgatttaagaatggtatatattttaccattgggatct

SEQ ID NO: 31573 - DNA, 5077 bp, Arabidopsis thaliana landsberg
  unsure (1)..(5077): unsure at all n locations
gcttcacatgcagatattggaaaaatatctccaaacattgcatgtcaaatagcgccatcttgggacgtaaaaacagagctagtaagtgatagcctgtgtatgtttccatatccttcacattctgggaattctgatgaagcgcacaggcaagcaatgaaagagccatatgtagcannnnnnnnnnnnnnnnnnnnnnnnnnnnnnnnngtacaacagccattcctcccactgggcggatactattgccaatcacattttgtctgcagagactcacatttcccaccaggcgcccgaaacgcggtattcctatataattgagaaacgtagaatgaaactaaaacataaaaggtaaaacacgtacgaaattatatatgatcattgtatacccccaataagagaggcagcagcggacaatgggtcaacaagattgacgagtgaaaaacttccggtagcgcgcatgaactctgagcatcttccatcaaatgcaaaaataagtttcttaccaggtaactgaattgaaagattccctaacctatcgagatcccatacaatcccactaccatgtgccttggaatcgccttgtctattactgtcttcaaatttttggataccagacgacatgtcagtgtctaacaagtcaaggatagccatgctgtccccaccacaagcctgattaggtacgaaacgtaagagatatgcatcctgaaaaagacctgtataccctctaccaagaatgtacatgaaaccaatgcagcctgacgtgagcccctcctcaaaaagataacatgagcgtattttccatgtcaaatcgctaaccctagcacaagtagctgaagttccaattattacttgcaaagattttccaacaggtgaaggagaataccccagtttacccatgtgccttagttttccatcaatgtaaacataagcaacgctagcctgaaagagtccagcaagagcattcggcttattatggacaacagcgaggtgatgccacttgccctcctcagtttctaatccagaaaatgacaaagaatttgaattgctagtggcaagggtcagaataccatcttcttgaaattaaagttctgcataggatggactttcattacttatagcattaacagaaaatatccggaaaatattttgttcgctttgctgcccactcaaaatgggcgtctttgacgaaccaccagctttataaacttctgattctaattcttgggttgtcaaaaagttacgaaactggacccagcaaacaaatgaataaccagcagcaggaggccaagatctttcacccagggacacctgaacagaagcatgcccagttttgctcatgtccatttctacaaaaggagccagggaaacacattccaatcctgtgtcttcttccatgagaattagcttttccatcataccaattagtgagggacccgaattcataaccctcatctgcatgacatatctacacagcattttgagctcggatggagacaatctgcaccagaataagaccgtattttgagtaagatcagcctacaaacaaacctagtcaccttaagactacgtattataaaaattttagctatggttgactacctgtacgctccaagaacttcaacaatttttaaagcatgagaaagaaatggagacgaaccctgcagaaaggggtagataatctctagcaggagttctacgcaacctgctccattataattcattaagagtgaagaagagaataaacagcaacggtgtgattttaagagttaacttagccaataataacgagcccaagtggaaccctaagacaaagttcttaccagctgacgtgagggtttccttgttgaatgggctggcacgtgcaagcctttctagaagattcagaaattccaactgcaattttggagtacaaagcaacagtgaacggatcagtactctgacagcacctgcattatagatcttctgcttgtcaggattaaattggccagacgcggtttttacaagaaagcttgctttttcacattctgccatctcagctgaggccatagattctgatgtcaaaaacggtggaaccaaaacttcaagtgcaagttctaacaacagttgtatcacatgtctttcaagatcaacacacagcaaaccagactccaccagaagatcataaaacgtctgagatgtaatgacactgtgcagtttcatcctattgatagcattctcacagacagcagttgttatgaggcgcaatagatgtttgaacaatttgatgtaaaccatcaaatgagactcatccctacactcttcttccccttggaacgtatgaagggtggtcaatagaagagagaaaccagtggcttcaccaaagactctttgagcagagccattaaccccaacgatacgccacagagcacccatgatatcacatctgacttcatagtgaagcttgtattgatccccagagactctggtgaccattccactcttcaacacatcgataagagcttctaactcttcatgatggacctggttgaatgacgggtcagatacgagttaccctttacagaaactcaaggatttataatacttaagcaacagaaacctcattagtggcggcatgatctaaagaattaaaagccttgccaagctaatagaatttgactttgtagatcagagaaacaagaaaacacactgtataatatagaatatcgagatacatattccttgaatgtagacttacctgtttaatgtctcctgtgattaaacatgaaaaaatcctcaaaatactggtacgatgttcatcagcgatcaggaatggaagaataacggtcacgccattggcagaacgaaaagcttcttgattaacttcagaattctttagtaaagagatcatacaatcccaaccaacagttatagtcctttcaacttcaaatataggcaactttcctgaaccagattccatcagcttcggtgatgaaatgatggcatcctgactatccaggtgttgtttgaagctaggtgagctaggtacccgatccaaatgattagaaactccactatactgatctggacccctgagaagcttgtgctgcttcagatcatcttgtaagacttccaaaacaccaacttcacctaggactttcttgtactgttgatcaaaagatgtgagctttacaaagaaagaaagtatggtatgcttcaactcagaatcgataggctgttgcaacaagaaacaaagtgacaatagttcttgctctggaacacaatttacaactgtgacagcatattcaagaattttgaggattaactcttgcagggaggaaggaaaaccacccatgttcagcacgagaagtggaacagtctttaattcttggcatattctgtagttttccaaatggctcgtgaatatcttgaacattcggtttaacacttcagcctgaagatccttgttttctgctttcagaaagatgtcttgcaacatttggacagcttcaaggtctttaactttaccacttccctgttcacatggctcatcataccgattgttggcagatggtgtttgtctcctgctatacccagtgagctttgtttgggacaatagtgaggtacttgttccagatgactcaatgggaccagtctgagccaaggtgacaagaacatcaagcaatctggaaagtgcaggggagaaatgttttaaagcaaactcatcattttgcctactattcaatgaaagggattgctgtttttcagagtcgtcattttgcctagttttcactgaaaggggtggctgttttttagagtcattggaacctctatttttgtgtggggatgaatgatcgaacgcaaaaacaatgtcttttggcatggaagatagaatcagcgcaaactgtacaaggaagtggtaaccatgtgcatttcgtatgtcatctttgagcctgactccaccagtttctacattagtcaaaatttaagaaacattagcaaccacaatcagagcagtttaccaacccaaaactgagaaggtgactaccgaatatttctactctctactaccttttccacaagcattgacatattttgagttcttatgatttgtctaagtgaacttaccaggtctgtacgatagttccacacattcaagtaacaaatccacaatgcccactgtataagctgagtccccacaatccggatcaaaatctttgacagccattaggagaacctttatctgcagaagaactcagcaaaaaaaattagttcggaagacgtcgaaacagaacaagcagtcataccactaacttgtgccagaatttttgttaaaaagccccgtttagatgtagcagaaacaaataataggtgcgggcctttttcacgctatacagaatccaaatagttgtccttagtcacaaaatctatctgaggcagttttcctagcgatctagcttcctaacatagattttcagttcacaaaccaagaacaagcattcttagaaactccgtcaaatggtttgaagattactgtaaacatcacaaaagaaaccatttaaacaccagattgcagctatcatatggcaatgctcagattgtgacaaacaaaaatatatgcacaaaaccaatacttatcattagttttattctcatactctagtaaattaacaaaagtctcctgacaaccaatttctttatcacgggagaccttatatagcttgaacattagcaaaaaaaaaacaagaatatacattccccagtaaggctttctacaggatacaatggcataccagatggtgtttgcgtatgtagcttgccgtgctaccattgtcattgacaagaagaagcccaagaatctgaaagagacacgaaatggaactttaagcatcacaacattcgctcaagtttcatggtcatgctacagaaaagttcgcagctgtttcagtttcaacacacactgtcattgctcgacttctagaacaggtgagcaaccaattacctgcattgcatttttgtgaagctgtatgttatggaatgaaaccaggcctgctttaaatcgagagaaagccatgagagaaccattggcaaccatcttaaa

SEQ ID NO: 31574 - DNA, 691 bp, Arabidopsis thaliana landsberg
aaccgtttttgcaaaaagctccaacagcaaaaataacactctttcaagggttgttccatgcagaaaatttgtcaaatagctcggcctgtagaaaaaggaaagatccatcaagtgtaaagtaaaataaacaaacttagctgacatccaagtttttgagacactacacatgtacatttatcaagtcaaactctgcttattttcttggtatactaccaaatcatgaacgtcttactacattacacagtccatatttttaataagcttgttaacacaagaatccaataaaaaaggccaatgatacctggaaaactttaatgagtttcagctctcctctacgcttcatctcaaaccccttgagttctgctatggttccgtcatgattgaaaacagcataccgcttcttaattaagattccctcttccttggatgcaggaataatcattgcctggatgtagagtgttagagatattatttttgtcaaaaagtcataatagcatttataaggcataccttgtacggtccatccacttcaaattcaattgagcattcgctacgtgaattatatgtctttcgtacaggatctactagagtctgttccaaaaccaataatcaaagcaaaaagctttcagaaactcaacttgtttgttatatcattcaaaaactacttttaggaaatgtatagatcgggata

SEQ ID NO: 31575 - DNA, 1017 bp, Arabidopsis thaliana landsberg
agaacacctaatattacaaatacctcgtcaaaaatccactgggaaacaccttactgttgtaaaagcttaatttgtctgaacaacggcgtaaaatatctttcatatgctctgtataacaagcaagaaacaaatcaaaccaaaatccagaaaataacattgcactgactaaacatcaagcacaccaagaccactcattcaacataagaatattaaaacaaacaagaaagaatatagaaacccaccatggcaagcatcagtaagattaatcgaaacattgaagaaagaatactctatagtccagtctggttcgccagcatacagtcccgttgcccaacctgtgcaagtattagcaataattcagctaactattagatgtaaaactactaggtaaactctgccaaaacatttattagtttggcaccaaaaaaaacctacccaagatttttaaggcatgaaacagacttccttcgccttcatgaccaattagatcaccaagatacctgcatggtgcctcttcataatgatagatgctaggagttacaggccatgaaacactaagctcgtgaccctgcattataggaacagccttcacgagaacctaaaaccaatgaaagccaccaccacagaagataccactttagaaacattctagcatcaatttatcttcgtttcctgtaaatgctaaagctaaaataaggagaggaaaaaacctgcaaatggtctagagtacaaggctgaccaggaaatcttggaataccctggttggtgtttcgaattccctggaacaactcttccactagaccttgagttttatcaagattttctgaagacatccagagcaaagagatgtataaatgttctatagactaatactttgttttctgaaagtaagtaataaaaaatctgattttttgggttagctccgaaacgtacccttgccataaacaaccagatgcatgatgttggcagaatagtgttcgccatagaatttaattagctcactccttggatccactc

SEQ ID NO: 31576 - DNA, 8324 bp, Arabidopsis thaliana landsberg
  unsure (1)..(8324): unsure at all n locations
caccacatttttgttttctttttttatcattctatggttatgttgattcaactgctggtttacagatttactccactacatatgnnnnnnnnnnnnnnnnnnnnagtcccaaaataggccctcttttaggccggcacagggcactggagtcaatacttttaatgtcaggggcgtcgagtgtcgactaagggcttgacaacttagtcaaaattttgataaaaagttatgacttgtcgatattttttgaagttgtcaccgacggacacaaacaaatttccggaaactaagcccaaaggaaatggagaaaacaaacaaaacaaaagggcaattacaatcctgaacaacaagggggaacaaagacgaaactgattcagcgcattcattatttctagattgatctcaaattgtgagtctaatgataatgatatcattagcgtatattgtaattcagaggaatgtcttttgcatacccaacttcaattcatcggttaaatcatatgaaacatctcatcattatttggagaaaactacataaagccttattgttgaaaaaggaagcaagaattttttaaccttgatttgattggacagtcttaactagcagctattcaacacgttctttactagaacggattaggtcttcacttgtagagctgttccatgagattcttcagcttcgtgacatctgcacccacaacctcccctttcttcgagcctcctttgaagaaatgcagtgttggctgcatcatatatgttcatgagacaaatataaaaatccccgtttcaacatgagttattcctgctaattgtaaaatgtagattatagttggaaagacagggtaatgaaagctcaccacagccgtgatattcaacttgctgatagtgttcgaaatcccgccctacagatatgcaagaaaggattaagttttaagcaaaaattcatgagcacagaagattgcgcaaagagccgtaaagaagcttgactaatattgtctggttcagctattttactcgctaactctatcgcatacataacattgaaacagagtgtggcgagtaaggttctatacagcacaccaaataatcgtctcctttgtttcaatctcaaaacactgtagaaggttctaatcacagaaacccaacgaaaatagacatatatgcatagagttcaaaagcaagacgaaaatacctcatcaatgtcgactttatacgtagttacatcgggatattgtttactaagctccacgattacaggagagataaacctgcctgaagtaaaatgaaacacatactaataaggccactcacaaaataaaattaccatacagaacaaaactcactttcagaagaattaacatacatggtccacaccaggcggcagtgaaatagaagaccgatggtaaagatccatctgagtacagataacaagaagaggacataagcagcaaatcatactaaacacatccacttagcgtgaggtaagaaagtaagtgtaatggtttaccttgagctttgctcattgcattgatgaactcttcctctgatttcactagaacaacaccattttcacctaacatcataattgcaggattagattcatttctaacacagagacgttatagatagatactcatttaaatatgcaaactttagttttctccaactgacttgcacagataaattcccaatttctaaaaaaaaattcgctgaaatggcttttggtagagttagagcttagtaattttgattcccatagaaaaagctagcagcctagcactataaactcaagcttattcctctgatcaatctcgttttccagccaagatcatgctaatcacagacatttacgcaaatacgcaggaagcagcagaaccaattgattaattacctccagcttccgaacagaggcttctccgatgaggaagcgaagtgttggagaagttaaaatcgatggatggaccaatgttggaggcagtgaacaacgaatttctagcgattagcgacgatatcgagtttggggccagaacaagcggtcggatggaagtagataatcgcgacgatggtgtcgaggaacggagagtggagaactggcgatgaagaacctttcgtacgatcgaccaatttcccttcatcactcgagcttttagatcaacgatcaaactttagctgaattagggtttttcgaaattccgactgtaactaatgtttggtatttttcaggcatcgtcggagaaactaaaagagataatttgggaaatgtaaattacaaaatgacccacgggaaagtgatgacttctaaactagccccgaattaaaggtttttagtttatacgatcctgattgtggataataatgtgttaattattcattgtccaatgaaatttgtttgggtcattgttatttggagttttgaagtgactcctcgaagtaatgattggatcttgtgtgtattggacactccatgttccgtcaatgtttctatttaatttggatgaaacccgcccgagttagttagcatcaaattttataaggtttcctattatttattttggcaagtcaacgatgatgatttacatacgtcgattggattttaatggtattgttttattttttttaaacgatgtgtataatagatagttatagttgtcacgatgtcaattgatatcgtttttcttgctttgtctagataactgaatattattagattcctaccaccataaaattattagatttataaatggttagagataatactcgttttatggttcgagattaagttttatatacgttatatcatatatacgaattgtccaatgttaattttggatgcctattctatattagatgtcttggttattgatcatcaagtaactatgagtaataacacagctgaaatttctaattttcattattgttggaatcactttcaggcttcgtgtaaactattgtatctcctgtaatataaaaagtaaaagaagactaaacataaaaacccaaaaatttaacttgtgatgattctgcattagaaaattttgcaatttattatgatacttgattaggcggatcagttattagtttagtttactaagaatagagatttatctcagaaactttaatgtataagatgttaggagtcaaaacattagcttatattaactcatttagaaaagattttgaagttttagataagatatatcaccatataattctcaaaaacaattgttaggatttttaattaaaatctctatatactaatcatttctaagagattgtcaccactaattgtatagtagtgaaagttttcatctttagaagtggtgttatttcctagttgtaaaagtacaaaaagacacactagacttcttcaaagtcaaaaggtgtgaacagatcaaatcaaataaaattcccttttaactaaaaaaaatattatcaataaacaataagcaagtgctatgatccacagttacgcaatgactcttacacctccgtggatttcacaaaccagacgttgactctctctatcgaccttatatttttcacaccaaaacccttttcttcttcactttccatacgatgatcttcaaatggcgatcctcgacacaaagtccagccgttggatcccacacaaccttctctttcttctcctcttgctcttgctccagtcagtaccgtatggattcggtcagactcagaccacaccacccggaacaacaaaaacgaaacctaacgatccagttgttgttgtaatcacggttttgtttttagtgatctttttcatggtcttcggttccatcttctgtcgtcgaagcaacgcacagttttcacgttcttccattttccgatccaccgacgcagacgccgagtctcaggtcgtcaggatcaggaggttgacggcgcgtgggctcgacgcggaggctatagaaactttcccgacgtttctttactcggaggtgaaggcggtgaggatcgggaaaggtggtgtggagtgtgcggtttgtctctgtgaattcgaagacgacgaaacgctgcgtttgatgcctccttgttgccacgtgtttcacgccgattgtgttgacgtctggctctcagaacactccacgtgtcctctctgtagagcggatcttgtcctaaaccaacaaggtgacgacgacgacagcactgaaagctactcgggtacggatccaggtacgatttcgtcgagtacggatcctgagagaggaatggttttggaatcttcggacgcgcatttgctggatgctgtgacgtggagcaatagtaacataacacctcggtcaaagtcaacggggttatccagctggcaaataaccggaattttgttcccgagatcgcactcgaccggacattcgttaattcaaccggctgggaatctagaccggtttacgttgaggttaccggatgatgtacgacggcaacttatgaagacatcgacgacgatgggacacgtggcgttactacctcaggcgaggagttcacggagcggttatagaagcggtagcgtcgggagcgagaaaagcgctttcccgtacggacgtaagagtaataataacaatcgacggcttcattcgctgtctttttcattctctttccggagtggttccgtacggtttactttctccgaagatgcgcagaagaatcttccgacatcgattgaagctggtgaacggtctttcgaacggctccgaccagatgaacgagtgtaaataatatatatttttttcttttttacaatttgtaattgggatttaatgttgtcatgcctcttatttgcgttttttttcttttgagcatgaccaacaaaaatgacaactattttttgtcaaaacaaatcgtttgaaggtttcagaaagaaaaaagtatgtgtgagattgtgaatctttgaaatgtagcagatgggttttacacatttgatggataaatggagttgggttttattttaataacgcttatcccatcaaaatgcaattacagtgacttccttattaagcatttgtggaaaccaacaaactggtcaaaccgtcaaacatatgcattaggtattttccttatatatatctgtatctgaagatttttttatttcaaatttggttatggtaagctaattatgtttctacatgccaacttagttttttatatatatataaaaaaaaaaaaaggtctagccataagatattttttttgataatttccatgcctcttacaagaattgtgagagtgaatgattacatccttagtttttctaaaccacaaaataaaaactttcgttcatgaaatcttatggtaagttttgagagaaatatccgagtattgcttcagtccgttgcatacgaatcaagcgagacgatggtgcagcctggaaccgagataaaagcaagcgacctaaccctactagtaatcacgattatactcttcgcaatcttcatcgttggcttggcttcggtttgcttccgctggacctctcgccaattttactcacaagaatccatcaaccctttcactgactccgacgttgaatcccgtacgagtattacggcggtgcgtgggctcgacgaggctatcatcaactcatttccgacgtttctctactcggaggtgaaggagcggagaatcgggataggtggcgtcgagtgtgcagtgtgtatctgtgagttcgaagaccatgaaacgctccgtttgatgcctgaatgctgccacgtgtttcatgctgattgtgtaagtgtctggctctctgatcactccacgtgtccactctgtcgtgtggatctttgcttacaaccgggtgagagaagctacttgaatccggaaccggatcttgtagaatctacaaactcgcatttgtttgatggtgtgacgtggaccaataggaacagaccgtctcggtcatggtcaacgagattgtctcaatgtcgagtctcccagatattaatctcgagatcgcattcgaccggacattctgtggttcaaccgctagataatttagaccggtttacgcttcggttaccagaagaagtccggaggcaactgacgaaaaaaacggtggacaacgtggcattttctcaggctaggagctcacggcgtggttacagaagcagaagtgccggaagcgagaggagtgtcttctcgtaccaacggcggatgcattccttctctgattgtgcatggtccacctcctgtggcggagaagcggtggctccgtcaaaggattcccgccgaatatcagttgaacaatcccagctagatgatcgagtgtagtagataggcaattttcttggtgtgtgttttttgctaacaacatttgtgtttgtctgtttgtctgtttgctatcatttgcttttcgaacatgaccaatattcaagtccaaaaaaaaaagattaaaatgtcagaagtggggtttgaacccacaccctcttacgaggaccagaacttgtgtccactcggccatcctaagtcctaactttattgacattctcgtgacagacatcgtttatatagaagattataatctttgtttctagctacaaaatctgatcatagatacacatacactacaatgcaaaatcagatcagattaatacaagtcgaagaaaagcaagtctaatgaatttcagttatataaactatccgaagagtatggtcaatctgtaatgtcgaaacaaagcttggcttcatcccaaggaccattaatctcaaacttatactcttgcatcctaatgagccaataaggacacacaacattgacaagaagcacaagagaaagaaagacaaggaagaagagtctatgcaatgcataaatagagtaaagcgtcaaacccattagagcaaaggagaagagaagatgcaacccaaagttgaatttcttgatgcagtaagtaacaagaggcgcaaagagaaagacttgaagtgagaatagcatcacagcaaagacatggagcctagaaggaagacgtgaagcaacaaagactgatgctacaattgaagcattgacagatatgcagcttgtcaaattcggagttttgagtgctcctggagctctaatggtggaaccagagtaatcatgcaagaagagatgaagcaagaggagtgaaacagtgactgcccatatcgaatctgagctgatagatcgcgtgagagtctggtaaatcggagctaagatataaagtcccgtggtgaagaaggagatgttgacgaggtaacgcaagaggagactcaaagataacattttttcttcggttaagaggagaattaagaatcctgatgctaagagagagagatcaagtagcaaaagcgagttctcgtccaaagatgattcaagagtgtgaacccaaaccaagactacaagcgcgacgatgcagaggtattgggagattgagacagagtctttcatcaccttgagcaaatcacgtctcactacgtttgcgttcatcaccatttcctcgaggaacgattcgtctgtgtaattgtcgtcgtatccgatttgcattcctccgtaggctactttcctccatttgggtcccggaattgagtctccggcgagattactttccattggggaggttccggattcttggatccaaaattagggttcttacgtcacctcgatcaattcaagttagagcgagggatgcgaaagcaaacgattcgtccaaagaggaagcttgaatcgagaggaaggaggatctagtgaatttgtgatgctattttttgaaataagaaaaagccgagggagtaattggcaaataaaaattaagagatttagtactcaagtaaaattatatatcaaacgatacatgtgagcaaactcgtggatgagaaagtatctcatgaagcaacagaacagaagacatgaagaaaaaaagattattgatgatgacagaacaaaaaacagagtagctcttaaaagtaaatgatcaatcaaaatgtgaggccatcaactgcataatgaacaactagttgagagccatcgaactcaggtataccaattcagttatcttcttcttcttcatcttcatcatcttcatcttcctcctcagatgcttctttgagccactgtatgaatgtatcacattgtttcagatatactttgtcagcttcatccgcgcctgccttctcttcctcccatctcagtatcgcatcttctnnnnnnnnnnnnnnnnnnnnnnnnnnnnnnnnaatttgtgtgaacaaagggcccaactctttgggagattcctgacacatctcttcaaatttcatgatcacttctatctgttcatcaattttctttgcgtagaagccaagaagatccttccattttgtaatgatactcc

SEQ ID NO: 31577 - DNA, 1279 bp, Arabidopsis thaliana landsberg
aggcacatcctgtcttgcctacacctcctcttccttcttcttctcctcaaccgtaatttcaacatccttcttcttgttattactctctctgcgtctacctcttgcaggaacagaagaagccatcaaagctcccatattcaagctcttgatgtaatcctgcaacagagaaggtcttggatacttagatctacattttcttttagagaattgtcttctttttgttgcgttccaatggctcttgatcgagctctctgttcttcccgggagccttttcgcaatctctgcccattttgtttccaatctctttgtgaaattcaatcagcactctgtcctcttcgtcactccatgtttctttctgcaataatctttatcttttaggttccataatcatcaatacatgatcttatagctactagtaaatactagtaaaataccttaatgtcaggtctcaaatggttatgccacctctctctacattgtttcccgatccttcccggtaacacttgagcgatatgcgaccatttacgcaatccatacttctccacgagttgaatcagtaccctatattatccaaaacaagaaaacttcatttacaagcaaaaacgagtgaatattgttaaaacctctagaatagtgtaatactataatcatcaaaaggtcttgattatgttaattgattcatgacgtttcttgtgttaataacgaacctgtcttcttcagcagtccattgtcctttgactaaggttgactttttggtttctttccatgatgatgatgaagaagaagaagacaactttcgtgtaagaaatggtttggtcttgttgaaacttgttgctctataacaatcattatctgcagaaacacatgaaatttcatctggcattacgaagttcataggtttgaaagtctctgtaggagggtaatcaaaagggatcatcctcatcatcatcatgttattttgctccaagtccataggatcatgttcatcaaccaaattgatctcttgatgatgatgaggatgattacgagtgaagtatgagttttccatcgcttggaaatgatgatgattcatcaaatttggtttagtttcatagagctcgaccatgttttcttggtaagagcaatgctcgaaaggagcagtattgatacaagacgacgtagtttggacgctgagcaaaggatgtgaagatcgaggagccatgatgatgatgatgatcaaactaatgatcatgatcaagatggtgaaaatcttgaagaaagcttgtaggttttgattggt

SEQ ID NO: 31578 - DNA, 1562 bp, Arabidopsis thaliana landsberg
aagaatttagatacaatagattcttcaaggaaatggtggaaatacacggagatgttggacgtcggcgtgagaatcgcggcgaggtttcattcacactgtcctcagacggctcgtctttattaccatcctccatccgacaaccatcaccatcacggcggagtcaaagatttaatcggaggtggtggggttcttgggtcaggtcaaaattcgaccggtttggttggtggtttaggaaccggaaccggaactactggtggttgcggtatcaaatcttctcaagtgtatgatgacgctagagatctcttgttattctctgttgtttgatttaatttatttgacgaacacaaaaaattattataatttttttggttggtgttggagagagatttcatgagcgtttggttgtgttttcaattattattgagaaaattgtatgttcttgagaggatttgtgatactatttaatcatctctggattccaaaaatttctggggattattggatgttgatgagaaattaatttgattcattatttttgtttgacttcgttcggatttaggttgccgcatctttggtttaaaccctaaatttattgtcgaagacttttaccctttggggccatattaaattccttgcctacggctgcaacttgattatgagctgtataatcttttaaattatctgcaaatctgcaatctattattataatagtgggattcttaagaacatatcaacaattagagcacaaacctatcattcgttgaaccacacccaaactttctggagctatcagcatcttcgctgtcacaatggttaaacaaataatactcaagaactcatattataacatttttataaaagatttcacaattcaacaactgatccaaaaagatctggtaggttcgacaattccacagtttaacaattaaagtaggtaaaaagtctttattatttagcattgttcgacaatagctacaatcatcaaagtttacacgataaaactctgttttctaatacagattctagtataaaatgtcgtttggtatatgaatgaatgtttgtttgtgtatatatacttgataagtgttgggacctcatcacagtgtcagctggctacaccctttcaacgatgcataaagaggttgagagtttctgaaaccaacaatgtcttcgatctctatggatgttgatacgactttgtctttgtcagatgacatttcctttaaatgttggtttccgtaaacgcatacactcagcgatttcctctttggtgcgccaacttttgtgtattcgtcaaagaaattgatcaattcttccttctttagctctctcagtacagtcacctaaccacaagacatacccaaataagctctgttattggcttcaactatccaaaaagatagactaacgaaatttgcatcatggaagtaactagtaagaggttcttcagagatagatagctaggaaaatatagatattatttgcagtttgtctattacctctgcatctatgcggttgaatttgagtgtgccgtctggaatttgtaatattggaatgccttt

SEQ ID NO: 31579 - DNA, 5407 bp, Arabidopsis thaliana landsberg
  unsure (1)..(5407): unsure at all n locations
agcggctacccaatgttgttgagcagcttcctcgaatgttcaccattaggatttcttctttatctcgagtgtcttcgggccaccagttctgtgggattccatcaacatattcctccattgagttaaaatcttcgtgatgaactttaacgtctacggatccttctggatttattatccctgctgcgggagaaacctaaaagaaaaaaattcttgtatatcactaaatcttgaatactacaagaatcttcatttggcgtcgaaagagaatttaatacctcgagccagcgtggtagaccaaaggagcctcgtggattgtagtcagcatcttctccgtcatccttaactacagcctggccaccgcacagaatgttaaatatggcttggctcgtgggtgaattgtttgtgattgttaggatgactgtgtcctgactctgaagaacaatgttgttggtgctcacagaagtttctggaacaaatcttaaatcttcgaatatggataaaatcttctcattagaccttattattttccccagttcctgtctccgcacagatttatcaacatgagctattgtcgcatgaaatttgcagcgcacgggtttgtgatcgctctcagtaacatccatgcaagcttcatacctgttgaaacacgcaggtgggaagttagaatggagaaaacacattgaagagaccggaaaaagcgagaaacatcagaaaggtcgtcatgaaaccatacattatgactgatgaaactacagggcattgcaaattgctctcagagaatgggctagattgagtgtctctatatataactcggtcacaccacgcaggaattcgctttttctcccctgaatcatatcctggagagtacacagcacagaaagattcagttttttggagccaccatctcttacaaaacagaggaaaaaatgcagagaacagagcagagcaaaactgcttcaattttttcaaattcatatcttatgtatcaaatccacttttacctccaaggcctgagcgattcctttcaaatttgtaagtgggagggaaagtgattaatgcctcgcgcattccttggaagacttttccaaccttcatctctgctctaagttggtctctttctctgagccaatcgaaggatcgctgtgaaatgaagtcccttgcttcatcataggttataccaaacagtctatagttgaaatcgccaaaaaatgcgaccatgtctgctgctgcaagatcagacttgatttcttcagcgccggtgcttggaatctggaaaacagagaaacatgttaaatacaaatttaaggagcaaacaacataaactcaggagtaaaggtgatatgataagaacatacagtgttactctttgttgtataagctgaagttgagacaccagctgcaagagagagggcccatggcaaaccagaagaataaagcagccaaaataaatatgtggaaaagccaagtgagcaagacaaaaacaggtacggcaccataccagctgcagcgttacttagattttgtcctcgggaaaagaccatcaatcgaaaaatgtgattgaaatccgcgtttctgcgattaaccgcctccaagtgtgcagccaagtggcaattcacaaagcacattattcggtcataaactctgattctcagacctacacctccctatttgacaagtaggacattaatgcgtgtaaacggaacaagtacctcatagagaactaaatttgaattaacatctatatcgcattgtcatctacatcttagccagatagaagagattacacattgtggcaaaaggctaagttttttcctgtaattgtgttatcattcagtgggtcataaacattgtaagtaagcaacacatttcatatataactttctcatttgcaacttcacaagaacaaataaaaactgaagtactgaatcctaaaggcctgaatgtatgtagtatcataatcagatttgaagaagtgggaattgaagtaagacataccttgttgccaatggcacggccaaaaccacatggaactgctgcaacatcaagatctccaacatgagttctaatatccttcctcgccctaaagcagaaaattacagcacacaataggttggttaatcatagatgatacacaactgctgattgaaaaccttgcaaaagtgttgaatgacaagcacgagaatgcaacatgtcatgacagaacattcacttaccaaagagatatcagaagtcctgccaactgccttgaacccatacgctcgaaagtgtttttctcatcaagggcttttccaattgcatcaatccaccattgccccacagcacttccttcaagtccaacctacacgcgtcccaaatatgaggtgatactttgaccttcaagtgcttcgcgttgtggaaaaagttttagtccaaataaagtcaaatggaataaaaggagttaccgtttctttagcagcagacatggcaaggaagcctgcccccatctccacctcttgcaacccaacagcgacaatgcctacatctgaagtgacagagcccagccacgacataagtgcatcatgtgaagcccttccttgaccaacattccaggtaccaattaaaattctaacattgtcttgtctggcatataaagtttccttctgagacaattccgttcggattatgttgtccaggggtcctggagatgtcacataccatcctcgtactccaccatgagtggccagactgaaaatgaaaccaccacctgctgctagctttatcacaggttcattgtgtgaaacccagcttgaaattagctttccgtctaaatccaagacctggatgtagccacttgcataacccacatatattcgatcaccaaaagtgcaaaagcacaaaacaggccggtgatggtgattcacatctcgcaagcggtttccatttccatcccactgaacaattaggccacttatgcttccagtccaaattgttccatctacagctaacacgatagcttctgttttcctagtatcttccgaaaacgctcctgcacttctagtggcgactcggcgaacagctcctgccgctcccattatggcattacgtgatcgctgcagaaagccctgtggcttttccctttttgaagctgagaagaacttcagtttcatttcatcatcaacttgttggtcttgtataggtggcagatccccacgattctcaacttgcccgtcaacatttaaaactttcagaaggtctttactccgagcatccctgcgcacataaatctctcataatgatcatcaacaagtgactgaaaagacccagtccttcaaccaatgtgagaaaaataaannnnnnnnnnnnnnnnnnnnnnnnnnagtgactgcacagcccacactttagctcttactgaatcagctaacaaaaacttgacttctgaggaagatatgctacatgtcccatttacagtaacttggctccttaggtcaatggcagatctctccactaatagagcagccatgtgtttctcctccggtttaagcagcagagatttctctaacgtatcccaaggccatatttttataacacctccttcagaacatgaccacatatcacctacatcacaaccacaagcataagcaagattagagaaagaacatatttttcagatcaatcaatcatagtctaaagcaaaaacaactaaccataagagctaatgacaatggaattgacaggaccacgatgagctagccaggagacacgctccttgaaaggatcagaatcatcatcatcatgagaaacagagctctgatccatcttccaagcccggattttgccatccttgtgaccactccacaaaagcttgttgctttggtcagccaccaaacacattgttggagaagtagtaacagactcatgaaacggcgccgtatcctcatcccctcgcgggacctggccaccaatcccacacccagcctcatacgcatcttccaaattccaaaacctgataccattctcttgaccagcccaaagctgcgtctccgtacaagcaatgttcctcaagaatctcccagtctgcgtctccctcaacggatgcggcctcagctcaagacacggcggacgtccgggatgcaccgccgcgcgcaccgggaccttaaatatcccggaaccgccaccagcgccgataaattcaggtaatggctcggtgtcgtcatccccaagaccgacattgggaggaggattaacgatggtgtactcctcagctccggcgttggtttcatcagcggcgttttctgtgatgttacctccggtggagaattcgtcgtcggaggaatcgaaataaacggcttcggatgctaatgtagcggatctaggaacctcgtccaggctgtgtttgcggatctgatggtgaggcttgtgatcgaattgtaggctataggaatgcgttttacgccgcggaggaacagggacgagcgtggccaacgcctcttcgtcttcttcttcgataattagcgaatccatcgacgatcagaggaatgcaagaacgagagaatatgggaatggggacgaatggtgaagaagagaaaagggagagtgagagagaatgataatgagaggagagcacgtcgtggtggtgggagggagagagagagaaagagaagagaagagggagagagaaatatgaagacgacaagtgtacggaagcgaaagtcttggtctttgttggtttccatgagtcttcttcttcagagagcttctcaagagaaacaacaacaaaaaacgaatgtttttgttttgtgattctccaaggaagacgcagtcaaagttgagagagagagagacagataattattatatatttatactctcagtccttgtcacgttcctttgttttatttttattaatttattattaggtcctttagttttctgatttctctcgttttttttgttttttttttttattgttaattatttacatgcagatcgagcaaaatgcgaatgcatggcatcttatttcaacaataggtaacattatttttcaattggcaggcaatatgaaatttcataattgcattttttatcttaagatagtactattaatgttttcttttcacataatatcattcgtcagttaagtaatgaatgtgtaacgacttttctcaagatttcttctattccagctgttgtagttaatatcaaaatgtcttaaatgttactacttgtcatgttccttactaggatcaagtgggacaatcatgtgacagatttgaatgtagtagaagagtcatggaatcggaggaaaaatcttaactttattattggtaattggtaacataataatattcgttttaataaagattaaacaataaataaataatgcagcaagaggagccttatttttaacaagagaaatggctcgcaatag

SEQ ID NO: 31580 - DNA, 2684 bp, Arabidopsis thaliana landsberg
  unsure (1)..(2684): unsure at all n locations
tggattcttgcaacgctaaggaatgctataatgggagctgcggatgctgttagaagggttgcaacaagaggaggaggggcttatgaagatgccaaaagaacagaagccatggttttagccggggatggcatgatttggaccggctgcacaaatggattgcttatacaatgggacggaaatggaaaccggttgcaagatttccgtcaccatcaatgtgctgtactgtgtttctgcacgttcggggaaaggatatacattggttatgttagtggtcacatccagataattgatctcgaaggtaatctaatcgcgggatgggttgcacataataacgcagtgattaagatggcagcagccgatggctacattttcagcttagccactcatggtggtatacgtggatggcctgtgatttctcctgggcctcttgacgggataataaggtcggaactggctgaaaaagaacggacatatgctcagacagacagtgttaggattctgactggttcatggaatgttggccagggaaaagcttcccatgatgcgcttatgtcttggttaggctctgtagcatcagatgttggtattcttgtcgtaggcttgcaagaagtagagatgggtgctgggtttttggcaatgtcagctgctaaagaatcggtgagacaatagttgaaaacaagaactctgactctctattcttcatgaaaaggtttatttgaatgcgttatttatgtcattcttgacctctttttggtctgntattaggtaggaggaaacgaagggagtacgatagggcagtactggatagacacaatagggaaaaccttagacgaaaaagcagtgtttgaacgcatgggatcaaggcagttagctggtttgctcatttcactttggtgagttgtgaatccatgagataccttatccaataaaacaagtgctgctatatatgtaatttgatgttttcctgaatttttgttttttcaattcagggtgaggaagaatctgagaacccatgtaggcgatattgatgttgcagcagttccatgtggttttggacgcgcaataggaaacaaggtaaatatttctttgtcttcaggatgaaaaagaaagttaaaacctgagcttattccctttacctaagttttatgaccatccatttctaaatactctagttaccattgcatctagctttttgtttcattctctccaacaatgtagatcattctgggttctgatagcagcattccacctgatttatttttgtatatcaaaccagggaggtgtaggtttgagaattagggtctttgatcggattatgtgcttcatcaactgtcacttggctgctcatctagaagctgtaaaccgcagaaatgctgattttgatcacatatacaaaacaatgtcctttacccggtcatcaaatgctcataatgcaccagccggtatatttctatccccaatttttcacctaacttatctttcttgaagccatctgcctgtatacctcatgactttgaacttttgcagctggtgtgtctaccggttctcataccacaaagagcgcaaatgtaagcatccttttgccttcctctctagtttaacacaaagctaatgatcatggttacacctttggtttgagtttcttgcttaccttagacccatcacattttctgtagaatgcaaacgttaacacagaagagacaaaacaggacctagctgaggcggacatggttgtattttttggtgatttcaactaccgcctctttggtatatcatatgatgaagctagggactttgtctcacaaagaagcttcgattggcttagagaaaaagatcagctcagggcagagatgaaagctggaagagtattccaaggaatgcgtgaagccatcattacattccctccaacttataagtttgaaagacaccggcctggcttaggaggtacataaaccgcactttgtatgcaagtgtttggtttcatccaatcgcatattaaagttttgacctttgttttgtcaatgctttctgcctcagggtacgattcgggtgagaaaaagcggattcctgcatggtgtgacagagtaatattcagagacacgcgtacgagtccagaatctgagtgcagtttagactgtcctgttgttgcttcgattatgttgtaagattttccttacacactactgagatccaaacccttttatatcctccaaaagtctttaacaatttcgttttggggggttatggataggtatgatgcttgtatggatgtgacagagagtgatcacaaaccggtccgttgcaaattccatgtcaagattgagcatgttgatagatcggtaaggagacaagagtttgggagaatcatcaagaccaacgagaaagtcagagcgttgctcaacgacctacgttatgtaccagagacaattgtcagcagcaacagcatcgttctccagaaccaagacaccttcgtgcttcgcatcaccaacaaatgcgtcaaggaaaacgctgtgttcaggatcttgtgcgaagggcagagtacagtgagagaagacgaagacacacttgagttacatccgttaggatcattcggtttcccacggtggcaaaaggtatccaaactaaaacgatcaatccttagtcacaattctctcaagactcgccttgttatgatgactcgcgtt

SEQ ID NO: 31581 - DNA, 1121 bp, Arabidopsis thaliana landsberg
caatccggttcaattcactaacttaagccaaacacaaatattaggagaatcaactaaactgctaaacggggtcaaatcagacagaatctcaattattcaatattcttagctggaccgggtcaagtaaggtcaacaccagcgacacgtcattgatcctgcacgtatacattctgatgtggatatgtattttgtatagacctttgataataaaactaatcaacagctaagatgtctctagactcttagctaatgatcgcgattagggtttctttttcagtgctttatttttatatatctttttcttttttttctttgttcttcaatttttcattttcatattttcctccttgtgttatgtttggtgccacttgagtttagtgttgcttctctgaatcgtagaaatagaatgatattaatctagaacattaggctatctaaaggagatgcatgatttaagactcaaaacatatagtatggatatctaatcatcaaatagattaatatcattctatttaaaaacatcaaatagattaatatcattctattccgtacaacactcttacaaatttgccacatctaatccgctcggatcggtcgagtttaaaaacagacgagcctaataaaagtccatttagaatatagtggtagctgtaggggaggttttgattcacacttaacatatactgatacccaaaaaaaaaataaaaaaataaacatcatttaaaatccttggttataaacacattctctaaacttgagcatcttcataggttatctcatccctataatactattttttattgttttgattcagataaactcatcataaaattttaccttcattagtgagatactcaaaaagttaatatataattttacatcttagttatattttaattatatttgatattttgttaaaaaaaatatgactaaaattacacattattttatcaaatatattttaattaaaatagatattttgtaaataatgacaataaataacacattatttatcaaaatactaaatgttaacaaaaatatttctttaagttaataaaatctcatctttactctaatattatagtattggatcaaccaaaaatagcaatttatatgtatat

SEQ ID NO: 31582 - DNA, 2036 bp, Arabidopsis thaliana landsberg
tcggaacgggcaacaatttcgggtagatgtcaactgcattttagttcctgagtgcttcacccatgaatgtcatgcataacatcggttattcatatccaccttcagtaaggacgagcgtgaaattcgctgccaaggttgcggatggagatattgtcgatatcgtctacaatgcgttttatgcgaatttgctatatgctacacatgcgccacaattccaactgtgttataccacaaatatgatgataatcctctctctctttgttacggagaaaatggcgtggatgacacgtactggtgcgaagtatgcgaggaagaattagacccaacggaatggttctacacaaacaccaagctgtgcacaacaatccaccataaatgtattttcggacgtaatgtttatttgaagtctggtcatacattcaaccactatagtgatgagttggaagttgtgtgccatggtagtagctctcgtcccatatgtcatacatgtcacaaatattgcccaagtcctgtatacttcaaagtctatatgccggatgggactgaatttgatatttgttctttagactgtcataagatctaattatgttatgagatataaccagagtttaaatttgaagctgatttgtttttcttttgtcaacgattcgtttgtattatcatttcacgcatgttgaagaataaatttattttcgaataatgttgtttgtattacatctgaaaatgaacacatattgagaagtgaatatttttctccaatttgactgttattacttgagatatgtcacagcttgattataaatatacatgtctcaatcaatagagaggatgatgacaagtaaattcaattcatattacaacaacaaatctcctcccgctaaggccatcttcatcggtagaattggtaggagtatctcaatatattgttttttaatcattatcatataatattattatttatttaaataattattctgaaaataattatttaacctgttaaaatatgacatgtggcaagaagagtatttcatggtttctctgcagagaaacttttcttactctctctcctactttattattattttatattttttagtgaaagagaaaccatgtgagagactattgatggaaatgctctaagtcttctagaaaaatgtaaaaaggttaattatggccagaccggaagaccaaattttatttgcatggtttggcaaagtgccactaaatcaatttgtgaaaatcacaatccaatttgtgtgtttaattacgaatatacataatttcaccaacgtgttttggccatttacatattatatactcaaatttggagagtcctataaagtacgtgtttgtttaagtatactttaagatcacaacgaagggtatttactataagatactataaagatgagaacaaagcatgcatactaaatttttactttataaacaaatatgagaatgaacatttacgttaaatgtaacttacttcaagcattatggcgtcaatctccgattgtgtgatagtgtttgactgcaacatcctcatctccttctgtttgccgctgcgaagcggtaagctccacgtaaactctcaactcctaacgaggcttggatgagtgaaaactgaaaatcaaaaaccgttaaaccaactttaaattcaacaatctaaaatcctaattgggtgatcttcaagaaaattagttactgagattttgcaaaaaatttgtacttgaaatctaagctaatatttttgcaaattttttttttttgttatttttcccaaatataagagcatcctcaaagggaggattttagaagtttcttagattaataaagtaataaaatttaatgtttaatgatgcatgaagcttagaggccctcttagcttagaggtgctcttaggttgctcttagttaattggtggtgacgtggcaaggttttattggttggaatggtaaatattaaacctctttctctattatttgttctcaaaaaaatttctaaatcttttttattaaaacttcatcaataccaat

SEQ ID NO: 31583 - DNA, 3685 bp, Arabidopsis thaliana landsberg
taatggagattcattctttttttttgggacaaaatttacatttttttctgcattttgtaaaaacaggggaaaattttgtgttcacattttacaagagaagcacttcacaaattaatattccgaaggtgacatttataattaagcacaaagtgattttagatcgtaagattactacattgaaattatatcaaaaactttacatgaaccaaagaagaaaataaaacataatttttatatattatatattgacaccactgaaattaaaagtaacaggaaccggagaagaaaacataacgtaattatgattctatgacattattaaaaatctaaaaggttttaacgaaccaaaccaaaccaagaagtaaacaaaaagcataattatgatagaataataaattagtttaataatgaagaccagtgtaatcccctaacgtatctatcaccagggtttcacgaagatacttcagtctttttgcgcaatccacggagcaatgaaagaccttgaaatcgcagttcggagctatagtgtctaaaattatcttcgctgtgcgctcttgactcacgctcgcgttattcttttccaccagcaccgcttggacgatcttattgaacattttgcctcggctacgagccacgaaatcaaccagcgcagcttgtaccggacccaaactagggttcgacgccactgattcaatataccatccacggtaccagttcccgtcgttatccagcagcgctactcccgacggagactcggtgtacgtcgagaacgaattgtttgccgcggccagagccctgcgcttcaaatgggaacaatctaatgagcatatctctccggcagaacccgagagggtgaggcagttatagcgcttctcgagaaggaaaggggaacctttcgggaggacgttcggaaggaggagtctaaggctcgagaatgatcctgcttcatgctttggtttggacaggattttcatatcaagcgcgttgctcatctccataagaaattggaggcagtttccgcacggtgtgccgaattcgaggccgtcagtagagatggcgacggctaacttacagaggtctttctcgtagttgagtgcgaggttggtaacgaggaattgctcggcgtggatggagtggtgaagaggaagacctgggaagtcgacattgacgcctaagtagacccgacctgatgatgcgcgtccaacggctccgactttgtatttggagattggagcccgagcgagacacatcgcctttctgatcagatttggaagtctgatggggtcgtgacaccttccaacgctgcttcgttggcagtgaaaacgaacttgaaccgatcttgtgccattgtcatgtttttaaatttggtgaccagatcttgcaaatgagataacaagttaggacgttgtgccattgtcgtgttttgtgattttatgttgagagctatgaaaatgagatgagaagtgagattaggtctttacctatttatattgatgtgttgtgtctgtgtgcttattgtgtaagcacttttaaaatcgtgtttaggtcattcgtatacgcaaacaatacgttagtgtgtgaactacaagataaaaaggtgattgtgacaatcaacattcatgaactagctttttaagcaaagtagttagggttaattttctagttagtatatagaatataaagtaatataatgatagttcttaacttttatttagcattaacattcaatgatttgaacagtaatattgatcaaatttaatgctagttcaattgtccgtagcagcctgtagcatagcgattattttgatagtgtcaaatctgatatagaattatgtgtttgaaaatttcaaactaaaaatagtacaagatgtgtgatgtgtgttagatgtatataaaatgcttctaaaaatgtgtttatcacgtatgtaaagaattacatgcacatgcaagaatataaacgagattatgtgaaatgtgatgtccctccgtcatcaagactcatgaacaattttcataacagatttgcttttaagttgtttacggttactctagcactcttgtaaaatgtactatactaaagaatggtaaaaaaatgtgcacgttgaatgctttttaaataacgtgtttaccgtaagggtgaagaatgacatgtacacgcaagattacaaaatctaaacgaggttatgacttgtgactgtatccgttgccaacaagactcatgacgactcatgaaccattttcaaagctaatttgctttatactgatagttaggataactgttctgaagagttgtaaaaaacaataattataaagtctttaattaggcacatgatttcatggtatgactagtaaatactagataacaattgggaactagataactaaattgattgcatagtacttgtgagactgtgacaataattattaagtccattatatacatcgatatttacttctttgaaattgcaaatgaccctcggatcgaatgggtgcttttttgatagacgattttaaatttagtaaacatatgatttttttgggaaaagaagaaaatagctagcacaactcacaaattcaaagttgaaatgatacacttctatatacttttgcaattagactaatctcatagcatctttgctatttgttatgcttatggtcggcctagggaaaattatacagctttatatatacttttgtaattagacatttttagggattcagaaagatttgttgttaccatcttttatgattatgaaaaattattttcaatagatcattaaattctgagacaatttgactattccttaattgtgcacttagtagaagtttgtcagtgatgacgacttaataaaagggtcttataaatccaaccaagaagacaacaaagcataataattaaatcaagaagacaacaaagcataataatccaatcttaaaaattaaagcatatttaagattatttgccttaaatatgctttaatttttattggtcttatagcaatgaaggaccttgaaatcgcacttgggggcaatcttgtccaaaaaagtcctcgccgtggcctcttgactcaccttcacatctttcatctccaccagcaccacttcagtgatctcattgaactctttgcctccgccacgagccacaaaatcaaccagtgcagcttctactggccctaaacttgggttatacgcaacagattcaatgtaccatcctttatacacttcccctccgcaaatcagcgcaactccagacggacacttgctgtacggcgcgtacgatttgttcgccgccgctagagccctgcacttggtatgggaacaatcctctggatcagagcatatctcttcgggatccgagaggacgaggctattatcgcgctgctcgagaaggagggaggcatcttccggaaggatactatcagggccgaatctttccggcatgaggctcttgaggctcatgaactcgtctatgccgtcttttggtcttttgatcaagacttcgatttcaggagcgttgcgcatttcttgataaaactggcggcagtgggcacatggtgcaccgaacacggtgccggtgacggagagagctatatgagtgagctttttcatggagttgagagcgaggttggtgaccaggaactgctcggcgtggatggtgtggtgaagagggagatttgggaactcg

SEQ ID NO: 31584 - DNA, 803 bp, Arabidopsis thaliana landsberg
ccgaaacgacaatgagagagtgcatttcgatccactttggtcatttctggtattcaagtcggaaatgcgtgctgggggctttactgtcttgaacatggcattcaggttcgtctcttcctcttatagatcagatctgagatattttcaccttgttcttcggatttcgtagatatattgtacgtaattgcttagatctgtgtttgatttatatagttgatgtaagatccgtttcgatgaacctgtttagatctattgtatatgatttttgtattgatgtggtgtattggatctggaatgttacagcctgatggccagatgcctggtgacaagactgttggtggaggtgatgatgctttcaacaccttcttcagtgaaaccggtgcaggtaagcacgtcccacgtgctgtctttgttgatcttgagccaactgtgatcgacgaggtcaggactggtacttaccgtctgctgttgcacacttatctactgatgatcggtaacatatagaagagaaacaacaaccaccaccacgcgaagccacttgtgatatgtatcacgtcgctcatcattcaccagctaatactaatactctttcacattcacaatccatcaaatcagcgacatctcccaccctcaatcccatctactcaacaaccacatcatcatcgttatcattatcaggtacaagtgatggtaatactatcaccgcgttgaataattatcatagcaaacaacagaaacagcaacagaaattaattagtcaattacaacaacaaatagctcgattacaggcattacaacaggat

SEQ ID NO: 31585 - DNA, 2860 bp, Arabidopsis thaliana landsberg
ttttatctagttctcgtcttcctcttcttcttcttaggttatcccgatctggttggttcctttaacaatctgtaactatggcggcagaaccgaaggcagcgactgctgaagtagtaaagatggatctgtttgaggacgacgatgagttcgaggaatttgaaattaacgaaggtaaaatttttgttgttattacttgtttcttcttcgatttttgaatcgattcatcatcggttttatagtcttaacgatgaagctacgatgccatagatataagagcgattttcattagcaactgattggtagatacaggcaatgctttatatggttgaattgagaattatttgtatgaattgtatcagattctgattttaatagattttgatttgcaagttagttgattcttcagatttaactagtagttgtattgaaaggattgataaagatggactagtgtatgagttgagtaggtctgatatgaaaacgaatctgtttgatgtcaatttcaggtgtgagatatgttgatagatcttttttcatataggtctaacaatgaagctatagtctcatacttactaaatggataaaagagcagtttttttcagcaacttattgatgattaggtttagtcttaatagtcaacgcttcatttactaaagcctaaaggttattgaggatttgggaattatttgagggcattgagtagcctaaaggtttaacagattttgctttgtgattttactaatagttttattgaaagaattgataaagagggtttctgtttgtatgagttgtgtagttggatgtggaatggatgtttttgctgtccttttacggtcaaagtaaatactgatggatctttttatgttgggcacattggttggggaaagaagagtgaaagaagtttgccagcagtgggaagatgactgggatgatgatgatgtcaatgacgacttctcacgtcagttaaggaaggagcttgagaatggtactgacaagaaataaggtcgaagattgtgaaagacaggtcttcacatttaggaaatcttggttttcttttatgatctggaactttgtttgtactgcatcctttggtttatgtaatcggttctgcttttcctttgcacattttactattccctggatggaaatttcttatctttgaagatgataaatttaaactggtaagatcatcatcttctctcaacatccattgcggtgtgttccgtatggacatggattagttactaacttactatgtacattttcttacaaggatctttattagagcgtaaacggtatttgaaatgccaaaaatccttcaaactatgtattgagatgcactagaaatgcaatcctttagcaaacacaaatgagaaataaaaggggagagacccgtaaacatcacaaaataactgtagagatcacattcacaaagacataattactgtacttcacaagaaagaaacaagggaacacacactcttgtgtctttctaatactcatcgccttatttgtcgtcgtcctccgctccttctccaccaacttcctcataatctttctcgagggcagcaagatcctcacgagcctcagagaactctccttcttccataccctctcctacataccaatggacaaaggctcttttggagtacatgagatcaaacttatggtctatacgtgagaacacttcagcaactgcagtattattgctgatcatgcaaaccgctcgttgaaccttagccaggtcaccacctggaacaacggaaggcggctggtagtttatcccgcacttgaatccagttgggcacctaattttaacatgaccaaagatttgaaatgtgtagtagaaggagacttaagagagaaagaaacactagtagtgtgagctctttaccagtcaacaaactgaattgttcgtttggctttgatggcagcaacggctgtattgacatccttgggcacaacgtcaccacgatacatcaaacagcaagccatgtacttgccatgcctagggtcacatttagccatcatattggagggttcaaagacggaagtcgtgatctcagggaccgaaaactgctcatggtaggcctttgcagatgaaatcacaggtgcataagaggagagcatgaagtggatccgagggtaaggtacaaggttggtctggaactcggtgatgtccacattgatggcaccgtcaaatcttagagaagttgtaagcgaagagatggtttgggagatcaagcggttcaaattggagtatgtaggcctctcaatgtctaaagatctcctgcagatatcgtatatggcttcattgtccaaaagaacaacaacatctgtgtgttcgagaagagaatgagtcgagagaacactgttatacggctccacaactgctgtagaaacctgagaccaagaaaagagtttgaacattttatctttctgcagtgaagagtttaagtatctgtggaagtagttacctgaggagaagggtagatggtgaaaccgagttttgatttttttccaaaatctacggacaagcgctccaacagtaaagaacccaaaccagaacctgttccacccccaacagcattgaataccaaaaatccttgtaaccctgtgcaattgtctgccaatttcctcagcctttcaaggcaggtgtcaacaatttcccttccaactgcatcaatggaaaaatatttcaataccatatgaaccagtcatggttaaatattccgtttctcgtcataagcaatggatgaaacagagccattttgagcagagcaaataaagaagacagagttctttgttacaatggcaagcaatcatttggacattgatacccaacttgttagtttacaca

SEQ ID NO: 31586 - DNA, 1680 bp, Arabidopsis thaliana landsberg
agtgtgcaaaagtttatttaatacctgaatggaacacatattgtgaaataaacaaaataaaactctcatcatttctctttacctctctctatatactttacatacaagacacgactccaaacctggtcatgccaatacctcaactggacacattacgttcctggaatgaataaccaaagacacatgcaacctctggatattttgtctaaccttttctccaaagctggttgtctaaaaggaagataccaaaagacgagtaacaagcaaaattgcagtatcaaatttctccatatattgaccaacaatgacaagaaacatctatggaataagaatttgacagttaaaacttatcttcatgagaccaaacaatgaagcacaaggaacaagtgcagggtaaacaaattgcattgggcttgtgatagtatttgtatatcatctatatgtttcctgtaatcttgccaaactgtgattccgttcactcattgattttcctagctctatggtttggtttccatgtgcattcttcgaatatcaaacttgtctactgactccagaggagagactgtctcatttatcatccttttaatcttgggactcaacagtcccctgtggctaaacccatacagcttcagcacttgattatctgcaaaattaaaagccctctccatgctcttgaagcatctatcgactgcgtaatcagcatagctgccacacggtttgcaccctacaaaatgtgtcacaaagggccatctctcatcgcccaatcctggatgatacttctctatcatctcttcatacctgtcaaccaaaccttcccaaaacccgtgcaagtagtattgattctccacataaaccttctctatccatttttccttctgcgaaagcaagagatatatcaacgccgattgatcatcggcctcaaatgctggcctgcctttcagataagctgtcagtatcttcccagcttcgtcacggatcttcccttttggtcccattggggcccaagcatctaataaatccaatgaccactgacaatttctcaacagaaagatacccgtgttcaatgcaacccatgatttttggttgaacagcaagtctggataaccgtgtatcaccagattatgattttcgtaccgaggcaacgggatctcaaacagtatatcagtgaacaaagcatcactatccatccaccaaatccattctacttctggatgagacagcattaatgtcctaatcataggtaatttcgtccaataccctgagagttcctcatccaaattcgccatgttatacacaatctctatcccgtggagtctacagtaatcaatcttgttcttcacagctttcaatagataatagtttccaattggtttatcacagggtccgggggaagaccctgtgagaagcaatattcgagctttgccattgacaatattaggaaactcagggttctgattcagccataccttgcgttgactatcccagttggtgattttgggccctagagtatatgtcgcattgggactaatatcagctttaggcggctcaagcaagtctgtcaaatgcgaatcagatgggatctccacgattctggggcctagagtatcccctgcgttgggcctaatatcagctgtaggcagaacatccatgtgcgttgaaagcacatcagacaggatctcc

SEQ ID NO: 31587 - DNA, 7674 bp, Arabidopsis thaliana landsberg
taattagccagtcacatgttagctttatggctactgtttgtgtgaatggtcagtaagcacacctatagcaatgtcgttggtgattcgtttcaacactagaacaggatttaacccagtttttggttatggatcatcaactatatctttggttcaagttttttttttgtaactgtgtaacataacaaaggtgcccaattagccgatcacatattagccatatatggctgcttctttctgtgattggtcagtatgtcaccaatataagtatcttgttggtagccttttctgaatgtggacaaattctgtgttctcttttctaggctattaactgtacacattcaagtattcatttttacataagtttctctataggtggacacgttagtcagccatattgttctatatgtgggtggcggtaatgcccacctagatgttttgttggtggcttctttcacgaaagtagatttctgctttcacttcctagctaccaactacatttttgattctgaagtttttgatggagaaatatcttaccaatcagagaagaatctcaaaatcgccgttgtgaattttgatagagaaatagagagacgagtctatttctctagtagttagtggagttagtggcggtgttgaggtaacaacatcaaatggtctataatggcaaaaagatgacactattattcccaagtttaagaatcaaacccaatgaatcacaaccaaaaaggaaccaaacacttaatcacttggtaagccaagggtatacgtcaggcgatgaaggaagcctcgctgttaaaacctcaacaccagtctccgttacccatagggtatgctcaaactgagggctgcgttttccatctgcggtaactgcagtccatccatcaggccatgttcgatccctccatccccctatcatgacaatgcccttatggttgtaaatagataactcaagtatggagtaacaaatttaaacatttaacgaatgcaggttaaggacatttaacattgaactcaaccagtggcggatccaggaattttttttgtagggggcggcaatatatttatattttatgtcttgattctactcggtcaagtttaaatgatgttatgttgagaaacactcacgatgtgtgtccgaggaatgtgttgaagctttgaccgtgtaaggaactgtgatacaacagcttccactctacaagctcgtggtgaggaagagctcctccaatatgccaagcgtattccttctttaatagtagcctatctgaactcacactatcttcatatagcagatgcgggacttgatatccaggtctcactatataacaaggttcagaggatataaaaaagtgaaaaaaggaaaattttgaccagttttgtcaacaagatatgagttaaagacgagagaagacaaagaatcaacctggacccgggggaataagcaagcttccgaggaactttctgatagttggaacgagtgggcaccagcttctgaagtcttcaaaagacattcctttttcagaaccatcatcagattttgagaaagtagcggcatcgagtagcgcatctaccatctccttgtaatcacttgattccgcatcagaactctcagtggagaacacactcttcaaaatcaccaccaggaacgactctaaatcagacctgaagacatactagaatgtgtcacattcagagaataaccccatctaatctaacaatctcaattcagtttctatcgaaatatgttcttaagtggatcaagagacccagtaataataatacaacaaaacatgtaatgaaacttggatcacagaacacacaaatcgtcaaaacctggaaaacagggtacgagacgtattggtcattgctgtgagacttggaagcgagggaaacaaagagagatttgagatcatcaagcttcttctgagtaaaagctctgcaacaaaacacaaacacacaattgacaagatcgatttccaatttagaacttagggagtgaaagggagattggttccgatgaatacctggaagcagaaatgaagcgatgatcaacagaagacgaattcgaatttcccattctcgccggggttttttctctgctcagttctccggcaagtttcgtttcgtcgtctctgttcttctattatttttgattgatcttccacttcttcaaaattacaacttcaaccccttaaaatcgaaatattcttaatgtaccccattacttttaatgcgttgatctcgaagcagcagagtaaaatataaaagttgtgagttgaaatcacacaaagaacagaaaataaaggggggcaaacacgaagagctcacaactagattcatgcttttagatttccactggtgagtctaatctgtttaattattgcaattcgtccttgttcttgtcgaatatacagttctgttttagtatctttttttatgtgttcatgtctgttttgactttgttgccgagaaattttactgaaactagtaaagctaagctctttgaatcgtttttcatgtttaattgaagcagtagattgttcttcttccactattggatgccatggaagtagaaatcttcaggattcttcttggctttgattctgagatttttgcaatttgaaagtttaatcaaaggctactgtgatttttttggatatttttctatgatttgtgattttgagttgtggtgttttctctttttcccgttgttgagatgttgagaaaatttatgtccagaattgttgattcacactatttgctgattcggtttggtttgcattggttttgaaattaaaactgatttcggttcggtttcattggttttgtggaaaaaaactaaaagagtcacgcgatggagaatttggagagatgtgcgtcgataaaaaaagtcatgaattgaaaaggggtttacccacagaatcgctctcactcgctcaacgcgctctttctgcgagtgggtacgaaatagagccttctgattggcttagaaactctaaaaaaacttaaatagtatacatgttgctagctatgttattatttacttttagtcttcttctctcattttaggcaaaaactagattcacgctttcagatttcgactggtgagtgctaaaatatgtataaaccttaatttttgctaatcgtctttgttcttatcgaatctatagttctggtctgaatttttttggtgatttttatttgtcctgctctgttttttgactttgttgctaagctcgtttgtcatgtttaatttggagcactaaattgttcttctggatttgttattaatttggaaccatggaagcagaaatctccaggaatcttcttggcttgactcataaataaacaataaggttttggaatgtgaaagtttaatcctttcctacacttcttgtaaatagaatgttcaaatattactttgtgatttggatccttttctacacttgttagtttgtgattttgagttgtggtatttggtgttttgttatgtagcagatcaaataaaagaccactttacctgcaaaatgacgagatcgtgggtgcttttgtttgttcttatgttcattgcgctgacttctcagtttgagtggaatgaacaagttgagaatgaaagtgagactagtagtcgtcctttgaatctttcagataaagagcaacaacatataccacaaggcaaagaatctgtgcatgaaaaggtttgttattattatcaaccttataatcattaattcattatcgtatggttcatatccttgaactgactaaacaaaccatcaatggtcttattagatcgcaggttcggaaatgaaccataattcaaatcaacccacaacaacaaagctttgaactcacacgctctacttcaaccacaaggttaggggaagcatccaactcctgccatgaaccatcttcaccacaggtttgaaccacgaaccggactcccttcacatctgatccaacgaccatttcagagacataataagcatcaacatgagctgttccaagaaacactttctcgcttcttggttcttccataaccttccttggtctatactcactcgaactcagattctctgcatatacattgtactttggaaagacagaatcttcttcagggtgcttcaatctccattctagcttacaacttaaggtcttggagccagaatcacccggtacaaactttacgtgatgagcctctataacccatgatgacgccagaggataaaccttggctttttgctggctcttgatggagatatgtccaagcaatgcaaaatactctagtgtgtttgtttcttctgtgagatcatctggtctggagcagaaggcagagatctcagtcagtgtgtgcccatctagaacaaggtttgtttcgtgtaccatccaaccggatgtggtctgttttgatgtgagaagacatggcaggaacatgtcgctaaatctgttgatagattcatttggcaccataagcatggactttttctcatgtgaaggagatgaaaaatggagcagaatgcttagctcggatattttatctgacttcacctgcaccagtccaaagacttacatgatgagtaaaacttaaagattgaaactttgtaaagatgaggaggagctcaaatcttatgcgttaacttacagaaaaggagattgagattggggcagcagagagctgaagctgaggtttgaatagtcttgctgtgaaatgtgcatttctctttagttttcctctgaaactgacgttccctcctccattataagatgcttctcgaccactaccatatatgtgtacttaattgttagatgccaaaacaatttcttcttaagcttcttgaaaatcaaatatgaggctagtattagggatttagggtcagaactcactcaacagtgacctgaatggtctctgaattccttctttcattgaattctaggaatggctgtcacaaagaacacagcagaagaaaatatcaaattggtatatagataagtccagattaaaaatgtgacaaaaaaggaaatgagctctagtgcaataaaagctagaacaaggagtgaccattgaacctgtagactttggcatgagatgttgtaccagggagcgtctgataatttccgacctccaagagagatatgagaaccaaggccctataaataaacaagagaaaagagtttcaaaacttagcagaacatagaataaccatggtcatttgcatctattcactgggaacaaagtttcacttcacctgattaaaatctgagtagaaaggtaggacttgaggatatgtttgaactataccccatgacttctcaacaagtgaccaccatctaaagaaagataacatatgatgaataagattgcaaagattaattttaccatcatttggccgtttgcaagtattacttgttttgtgccgtgtaaaaatccgggggttgctcggtttcgtatacccatccaggagcaaatatcgcagctgatacattactgctcttcagcaaatcaagagcaacatttgcctacaatacaaaagaattgaacaaacgtataaaaactttatatgcagcttgaacattgcagactactggttgaatgaatttgttagaataaagatacatacagtccattgcccaccaccgtaagttccccgaccaaacacatctattcccatgtagacatcatattttctatcaccggcaatttcagctgatgctttggggtagttctcctgaaagagatacctactcagtactcatatcacaatcaaaacatataagatgaatgaagatgaagtgattgattgaagtgaaaggccaaaccttccatgtatagttcatgaatataccatcgcatatatcaaagaaaggtttattattctcggttaactgatcttgccaagcaagatgaccatcaatagtgacactatcatacctacaaaaaaaaagtaatagaaaagatcagtgtagtctagaaacagatgaatgattttgacaaaaagaaaagcttctcaacactcaccatataactaaacctccaggtacagatgaatgcatgacttttgttagatggctttacaaaaccatcaaatttggaatttgaacttcatctattacattctctatatttatctgcaagtaacaattcacaagcaaagtaaattatcaataatattgctgaacaaagagatccatatatagcaaaaagaaaaatcaccagccagccatcaaagccaagagcagcagcaagttcagccaaacgctctgcatacatctgcgcagattcctttgtggccaacaactctttgcaggtagcttttccttcgtcccattctgtgatgaaagtccccaataccttaacatttccataaaacacacacaagaaaatgaatcattccttataacaaccataattgtacttctctgctttcatagaccaagacaaccaaactctctatcacttattcatttcctctctaatcaaagttcaacttttttctacgacttgcaacgactttactcacttacattcaatgatcgaaacttgagttactttaactatataaatcagctaaactttgaaaagtcaacacattgacttactttaacgccatgcctatgagcagtattagtccagcaaggagggggaatagtgaccagagaatgagagaagtaaacaaaaatgtccatcaagtaccaatgccaaatcgcaaatccagcttcgttttcacacccttgtacccacttgtcatctacataccctcctttcatatcgtggcagactaaaacccttgggcgattcggtaaacagtcggagtctcgccggagaggtactgtggagcgattaaactggaaatgaaaggaatcgaagtaagagcgagatttcaggtcttgaagagctttgattgggcaagatataggtaacgaccgcttgacaagatcaagcaacggaacggcttcagattctgcaacgtcgtcatcgttggatttgggcatgaggagagagagaggaaatgaagtgaggagcttacgagagagggtgaagaagagattgtaaattgatacgagagttcttcgagagaaataggcgcgaagaagttctcgcattttgcagtggtcaacgaaggaagatgatgacgatggcttttttatttaatttattcttcttttggtttattcgtacgccaaattaaagaagaaaaaaaacagagcatgtgaatttatcattcttttgatgtgaatctaaacgacatgacaatttcattttttttataaagtaaacttacacgaaagcagagagataagatatttatatgggccttggcctgtgattactgattaaggcatgaaaagttggattcttctttattggatctgataaaatgcttataaggcctttgaatacaaacaaagttaaatgttattgttgatcctttaaaagttcaaacatgtgattagcaaaaagtgtagtggcttttcttgctttctttttgttttataacaccgtaatccaaattggaattcagactaatttggagatagataagttcattggatacaagcaacgaaattgttccaattttgtaagtttgaattaaaatataaacagtcgtgcttaattatgggcaagaacttgggttggttttgatcgtgcagtacaacaattatagctttgttataaca

SEQ ID NO: 31588 - DNA, 2442 bp, Arabidopsis thaliana landsberg
ttcgtggggaaaaccagctcatgtctgtaagaatgtcaggaacactggactcctgtaaacaccaagtacttaagctcagtgattttctgttatcatgtcatatgacaaagtatactgcagtcttgcagatcatgttcagggcttggaaaagttctggtctgcgaagaaacatggacacaatttttgcaaactataatcctaaaagttacagtttatcacttattcaagaaatgagaagacatcattaccagaaacaagacggttgcacagtacttgacaacttcaagattcatccggacatcatctaagctcctggtgaatcatatccattgtttagtcccatattgaaacaactgttgaatcgctaaaaggctcagggcatcgtttagatttacctgtgagcttgatctcctaacccgaagtatgtagcaagtgatgccatctacattagttaaaaggagtaaactttagcaactctgatgtgaatctaacaagaaagctacaggcattgaggtttatcattgagaatcgggaaaaagagagaccttcatgtcaccagctctcttcccaaacttctgagacaacaatgaaagcgaatcaattgtagctttcggctctggcggagagagaccaatttctgcaaatgcttctcttattcttacacaatcgaatcgaattatgttatgtcccgcccaaattcgtcctacaaaaacaccaaaatcaacacttttagcttcgtgagaaagaaagcgaggaagagagagaatcccttaccgtgaagaatgtcatagaccttatcggcgatttcagagaatgtatgtgcagagagaactccgtcgcgcgtaatgccgctacgtcgctttgtgagcgtagagattaaggaaagatcagtaggtcgaaccaaagtggagtaactatagagctcctctagcctccttgggcaaactaagatggccccaaactccaaaatcgcgaaaggctcccctgatttggtcggaaccgccgtctcaaggtcgaaaaacgctatctcgcttctctcatcgccgcccagactcgaagccattgttgaaaagtgaaaactgatagagtgaaggagaagctaataggtgggttttaaagcgaatgagcttcacgcgccacgtcctctttttacggaaaaaatctaaactttgagagacgcaactgtagaatgaggtttatcttgcgtcatctgcattcacttggagtgatcaacaaatttgattcctttcttctacattttcacaccaaatcgcttaaatctaaccacactttgaagcaataccttgaatctggggaaccaatcaaagctcttttagatttccggcaccgattcagacaaagtcccagttttgttgacagtttttctgttttgtttgccattaaagcttcgtcagctcagaaagcttcctcatttgatggtagacagatccacgctcttgtaagaaaactaggtttcaatgccgttattcaaattcaaacatctttagtgggattctactcttccgtgggtgatgtcgattatgcacgccaagtgttcgacgaaacgcctgagaaacagaacattgtcttgtggacagcgatgatttcagcttacactgagaatgagaactctgtggaagctattgagctgtttaaacgaatggaagcggaaaagatcgaacttgatgaagtgattgtgactgtggctttatcagcttgtgctgatctcggggcggtgcagatgggagaagagatttattcgcgtagtatcaagagaaaacgaagattggctatggatttaactctgagaaattcacttcttaacatgtacgtgaaatctggggaaactgagaaagctaggaaactctttgatgaaagtatgagaaaagatgtgactacttacacatctatgatcttcgggtatgctttaaacggtcaagctcaagaatctttagaactcttcaagaaaatgaagacgattgatcagagccaagatactgtcattactccaaatgatgtgactttcatcggcgtcttgatggcttgtagtcacagtggcttagtagaagaaggaaaacgacatttcaagagcatgattatggattacaatctgaaacctagagaagctcatttcggatgtatggtggatttgttttgtcggtcaggtcatttgaaagatgctcacgagttcatcaatcagatgccgataaagccaaacacagtgatatggagaacactgctaggcgcttgcagtcttcacgggaatgttgagctcggagaagaagttcagagacggatctttgagttagatcgtgatcatgtcggagattatgttgcgttgtcaaatatctacgcttcaaaaggaatgtgggcccagaaatcaaagatgagggatcgtgagaggaaaagaagaatgcctggtaaaagctggattgaactcgg

SEQ ID NO: 31589 - DNA, 1056 bp, Arabidopsis thaliana landsberg
  unsure (1)..(1056): unsure at all n locations
gtttgattctgtcttctattaaaggacctagcaaagaaggaattgggttagtcatggcgtgccaaaccatccaccattttctatgagcgatatcggtagcaaactcaacgaatatgtcggagttgaagttacagtcgtagtcacggtaacataaccacggcttcatcccaaggtaatgaagaacataaagaacaggaggctctgctccaaaaagctctgttttcttgcgtttcgcgtcatcttcatcgccaatccaaaaatgcttcaagaaattcatatgttttggaatccggtgccaccatgtgaatacctcgtttaagtaaccttgatctccaccgttataagactcaatctcgtttatatgttccatcagaagatgaaacgtacagttgcaaggctcgatcaccataactcctgaattaaacagagttccattgtttcctgtagctgagatctcaggcatcgagaacaagaaatcgatgtttctcaagattaagagatccgcgtcgatgaaaatgattttgtcgtaatcagtcagctgccatagccggaacttgctgtagttccattcgctgtaagcatctttcactgccttagggttccgaatcctttgtatcgtccggatttgccaacccgcggcttctagtccactccggaggtaaccgctnnnnnnnnnnnnnnnnnnnataacaaggtctctcgtcgaaccagactgtcttatgctctgagccgcggcgattgcaccgcagacgtaaacgtgagctgagtgaagaattgttgcgtaagttctcttttagggtttcctaagcttggcctatctgtaaaattcatggaagaaaacagacactagttaacttagcgacgatttttcaaatttgttttcaaatctaaacaagtaatttcgggagtcatttttattctaccttggatgccaagaggaagagatagctcacaagaccctacaggcagctgaagcttgtctctcaaggtatcaagattaggtttgtacaacgaacatcgcatctccgagacacaagatcttttacacggaaaaga

SEQ ID NO: 31590 - DNA, 960 bp, Arabidopsis thaliana landsberg
  unsure (1)..(960): unsure at all n locations
aaccaactaaccaagggatttataattagtcaaagataaatcttaataattagtttcttgttaataaatctgtgtatgcatgattagtatgcattacaaagttatgtggtagatgagatttatcgtattattatattcataaccatgcagaaccttctatcagattttatctatattatgatataatatcttaatgcaatctatgaaagccaagtgtttccctggttcctatttcttttgattattgtatatatcttatcaagtagaaagctctagaaattagattatgatactttttgacccattttcagaacgtttatttcattgtgttatctcttattcagtttgatggaaaaagaagttcaatattttttttttttgtaacttctctgtttgccactatgttaaagtaaacttttatttgataaaaactttttatttctatgcaaaaaataggtttacagagatgtggaaaaagttgtagattaagatggttaaattatttaagaccagatttgaagagaggggcattttctcaagatgaagaaaatctcattattgaacttcatgccgttcttggcaataggtaaagaacttcgtaccgttctttttcatatatgtttgaatatagtgtctatatatatatatatatataattgttgttttgnnnnnnnnnnnnnnnnnnnnnnnnnnnnnnnnnnnnnnnnnnnnnnnnnnnnnaagaaccgacaatgatatcaagaatctttggaattcttgtttgaagaagaaattgaggctgagaggaattgacccggttacacacaagctcttaaccgaaatcgaaaccggtacagatgacaaaacaaaaccggttgagaagagtcaacagacctacctcgctgagactgatggctcctctagtaccactacttgtagtactaaccaaaacaacaacactgatcatctttataccggaaa

SEQ ID NO: 31591 - DNA, 689 bp, Arabidopsis thaliana landsberg
  unsure (1)..(689): unsure at all n locations
gcagaaccgaactgcgagtatcttgcattgaacaggtatccattattcttcaaatggacagatatttctgctttagttttattcagttggcatttttgagaatgattcttgtttgtattactgaactttcttatatgtgtatagaggctacggatgtgccaagagtacatggatcatgaaggtcgttcccagcaatcacttgtgatcgacactccannnnnnnnnnnnnnnnnnnnnnnnccttgtaagtttcgactctccaaagttccctatatgtttctacaaactttcgttctcttatttgtcggttttgggactcagctaacaaaaacgaaattctctatcagctggtgaaatcaaaagaggtggcaactcgcaaagcttaagaatgttgaaggtagttttgatggagaagaggactggaaccaattcagaaatggtataaattgccatttcatttacttagaaattgccttgattcttgatttgatatgtttcttgttgtgaattcttaaagctgttcgcgctacaattcgtgaaacgcctccaccacctgttaggtatagtccagtactcatagtgagttcccttgtcaaatgaccgagaagtactaaactttaatcgctttttgcagaaacccgaaattagagtctccctctaaggggaaccctaaggttagagaacctttt

SEQ ID NO: 31592 - DNA, 719 bp, Arabidopsis thaliana landsberg
aaaggccagaaaaaatcatttttatgctataaaaacattttccatggacttaaaaacaataaaacaaaaacagtgaaaaaagaaaaaagatgcttttcaataaaagtgaagatcgtcatctccaccactaacaaggcccattccgtaacacaaccctatctgttacttcctagcttctcactaatggccaatccaattctccattcataattttgactccactttccaaaacaaacaaaaaaaaataaatactaatataaaaaattctcaaatctaaaatttcagatttcagaaatcgccatggcttcagtgactctaggttcatggattgttgttcaccaccacaatcatcatcatccatcttcaatccttaccaaatccagatccagatcttgtcctataactcttactaaacccatctcctttcgatcaaaacgcaccgtttcatcatcttcttcaatcgtttcttcttccgttgttacaaaagaagacaatctacgccaatctgaaccatcctctttcgatttcatgtcgtacatcatcaccaaagccgaattagtcaacaaagctttagattcagctgttcctctccgtgagccactcaagatccacgaagcgatgcgttactctcttctcgccggtggcttaagagttagtccagttctatgccccgctgcttgtgcactcgttggccgtgaagaatccagcgctatgccagc

SEQ ID NO: 31593 - DNA, 525 bp, Arabidopsis thaliana landsberg
aaaatttgagtcattaatataattcagattcggacccattttttgtctgaacaaagagtaaaaaaattagacaaaaaatttgaatttttgttgttggtcgaagagaaagaagggaagacgaacagagaggattattcattactcttttatcttcttcttctttcccaaaaagttgcatcttttcgagaaaacaaatccgcattaatctcctcaggagaagaagaaaatcttagggttttaaaatttccccaggaaaaaatctgtttttttctttcttcctctcctgttttccctctgacaaactaacctgagaagcagagactctctgtctttgtctcttccattgacctcgtaagtttcgctctccctctttccttttcaattcattttctcttcttcgtttctgggtttgtgtaaagatcaggtttttgttgatttctcgcttaagtcagaatttttgtttgttctaaagtttcaatttttatttcttcttcaaatccattcatgagaaatgtctgaggagcc

SEQ ID NO: 31594 - DNA, 1274 bp, Arabidopsis thaliana landsberg
tacagagaaaattgctcccccaagctgcataatctcttttaaatatgggtctcctttagtttattatacaatccaagcaaaagccgatcaaatcactataggaatgaaaaaaaaaagagaaaaaaaaagaagttaatctaagatgctcgacctctcaacaaagtattaccatattctgagatgttgtggtggtaaaaaagcccagcccgacctgaacccaaaataaacccgcccaccaaaaacccaattttagaaaacccagatgggtttttaatttagtgggtaaagcccgaaaaaacttgattgttccgagactacccgtgggtacccaacttggtttctgtcattttcttggagtttattttaactgctaatatactattatatgtatgttgtatctataatttgcttataaatatattttaaattgtatttattttctgtattacatataaatttgatgggaaaaatgtcaaatccttttcttggcggaaaatgttgaatgtcgttttggcgggaaaatgttgaattgcgtttttgatgggaaaatgttgaatatcgtttttggcgcgaaaatgttgaattgcgttttggcgggaaaattttgaatgtcgtttttggcggaaaaatgttgaatgtcttttttggcgggaaaatgttgattgtcttttttggcgagaaaatgttgaatgtcttttttgtcgggaaaatgttgaatgtcttttttagcgttaaactgttaaatcgcggttttggggaaaaaatgtgaaaaaaaaattgacaacaaaatgttgattcacttgaaaaatgacttaaaaaaaattcgtgggtacctataatccaatgaggtaaacccatatgggttttatttatttgggtacccagcccattttaaacctgtgttttttttccagaaaaagtagatgtatgggcttaaaattttatgtgggttttgggtacccagtgagttttaacccatcattaacatctctacattttgaagacaaattgaatcaccagtctagagaattgttgagtctgcgatacatttccgctacgaatttgagtaaagaagaaaacaaacgctacatagtatggaaaatgcaaactggaattcacatacccttacaatccggcaaatgtgattttagacttaggcgcgtaacgcctcgaggatatttattggttttcagttcttgatcttcttacactatgttctgtcgcacatcttattttttgcgacatcctgaatgaaaaattgtttatactttacc

SEQ ID NO: 31595 - DNA, 3025 bp, Arabidopsis thaliana landsberg
ccttcggattgtgctcccacagtcgcgcatctttgagcccctaagcgtatcgactaaagagcgaattttttcttccaagcagaacgagtttctaataagaggttgggcacaatgaaccctttgcgctaggtgaacgcccgaatgtaggtattattcgattctagctaatgtatcaaatgaatacatgaaaaagggaagaaattaaagttttgatcggtaaaacatatatagaacttagttataaagaaaaagtagtcataaaatgccacttaaaacattatatacgtttgaataatttgtccttttttttttgtcaaaagaataatttgtccttatttcagctaaactaatgagatatataagaactaacgaaattaaagttttttcatgtttgaaattaaagaagtaactaaagtttctcaagttggttcttatatgtttaccgaaacattgtatgagatacgagtttgaataatttgtcttcatttcagctgaactaatgagattcagtgattacattccaccgttcacgggagcatcaccggaacaagctcacatcggaataaactacgcttctggtggaggcggaatacgtgaagaaactagccaacatttggtaagaatgagagagattatttaaagatattttcatttttgtttacagcaacgcctactttgaacattccatcggctatctaattctttgattgcaaatggaaaaccttagacactaaatagacaatatttataataatcgataagttttctggatgttttatggattaaagtgtattctttgtgacaatatagggtgaaagaatcagttttgaaaagcaaataactaatcaccggaagatgattatgacggcgggagttccagaggagaagcttaagaagtgtctatatacaattaatattggaagcaatgattatctcaacaactatttcatgccggctccctacactaccaatgaaaatttcagtttcgatgaatatgctgattttctcattcaaagttatcgctcttatttgaaggtacaactatatatatgcttatgatcttattagaaatgtaatataggaattatagatcttaaattttgattatcatatagagttttactttatgtatatagcttttctcacgccaaattctttaatattttagtgattaagtattattcaagaataattttaaagtattgtattatatttataaacatcttcaaattaattttggatagcatttctaaaatataatcattactcatgccactagctttgcatctcccagaaatcaatcaaagtttctatatactactaacctgtgtctccttcactgtgtatctctccagtaaagttttcttctcttcagtggtaagaacttgatgctcaggaacaagaacatgttctttaatgttcactagcatttccgcctcctgcagcatccaccaccaaatcatggtttagtaggattgtgatgtggatacatcatcatcaagagtcaagacacaaagtgatttgttttacctggaaaacttccagatgaaacttagaagagatctcactaatgcaagttcgagcaaacggggtcaagttctgttgcacaaccaaaatagctctgaacacattctctgatttcatcctgttcgtgtacattttcatcgtcttcacaccaactttcgcctcatcagggaagaatatatagagctacaacaagagcacatgaatcagcgactaaatcaaacacacataaacaatctttctaccatatccacaggttcttagagattaaagagatgacatttatctatacttttgtcaaaatctagctctctgtaacattccatgtctacttactattcacattcaacaactagataaataatgatagtctccagctaaaggacactaaagagaagctgataatcacattgaaggagagacatacaactacaaacctgatcactattatcatttcgcttagccttaagagtaacaagatcctctcttttcatgttatcaccatgtttcctaataaactgttgtttagtcatcgtaagttcagaatccgcgataaaatatccacgatcccttaacatctgcatcaacgtcttctggattctgtacaatcttttgagctcctcttccgtcaacatcttcttcaccaagttatctgcagctttaccaaaaccatatcaaaattagggtttttcaaaaattgacagaaacaattaagagtttatcaatctctttgagaatatatacacagatacgaaaacttacgaatagagacaaatccacagagatgattgaagaagcgatttacagagagaacgacagaggaagaagaagaagaagaagcggcgtttcaagctttctccttttacctcgaacccttttctcaattctattatattgaagcttatattgcatttgaaactcccaatttataccgactttatgttttaaccctcaactttattttcgatatttaaactccaatccttaatagcctgataaaggcccaatgggcttgtacgacccaacatacttaaaccctttagttgatttttctcaacttattacactgttcttgttggaactaaaaccctttgccttctttcttcatctctctaaatccctaattctccaaatttttggggttttacattttcctaatcaagagaacacctgaatctgaaaatgatcactacagtgctacgacgatctctccttgatgcgtcgaagaggaatctctccgcttcgttgacctcaatcaatactgttctgtttcacaacctggccccagccgccactagagtctccgacctagccttaattggatcttccgatgtcaaagctgggtttccgtttggtgttgaagcgtaaggaattcattttcaatctgggccgttggattttagagcttcgatggtttctctagctggatttgcgatctctgagagtagcgagagaagggttggtgattcgtagagtgttggtggcgatgggcttgcgatat

SEQ ID NO: 31596 - DNA, 1379 bp, Arabidopsis thaliana landsberg
  unsure (1)..(1379): unsure at all n locations
acccttgatcaaagtactccaagatcctgaatttctctcaggcatggttctaaaaagtgttgtagccatatgcatatccggggctcgacaatacccattaatcaaaacattccatatcaaaatactctcctttttgattctatcaggactttcttcgaacacttggaaggcatgttttaattgtccggttttggcgtacatatcaaccaatgataacctgacgaaggagtcacagtcaacgaaattcttcaaagtcgcggcatgaagagccctacccaaccatctaaaacctaatttagaattagacttgagtacaaacggaaaagttagccgatcgggtttcacaccaagccttaacatgagaatgaaatgacgaaccgaagactcgaaacgagcattctccgtcaaaccacggatcaaagcatttaaaacaaaaggattcctctcttcagaatttctganaatcgagaggctataatccggggacttgagaagcgaagagcaagatacgagctgagcagcgacgcggctactgaggacgccgcgacggaggatctgggcgtgaacatggcggagacttgcggtgtctttacaggcgtgaatcagagatatgaagtgagactcgtccggtgaggcttgacgatcggccggaaaatagattttagcgggagaagatttcggtttaaaaataacagaaagcgatttcatcgtacctcagtctaaacgctcaccagtcatcagatctcgcggtgcaaaaagactcttatatattgggctaggggcaacttatcttagccggattcaaccgtattgctctaaatataccaaaccggttaattggcgaaccggttcagacgaaagcagtatggaaatgtcattttttttaccttaaaagttacaatgcaaacaacaagacggattaaacagtaatggaagcttttagttctgctctccaaattttccacttatttaagcaaaacaaaaagaatgtcactagccagtattattcatagagatatccgaatttttttttagtttcataagaagaggcatggatttaaagaactccaaagaaagggttgttgatggcggagttgagttctgttccagctgagtttatgatggctgaatcgatcttgtctctaggtaagaacaagaactctcctccttcaattttctcaaatccacatagctccatgaactctatgccccctcttagcgaaccaaccctttcctgtttacattttcatcccaaaaaccatgacaagtaagaacttggacccatcatcatcatcatcatcatcagtgtagaatccttcaagtagatctagatgcgtatttttatgcccgattgtttacctgaaatngttggttggtga

SEQ ID NO: 31597 - DNA, 1535 bp, Arabidopsis thaliana landsberg
gtaatgttgttctaacgtgagagtgttttatagatgcaaaactttttggggaagctttttcgaacaaacatgagaaatcaactttaatgtatttgaattgtaatcatttcttttaattttggtaacggatagcttgcatgatgatcctaacgatgatgttgtgaatgtgaatgcaaaagtagttgttaacgttggtgcccctgctgaattggtcttgcacgctgctgcccatgcaaggattccaattccacaatggggacttctatgaatgcagcttatgaagtggcattagctcattagctcagctccatgtgtccaaacgcaagccacaacctgtctatgagattatgaagcttcaattccctggtttgaccattgagcaggttaaaaaccctggctaagcgaattgctaaagcagaaaaggcggctcagagatgattaatcagatgaatggatgtatctctgggagttctttcttttgtcttcccattgacactctactagtaaacactgatatgtaattagctaacaactctagggttaagttatatccggagaaagttacatattatcacataacttctcttttgtgtttgctgttttggctatgatatcgataactatgtttagagaattattaattacactgtttttgacgaggacaaaatattaatagaatcaacatctgaagctcgagccttatataatttttttttttgatgtattgctaggtgaattccctctagcattatgatgaagattctcctactaactaactatgatataattatgtagtataatatatatttgcagtcacatccattcaacatttttcgaaaacaaatataatgtgaatattcaaaagatttgtacttgtttataatttagacagtgtcttcttaaatacataaatatacaaggattttaacgaccaaaatttaaagaaaattatgagaagtgcatatgaaaatcattttcatggaatacggtggttgaaccaaatacactttagtagacaggtggggttttcttgtgaatgaattttctttctcaaatagacttttcttagaaaacaaacgcagaacaaagggtccccaagaagtttgtatatcgttgaaaacaaaattcaactatcataaaaatatattttagaaacaattgataagatataatatgttatatacttatatatatatagtgtatcatgcatgcacaaaacacccaacgactaatctactcaaatatggaaaactagttggtcagattctaacagaaattaaatggttttaattatactttggaagattagttggaatgaaaaattcaaatggttataaataaaaaacatagtttgcttaagaaaaataaaagtagatgatagctgaggaacttaatggcactttctcttctgttacgtgaagtgggaaaattatctgtcgacgcatctgttgtctgcaataaagtcagttggaggtttgtactgccaaattgcaattacaccatcatgagaaaggaccgacccgtaaagaggatac

SEQ ID NO: 31598 - DNA, 1552 bp, Arabidopsis thaliana landsberg
catttccattcagttccatcttctttggtgattttcattggcttcacgccccaataactaactattaattgttcctctttgttaccttgatcattaaccttgacgccgtcaccggatccttcctcttcttccgatgttttcttcttttcaaatgtcatcttgctgaaatctctcaggcctcccactgccggaaccctaaaatatttcgctggagcaagttggtgacatagaattccattaatggatgtcgcttgctttgatgcgtcaaggagagagcgacggagtaatgtagtgatcatttttcggattcaagggagatttgttttggtttttgttgataaggaaaacgtaaaaccctaaagtttggggaatcaggggtttaaagaggagaagaagaagacaaaatagttctttaacaagaacagtgtggacgatgtcaaaacattaactgaagatatgtgtccaactagctcattaggccttcaatatagcccatgcgcataaggcccattgggtctttccactattgagaagaaaactttactcgagagatacacagtgaaagggtttgttttttgtagacagaaacattgttcttggtgataatttgtttagttttgtgggttttgttagcttccaaggatcctatcggatcgggaagtcgtgaagatcatttgtccgagtgaaactgttggtcgttatgttaccttggagataacttgggaagcaaatcaaccataagagtatgtaaaaaatgattatgacttgagaacacacacaaaataaaaaccaaactcagaaactctttttatatctttttacattaacggcgttgtataaacaccaactcgaaatctgaaggaggcacaaagtactctataccaatattgttctgacatttcaacaccggtgggcgtttccttggagccgccggacactccggagtctttgctcctctcgccgtgggagtgatacaaattccatcttctgattctctctcaggcttaatgagtttcgtcttcaccggctttagtgaagcccgaatcgatgttttggcgaatataaacttttttccatcggtgtctaattctctgctaacttgagattttttcgaaattcccatttaaacagttggagattgagactagtacaatgttttgaagatgaggaaacatgataaaaataacagattttttttaattggaggaagaaggaagaagggataagtgtaaagtaggcggaagagtttcttcttcttaaaggaaagagttttgccttttcaatttggttgcttccccaggaattaaaagagaatgaagctttcagaggaagattattaggtgcaagtagaggaaagggtacaattggaaatgataataatgttcagcccgggaaagctacgggtagtcaataatctttctttttaatatttggcgccatggttttgagactattttaataacagtggttcctaattttttattttttttggttaatcagtgttcggttttaaaaatacctccgaaattaaattacctgaaaaagtatttgg

SEQ ID NO: 31599 - DNA, 1236 bp, Arabidopsis thaliana landsberg
gtgaactatatctatggattgaaatgcaatacagttcaacagttttcaagaaagaaaacgaaccctgggaataaatacatgttgttagcctgattcacatgtcctactttaccattctctgcgagtgggacaagaaaatgtgattatttttagattatagcaaattagatacaaagaccatcaatgaatcccaccataacataccaagttcaacgttctcaaatggacttccacttgcaaagacaatgtttcctccggcgtgtttgaaagcatcagcagcagtgcactcggctgtcacacgaaaagatgttcagggcagatttttcaaagatggaacaacattactttgctaagctaaaaacacacaaaccattcaaagtgggattcgacatggcaaaaatggcaggcttgcatgagtcagattctcgcatcgccttgagaacctttgatgattgaaaccagttaacgatataagtaaaacagttaaaattcatatttcttgaaactatttgttgtctaagaaagtcacatacttcttcattaaagataccaccaactccagataaaccaagaagaacatgtggcctcactttcttcacctgaagacatattatatttagacagaaatattatcatatgattatgtctaacttttggggacagtaaaaaaatatggttatcctgtgttgctttaggatgtagtagagaaagcacattaagtcaagttttaatattggccaaggcaagtaagaacgcaataataaggtttaggcttaccacttcacggatacttgctccctcgcgtatctcagctggatttttggcaaaaagtacagctcctgggtcaagttttgtcctctccgtggtgacaagaccctgaagtacaaatcaagtcgttttcattaaatattcgaaggagcacgatcttatgaggcaaacagatgagaaaacaatatgttgaccaatgcaagaacagaaaggcttttggataactttaaaaacgttttctgactttttctaggtaagctcttactggattgattaaaccaacatccaaaagcaagcactaaacattacaataatatgacagtttcaaagtcaactgccccgtggaactacgcaagcttaattgttattatcaagcaagacaaaccgattcagctgaagtcaagtagtgaaaaaacaaaaacttacatctttacctatcaggtaaaagttttttgttacaacacaatc

SEQ ID NO: 31600 - DNA, 2421 bp, Arabidopsis thaliana landsberg
aaaatttgcccattttttttgcccaagaaggtttttaaccaagtggtttaaataaaggatccattatttacgaaaaaaagtgtatctttctttacaaaggtatgtgtatatactgatggaatttgagatatatctctaaatttgaactttaagcaggctttttaaataattgtaaaaataaccgttatgtttcataaatcataattggcacgctctgagtttctcaagaggaacatgaaccttaagaatgttcatcctcaagcatttttaaagccaattcagctaaccaatgaaccgttctgctctgtcggctcactccaaccgtgccagagaaaacatcaaagttctcaagctcagccgtagtttccagaaccttcacgagctctttctccatacccaaatccctgaacatcccaacgttctccacatcatcttccatcatccatatcgcaagctcgatcacaaacctcctgattcttggaaccttgattgctggcttgtcatgctttttcagaatcgaaaccagtgagtttgcaagttcttgctttttgatccctgaatccgtcagaacaatgtttgcttcttctgaactcatgaatttgaacacttgtgctgccaatcctagcatcacttccagcaatttattgtcacctgatgttattgacttcagtacctgcaagaaaacagaacaagttttaatcttttgggggttcaacgcagtatttgtaccgacagacagacatactcacagtaggcgctgctgttttaatgaacctcaggtcgagaaagcattcatgtccagaatatatgcacaagtttctcaacactctcgctgcattgacacggatcaaaggaacttcaagtgcctccacaagtcttccaaagactccgagctttagaatttggatgcagttgcttctgctctccaaagcaagcatccctatagcttcacctgcagccatcctgacccgcttttcattctcatccccatgtattttactttttaggaaaatgctgaacagctctttcaagacacctccagtaacggcaattctctcccgcccatcagtctcaagcgcgaggaagctaagaatctcaatcccgagcttctgcaatttcgggtatctcactccatgccgcaatacgtctctcaagttgctgattgtgaagacgatttctgagatctccctcctgagacatttcccggtgttgccacttgtgcttactaacattttcactagctgcagcgaccgtttcactgtaaggactcgtgacagaaccatatctgcgttctcatccttcaagagtgttgcgtctgtgtgcgtgaagtcaatgatcttagggagaagccctctcgggttaccaattttcccacagttgtcatgatctctggataatttctttagaatcaagaggcctaaattgttgaacctccagaaatcgtagtgtagatgatggtcgtggaagagtttcttctctccaatctcgtcaggagcttcacctaaagatcttgtgttctgtaacagtgatgaaattgattccatcgcaccagagattccagcaactctgagagagttctgctttttgccagcgagttttgagagtatctcagccgctgatctcctaatctcttcttcttgcagatctttccagttcaacatctccaccaacctagacaaaaagaatgagatcagctttgtttctgtttccacgaactgcaatctcaatatgattaagctctctacaaaatttggcatcttaacattgtaaagaacaaacctttcaatgacaggtaagttgataccgatcttctcaagtgtatcctctgcgaaccgctcatttacagcaaactgcctaagaatcctcgctccgatgagctgttcatcagagcagttcgagcccaagagatccatagcaaagctaaccatatccatcttcacaccatcaaagatactcccattgacagacttggagtaagcatcatagaagaatctcttgatagagaccattccagtaaccccaaacccacactctctagtcacattctcaagcaagtgacacacactgacctcccactcccagtaagctttctccgcaagaaacaacaacgcttcggcaagagcaagcgagtagaagatgctgagagcggcttgtctattccttttgtccaagtctccgtcttgaacatctccgtagttgtgcattacgagcttgtaggaagacagagccacacaagcactcgctgacaaaagctggagccagtagagaatccgactcacatagctggagatgtaaagccatctcgcatatggaagaagaggaacttctgagttcttccatgtcagagttgttcgacgatcaaagatctcttgtcgtccgattctcgtcgtcgcttctctcaatccattgtcgaggatcggc

SEQ ID NO: 31601 - DNA, 604 bp, Arabidopsis thaliana landsberg
tgcatctctagtaacgtcgatccctttgtatataaatttagtatttggaggtgttttcaaattgcctctattaactttaagatgggtctttagttacttatttcaagatttccacatatatccgtcttcttccatcatatttttttacacaaaatcgtatgtatgactattgttacataagcctctctccgttttctcctctaatagtcgtcttcgtcatcttcatcatttcttgatcggaaaaagtttctagcgacagctgaagcggctccaaaaaacatgaagagaagtaggaggtcaaagccaccgccaacacctactgccaccgcaggaccaggggcaaaaaaggaaaacggtgaccatccgtaacctccgtaaccatatccatagccaccgatcaaaggtggtgcaacctgaggattcacgtagatgttggtcctgcgaaaacaaagctgcgtttagaatgcaaaggtactaactactaagactaaagtcgtgattatataatgcaaacagaaaagcctaatgcattgaatcaagttattagtgttggtcgatggggtatcttggattcgaattgtaattatggggttcaaaatataat

SEQ ID NO: 31602 - DNA, 2702 bp, Arabidopsis thaliana landsberg
  unsure (1)..(2702): unsure at all n locations
tctctcaggagtgcaaggcatcgtggcttgaatctctagagccacagcgtggccagcgaaagcgaatgagatctgacctaacgcattaaagactcggaatgtgaagtcacccggattcgtcgccttgtaatcatagctcacgtcaggcacctttccatgtgcgatacttcctccccaagctatcgtcgagtagctacagtatataaataacaattttcacaaagtctcatcagtcttgacctagttagctagttaattattgttttttcaaagatcagcgttaagttcttgactgaaaattctagaagtattctactatgcatgattttggctcgtataaaattggtatacatagttggttaacaacgacatttttgtaacaagttcatgtaaattttacgtttactttcttctagaaacattgtgtacataaatgacaaaatcctatcgtttcattacttttactaacttagatatttggttgatatataaaagcataaattctgaattaattgttatataaaatagaaatttgtaaacgtctaagtttgcgctaagaaatttttttttggatgagaataggatcctatactcgatgacaaggctaatccaacttacgtagatcttcaattgattttaaaatataataaagataaattagttctaggccaatgattataccagtttaagcatttttgtgtatgttataccagtttctcttactatagttcatgtaatttatgtcatgtttttccaaaaactgaaaatacgatctcttaacaaattttaagttgattcaacacggtaaaataatattgtggtgataaggtggtgagagtgaccagagagacatgacggcggcagccagggagactccggcaacggagttgaagttagggagctgggagagaatgaaatggactccaccgaagccgnnnnnnnnnnnnnnnnnnnntaccggtgtacaggtggaacaagtgatctccacgaactgcttcaagcacttgcctcctgtcaccatgtaaacgatgttgcagccgacctggacgattagctgttgagggaggacgatccatgggccaagttttgggccaaaagcataccggcctagatcgatataccggtcaaaccgggttcccggtacacactcatggagctgcaccatttgccacatagtgtttagggtcagtccccacgtcattgccaacacaaaggtccctggtcccctgttttcaccacacatcacatcattttttatttttcaaaccaaaaaaacgatttttttcctttttctttttgcatgttctgtgaatcttttgaaatatgagtttaattacagctagttataaatcatctgcatagatttgacttttcatttacttgcatgttttaattttacacacatataggccataaaatttgtaaatatgattgacgaaagagtatccgtaccagccaaggtaagccatggcataaggaaggctgaggactcccgcgccaatcatggcggtgacggtgtggaaggtggagtaccaccacttggctggccgtgatggatcttccgccgtccatttctcgccggacttccggtcagtttcctgcaagcacatgctactactaagaaaagaaaaaaaatgaaaaggtgaatgatatatggagaaataccttagacggagaaaccggagaactagagaccattgcgtgtcttttttgcaagtgtagtgagacaatctcagttccctaaaaatgtggacaactaggcgcttttaagggtgttttgagttttatttttttgctataataataaagtttatgtaattttctttaagatcttaaattaatgtcacttgttgggctcttctttttttccttgtttattttatgtgggatattcatgtaaaggaactttaaattttccgcactgtgatcatttaaaagtagagaagttgatcaaagtttcgatacgtgtaaaactgtccaatccaagaaatgtataagcataaaaatgttaccaatatatatactctcacaatttgaagcaatatccaacgtgagaagtgagatcactaatagttcatctccatagtccatctatttctcttcgatattttttgttttctatagtctctgtcatataacccacgattgtttcattccgtttacgtttgagtcttcaaaaaaaaaacaagggtacacgcaaaataataataaaccaatccatcataatctcactattttagacactccaagtaattggactcttcgaagaccaatttgtgacatttatgatttatcattgagatatgtgatatacctaccatttttcatataacctttgagaaaataaaagagtgtctagcccacaccaacccacccacccacaaagagttaaagtgtccctatttagacaatcccaattccctaaattaaaaaagtgggaaattttaaaaatcaacttttcagtttttatatataatcaaatttgcatctttgcttttaaagatcccacttaatggtgcattactctcaagtctaagcttaggaggattaaaaaaattagagaaaaagttcagtgctggcattttctttgatttctatcggtctctcatcttttaagaaaagggactttggttatcttgttctcatgatgattcgatggagaaaatctacgggtgcgatgaatcgtatcatggcttgaaatt

SEQ ID NO: 31603 - DNA, 3985 bp, Arabidopsis thaliana landsberg
gggcttcagtctttagaatagcattttgagtacaagaagctttttgctggttagttgaacatcctgagaaagttgtttgcatatgccataggcttcacatccggatgaggctgggaaataacaatatcagaaaattagaagagtgtttgaatgagtctaaatcaaaccgtgaactatcttctgtgaaacattcataagaacaatgctatgtaagaggactacactcaccactgctgagaatgtaacaatgtttggcttcatatcaggagcttcaaaacgaatgaaggctcccttattacccatctacaacaataccagtccatgttaagtaaagaatcaagtaactgggtgctgttttgaaataagaagacaggagtgtctgagttacctgatcacagtaatttggcgcagagaagacagttatgagtttaccgtcatgttcaacctcataaccttcatcttttacttcatgtgaccggaccaacaaatctgccacaatcatgaaaatgcaagttaatagctatctcaagtaaatattagtttgcgaaaccaaaccccgataataacaagacagtgaactaacctaaattgttatcttgcaaaaacctctttgtcacatctccaccaaatgatagaccaactcctcgcttgcttgggcctcttccagggagaggttgaggatcactccacaatagttcacacattagtcctgcataaaccattagcaagataagatgattaaacagaacacaattacatgagaagtaatcttacagaagatgtatatgatgaaacataccttcctctggtggctcacagaatctgtcaatggctctgatgtctgagagtttcacgccgtcaacactgaaaagacctccatgtaccacgaagaccttcccatttataacatgagccaacgggaggtaacagaaaacttcagcaaagaggatcccgaatttttcactcaacttggaccgaaccttacccttaaaaccataaattttgttcatgctcttgctttcatggtttcctctggctagatatatggctgcagtacaaaggtgtgtaaatggcgatttacaattaaaatggaaacttttaaccccatcagacaatagtaaataatttaatccttgccagtgatagcaaaagcaattaaaacatgaacatcaaagaattattacaacaaagttttagagaacttacatgatgggcacatgcacttgaaagcaaacaaagtgaggatgatctcaacggagaatgagcctctgtccacaaagtcgccattaaataggtatgggttctcctccgaagggaggccattaagctcaaagatattgagaagatcgtagaactgcaaaagcaaacaatgtgtcaaacatacacccaatacaacacaatacagcccttaatagtgcaagagggagtagaaggttagccaataaattcaagatatgaaaagtagaatgattcataataaaatccaattccagaaatatagtatgggaaccggtttattgaaaacttctacatatataaacaagagaacaggagatggtggatcctcgcagattcatttgagacattaaaatattatgttcggagagtaggtgaaaccaaagcatacctgaccatgaacgtcaccgcaaacagtgatatgtttgccatgtggaacacttatatcaacaagagaaggcagtgctagcaagatttgcctagtctgtaagacgatttgataggcatacctacaaataaagtgcccgcaaagcatgaacatatggtaactgtgtaaattaagttgagtacccccaaaacaatacataccgtttatgcaatgttttttggttcttaaaatcctccatcatcgttttcacaaaatctaaggtaacttcctctccctcaattctagcaccagaatattgtggctcaacctctacaataaaattgaaaagaataagtaaattgacaaaaggttaagaactctgtaacagtgaacaccatttatcaatgaatattaaaagctacaagtcatggatacacattttttacaatgtagtaaaagaggtatgctatcataacaaaacaaaaatagagatattagtaaatctatgaaatgttccactcctgttgagatgtttttgacatcaatatcattgagctttgtcaattctcaactgagactccaagaaaggaaactatccaggttttgatatgcatgaaaacaatccacattgatcctaggatgagggtttaaccagagaaaagacactactaccactgaagctaccccaccaaaatgtccctaataccaccgaaaccaacaccatgagtatctcagttgtggcaaatccccggaccgccaccaccattactgctgcaacaactgctgctaaagccgttttggtgggcatggatgatgatctgggtttgttccctattatgtgacaataggtagaagaatgattactagtctaaagctacattcaaccatttttcaactactgaatcaaaggcatggcataacaagagacgaaagaaccaggtgacacaacaaactgcaagctataagacaaccaaaaaataagcaaacagatgaaggatacctattgtatggaagtcaatggactcagctactgaacggcctttcagatactggcacagagattgcttcttcaaatttgagtttcatcactgctttctcacattcctttagctttcttgtggcatcagggtcattaggagaaagcctttttacctaaaatatatatagaagaccaagtcagcaataccatacacgctagtcttgcttaaaagatcaagacagtcgaccaccaaaccagattttgacagataactatcactctatcaagtttccaggatctaatcacttgatcagaccaaaacaatcaagttatgaccatttgggtgggttcaagctatacaagcctacaacatttcatctatagtattttgacatttctcaactgagctgatcctcactcaaaaagtttagagtaaactagaaagaggactatcagatcagcagctaacaaatataaacgaaagagacaacaacttaaatggcacaatgctcgtgcaagaaacactaacctgttggaagtccttcaaggcatccttaaattttcccatggcaagatacgcagcaccacgcctgtaatagccctgtgattcagtagataatcagtgaatatggctgaatacacgaagaaacaggaacatcttgtcacaggatgataccttagagtatcttgaatcaacttcaatggccttcgatgcatcctgtattgcactgccatattcctccagttttgtgtgagcaaatgcacgatttgcccaatacacagcgttgttgctgttgagttcaatagcttttgtatatagatcaatagcactggagtatttgtgacctgtaagcaacaaacaacattaagcaaaaagataggagtacctcactaaaagagttgaaataaactgatgccacaagattatgtaaaggtttatgataaattacacacctttaaaagcttcgttggcctgacttttaaactcctctgcccgtgaaacatcagaattctcattcttggtctccatgttgtcaggatgaacttatctcttactgaattccttattatccggtgaagccacaactgattgacagaaaatatgtaaagttaaggttttatctcagtcatgcccaaatgcacgatagcaataatcataatcacttggccaattcctcatcaataagttttctacttaacagggagctagtttaagagctttagacattgaaattatactcaacctaaataaagtatagatttttcgtaatacagccactgactttagtcatgcaacgagatacataggaggaagagaagtcattcacacagaaaaaacattcctacacattaattgaacttgaaaaacgcccattactaaatccagcttagaacacgaaaca

SEQ ID NO: 31604 - DNA, 2139 bp, Arabidopsis thaliana landsberg
tgtgggaatgtatagaaatattaaagaaattcctattttcatatagagtaggggaacgaaaagaaattcgaagaatataaatttagcgggccactatatgttatataaataaatttcaagtatatcttatgaaccaaaacataaataaattttcgatttatttagtgtaaatctgcacatgcaggttacaaagttaggagtttatttattaagaaacactcaaattttccacatggccagatggcctagtcacatattagaagtcaacgaaactgtgaatatatcgaaaatgtattctgacttttaactttcaatttataaacattaatatatgaaacttttaacaaaactaaataacgaataaaatcacatgggtccatatgctttcttccgtaccaatcaacactctcacatggattcccaagttaatgtacatcacttttggaagtatgatttatgaacatgatagttagtgtgtacgaaaatgtgcatagtttactattcttataagcatttaaaactaatggtagagtaactaactaatttgtaggttttacgcaaaacatgcgacaagggcaaagattgtcggaaagctaacagaaatttaggtgagctaggagagacgagcggtggatcgatcctcgtaagggaagcagtgaccgtcggtccatatgaaaccgataacttccccaccataactgaggccgttgctgccgcacctaatcacacattcccggagcaaggctacttcgtaatctatgcaagggcaggtctttacgaagaatatgttgtcatttcaaataaaaaaagaaacataatgcttattggggacggaatcaataaaactatcatttctggaaaccacagttttattgatggttggacaacttataattcttcgacctttggtacgtatcttttttgttcttacattttccttgcatctgaaataagtcctagatatcttcatagagactagaaaataagaataaattttgatggcgtttgtagcggtggtgggagaccgatttgttgcggttgatgtgacattccgaaacacagctggaccagagaagcaccaggctgtggccgtaagaaacaatgcggatggatcgacattttatcgatgtagttttgaaggctatcaagatactctttacgttcattctttgagacagttctatcgtgaatgtgatatatatggtaggatatatcattttatcttcaactataaactaaaacaacaagtcaaagcaagtatatatattttgaggttaaaatataatcttgtttgttataggtaccgtcgattttatattcggaaatgcagccgcaatttttcaaaactgcaacatatatgctcgaaaaccgatggccaagcaaaagaacgcaataacagcgcatggaagactcgatccaaaccagaataccggaatctctatcatcaattgtacaataaaagccgccccagatcttgcagctgagcctaaatctgccatgacattcttagggagaccgtggaagccatactcaaggacggttttcatgcaatcatacattagtgacattgttcaaccagtcggatggctcgaatggaacggtacaattggactagacacaatctactacggtgagtatagtaactttggaccaggtgctaacacgaaccagagagtgcagtggttagggtacaatttattgaacttggcagaagccatgaacttcacggtctacaacttcaccatgggagatacatggttgcctcaaaccgatattcctttctatggtggtttgcttagcaaagaatgaaattgatgaacaacatattatatgtaaacatatttaattatacgtacttcctcatttaaaaaataaatcaagaaattttcatttgttctagttgttgggacgagtcaatgggagtggttctcatgtaaatctagacatgcttctaactttatttattgcttcagataaccaataaagctaagttttgatgccatgaaatttgattatatagctataatatatctggactataccacaactacgagtatgtcatttgaatcatatcaaacaaacatagatacataagaagtagagttacactgaaaactctcacataatgaaaaaatatat

SEQ ID NO: 31605 - DNA, 3212 bp, Arabidopsis thaliana landsberg
ttctctgacattttctttaatttttctttattgttgctaaaccaatccgccacgattttcccagtttctttgggacttcgggtgaaaactccagccccattgtccacaacatacggcacgttgcctttttcctttgggagtcacatacaatagagttagtttatgtggccgattaatccctaaggtgaagcaaaaaaatgtatacctgtccaggaatatagtcattgaggataattgggaggccgcaaatcaatgcttccgcaatcgtacccggaccagcctgttttatgtcataaaatcttagtgctatttatatgaatgggtaggattcaaagatatgacttaccttagtgatgatgcagtcacaagctcccatccatttctccatatgagtctcaaatcctcgaacctataaagtcaatatccatgaaacatgaatgttatgaacctctaataatggaaaagggtttgtttaaatcatgtataccttaacaggaattttccaggcaacggcttctaatgcagatgccaatttgttggtacgttcacagataacaaccgtttgcccaataggcttactgttctctttatcatacaaaaattcctcaagagcttcagctggttatttcacaggacccataccttcccctcctcccatcagtagaaccgcacgaagatcttgatccatctcaagctcctttcttagatcatccttcaccaaaaccgctcgtgcaaaagatggcctcacaggtaaaccaaagacacggacttgagactcatcaagcccatcaaacaacgcccttttcgccacttcttgagacgggcaatagcacctattcacccccggatgaaacctaaaccacagaagattaaaaaaatcaaactttgcagctaccttcttctctcaaagtctaaaccaagctaataaaatataccaagtaggatgacaagtgttgagatcagtaatgacagtaacaaaaaggactctcttttgtagctcttgccatttaagaacccacaatggaatatgttgcattaaaggatgaacactaatgattatctccggcttatactccattaaaccagcctctacttccttagcgtaataagcagcaatggctgctagataacaagagtggatccatttgggtgatgtgctgtgaaaagcaactttccatagctgaacatgcttcaccatgaacttatatgatctctccatatcattcaatggccaccctgtgtattccttccacacatccttcacaattacctgtcaaaaccattcaattctcaatcaaaaaccaatccttttagggtgagaataaactacaatttctcagcattgttctttttactctatatttgtctccgaattcgatcttgaaagcgtcacgaatggcttcagcggaacagcggtgaccgccaccagtatcgctcatgaggatcaagacgttcttagtcctctcagcaccgatctggataagctccaatgatgattcatcctcgtcgctgtaataaacatcatcgtcgatgtcgtcgtagcttttgatacggtgaatgtgatgatgggtatgacggtgagtcttttcgccgtcgccgcttgttacggaaacggcggatttggaagttccgtaaactctttcgagtactttctctgcaagggccatgaccgtcgtcgccatttataaaggacgagtctttgagatgattaggtgaaacaaaacggagactttcccggaaaaatcaccttccctcggcgattcgacaccggagaaggagaaatttccgaggaaagagacagagaaagaaagggtgtttgggtgaacgattgatgttgtaagagagaatcatggaagaaaaacagagaagactggttgtccaatgatgacagccgtaagaatcgtgacttatttttggaatgttcgatttgaaaagattcgaatattcaaggtcctcgaaaagtaatataaacctagaattattaacaaaagaatattcagtagtatataacaactatgcaaaaataatttgacttatctgttttagtgttgagctctgtttttgggttaacctctgtttttagtgttagaactgaatatggaaatcaactttagacttatatttctggtctcagaattgcaacacaatgcagcctcacattccaacaaacaaggaaacagttttattcttataaaggatctcaagtaacgaaagaaacagattcatttgtgaaaccaataaatgagacttgaaaagtgtgatcagatcaatgcagcttcaataggtcttcggccttgttgatagtacttgaagtagagctccacatacttcttaactgttttatataatcttggtcttgcctcagacacaagctcattcacaggctgaatctctttatctgcacctggaatgcaaaaagttgccacagatattctttccttttctctgttagtcaccactctatgaaccgggctcttgtatatcccattgctcattatctgaaaacacacgagaaatagagatttatttatgtcaaatctacatcaattaatctttcaaaatcatattcatatatgtaggtgactgattacctccatttgatcaccaacattgatcaaaattgtatcagggactataggagctttataccacttcccatctttctggaactgaagccctccgacatctttgtcgggtaagagaagagtgatagccgagccatcagcgtgcggtttaacaccaataaccttgtccgggctcggacatggtggatacatgttgaatctagtatccaacgtagcactttctccatacatgtctagaaaactattctcttctaattccaaagatctagccatggccttaaaaaattgctcaatcactatccgttgcttcattgtgtattcatgtaaagtttccctaaacaaacaatatgtcaaaatcaccaaactcaatgaacaaagatgctgtttaaactgaaaaggtataataaactttacctgaatccaagtgggacttcaggccagaaattaagttgtctttgatcttcagggtaagtagttatatacaaacggtcgatccaatcaagaacttgatcattccaaagaatcatgtcgttaccatatccttggatactattaatctctctcgggcacttctgtttttctttggtcggaagcgcaaagaactccttggttagcttgtaaatcttg

SEQ ID NO: 31606 - DNA, 5309 bp, Arabidopsis thaliana landsberg
gtgcacaatggtcgaataatagggctactactacttctatctatagatagtttatcatattttaccattttagtttaggcctgaaaattaatttagaatatgaagttacagtctctttgagaaatatctgtatagtatttcctatgtgttctatctaacttaaactcatacccgttcaggttatgttccttccgcattaacacatgatgatgataattgatgtttgtgatcacctttgggaaccattaggatcaagattcatcaaaagttggaaaagtaaaataatcctaaccagataaattttggattgaatttttcaaatcaaatcagaatacattgattctgtatatcttattgaaaaatccatcaatttacatcaacaattttatatctaataattaatttaaagagaaaatttataaaagtttattagagcaaataactcaaactcggattttatagtcgttatgacccggtttgactattgaaccgtttaaccgagaaattgggactcaattaagacaaccgaaactagacccggatccagtgttagcgggctagattaaggtgtcgggtcatagcggagaagcaaccagacgccaacaatgaaagcgatccagttgctgtgggaagcgataatggaggcgacgaagagagaaagacggagagaagatgacgacggcgaaaaagcttcaccggaatcactcgttcttccaccagagatcattacagaaattcttctccgattaccagccaaatcgatcgggcgattcaggtgcgtatcaaagctcttttgcactttatcgtcggatccagggttcgcgaagattcacctcgatctgatccttcgaaacgaatccgtaagatcgctccaccgtaagctcattgtgtcttcacataatctgtactcgttagatttcaattcgatcggtgacggaattagggatttagcggctgtggaacacaattatcctcttaaagacgatccaagcattttctctgagatgattaggaattacgtgggggaccatctgtacgatgatcgtcgcgtgatgcttaagctgaatgcgaaatcgtatcgaagaaactgggttgagatcgttggatcttccaatggtttagtgtgtatctctcctggtgaaggagctgttttcttgtataatccaactaccggagattccaagagattacctgaaaattttcgtcccaaatctgtagaatacgaaagagataatttccaaacttatggatttggtttcgatggtctcactgatgattacaaattggtgaagcttgttgctaccagtgaagatattctcgatgctagtgtctattccttgaaggctgactcatggagacggatctgcaatttgaattatgagcacaacgatggctcctacacgtccggtgtgcatttcaacggtgcgattcactgggtgttcacagagagtaggcacaaccaaagagtggttgtagcatttgatattcaaaccgaggagtttcgagagatgccagtgcctgatgaagctgaagattgttcccataggtttagcaactttgtggtcggaagtctcaatggacgtctctgtgtggtcaatagttgctacgatgtgcatgatgatatatgggtgatgagtgagtacggtgaagctaaatcctggagcagaattcgaatcaacttgttgtataggtcgatgaaaccgctctgttcgactaagaacgatgaagaggttcttctggagcttgatggagacctggtgttgtacaactttgaaaccaatgcatcgagtaatctaggaatttgtggggttaagctcagtgacgggttcgaggcaaatacatacgtagagagcctcatatcacccaactcttatggtatagagagctgaggaagtctgctttttgctaagatataataaaccaacattcggattaaaaatgttttaaaaacataatcatgtaatatgtatcatgtaattaacaacgaatggtcaatgggtattttaagtttctttctccttaattctctcttcccgctctaacttttcgtcacttcctttttgtttgttaaagattacatcaaattattcataataatgatacctgaggaactgcaagtatttgtctgtaaagaaaaagttaaatacgagtgtagagaagaaggagaacttgataacgattttacatgacatcctaagtttctactagattcatatgaacttccaaaatgtcctgaatcttccaaaaattctaacttggtaggttcttcactttcttaagatatttaggaaacaaacatgaaaataacagagaacatacatgtcggtcactaaacccaccgatttatcaatggatacaaccggcctcaccacatcgacgacctccaccaccgccttttctgatgactttaagttaacaaaagggttaggatttacatcggcggccacagattccatcttcactgatgaggtaaggcttcatcttcttctgatttctcaatctgtaacagaagaaagtgaactcttgaagaaaataaagaaatcaattgatgcttttctggtttcacagcaaactcattcttgaatttctgatatagataagaatatgtcagatttctttgctagaaaatattctactttcccagacaaaggagatagtcttacaaaggagatagtctctagtctataccaaatgacgttgtttcacttcaattcataataccatctctgttacaagaaactggatcaatcatttttacgacatgaagcaccagcgtcattaaaagctaaaccataaactgaatctaatggcaaaatgatccaagagctcagacataaatgaaacaatgttattcataaggaggcagaacagagggagagtctgccgccgatgaggcaaccaacacagcccaaatgagaatctatgaaggacaagaacagaaaacaacctcgctaccaaacagattttgaagatttagacatcttagattataaactcgagaaacaaagagaatcaggacaactgaccttacttggttttctcatctctgccaacacagtttcttcccaccctctcgcatgatctcatatgcaagcttatacttctccagagacgatgtcccaaactctatatactttgaagctgcttcccttaggctccagatcatcaaggccttaaggtcctgagaagtcacccctgattctacatctcgtacaaacccaaactctgcgtttttggtccagcgatgaagtatataccgagatgggagttctcgaatgtctaagaggttaaacactttcaagatatgtctgcagagaagtccttcgtactcaaacatttgacaactgcagcttgcattgagattcgatgcactgaaagtcacggcgtgcttctcgttctcgttcccacatttcctcactagaaatctgctgatggctccctcctcgtaggtctttaaaccgaggtaattataagactgagcaagctcgctctggaaaattctgaagatggtgagcgtgtacaaccttctgcattgttcttcaacgggctcttttgtctgcagaaacggctgcaagttataagaattgaaatcttcttttctttcctcttcacggcgctgctcgagtccttgctcataccgtgagatgaactccctaagagacgttagagaattaagggaagtgccgtaaaacggatcaaaggtgccgtctacatggattccaccaaagaaactggctcttagatatgccggtacccatttctcgcgcttttcatatatttctctaagccacatgttatccctaaggccgtatttgtttacaagagaactccacatggtatcaaactcgaccgttgtctgagactggtataaacatttctcgtactcgtacttgaattcattcgggaacgacctgagattttctcgttctttggaccttatttgccacgctgagaaccggtgatgagtcccgggaaagacttgagccacagcttgttggataggcaagtcttgatcagctaccatagatctcggacgacggcctgacattgcacgaagccatgtctgaaacaaccatgagaaagcctctttagattcatcagcaactaaggcacccccgagaagcacgggttgcctatgatgattaaaaccgataaatgttgcaaacggaacagagtagtctccttttctatatgaagtatcgaaaacaacagcatcaccaaattgactgcaggcaaatcttgaccgactatctgcccagaaaatgctcatgcagcttccgttactatcaagctcgatggcgtaaaagaatcccatgtcttctgcctgttttgactgaaaatagtcaagaagcactggataccattccttacctatggtgttttctcgggtactactgatgtgattgcttaagtcgtttagttcaataagatccacagaatccaaccctcctgtcacatcatctgttatctttttcataccggcattcttctttcccggttcaaggtcatgattatgatccttattgagacggtcgactatccaacctccagagtcttgccttttgatcctcatgtaagctccacaacccattctcgaaggatgttgaaacccctctttcgaacaaacaaatcttctggatgtgatcgaaccgtcaacttttgatcgaaacaactgccctattcgaactctaaaacctacaacttcagcatacgcttgataaaactggcacgcttcattagctgagttgaactccaaccctgcatacggttcagtggccttgggctgagtttgcccatcactatcttcagctcctttgaagcgcttaaaagagatcacaccagaagggcatgaccttcctttatcagcctcgtcaacaactttcatcttgggtctatgtggaaccgatatgcctagcttagtgggagccggtgctctctgttgtacagaaggacggggagtagtctgagcctcctctatatgacctccaaggtcatggttgtgctctttctgaatctggtcaagaacccatttgccagtatctcgtctctgaactcggataaacgcaggacaaccggttcttgaattaagctgaaaaccttcctttgagcaaacaaacctcctcgatgaaactgtaccatcggtcctagatctatacaactgacccgtcctaaccttaaaacccgtccgcgtagcataagagttgtagtagtcccttgcttcctcagcagtatcaaactctaatccaacataaggttcaagaccagaatctccttcgttttcagcaatgccattgttagtcccagccatt

SEQ ID NO: 31607 - DNA, 2130 bp, Arabidopsis thaliana landsberg
atatgtcagatttaacacgtgagtcacgacgagaagtgagaacgctattgagtaatcgattgattaatgtgatcgcgataaaagtcttcgttgtcaggaatgacaccgtatcttagtggttggcaacaaggagaaattgtcacaatcggttggttaagataattaataaaaataaatgaaagattagatttcgattctgttgatgatacggccgatctcccatccatgcatggctggcctaaaggacttattcaagattcatcttagacgttacatgattgtcatcttcgcatgttatcatttaagtagaaattttgatttgttttgctctgtttttttttttgttttcattgtagacgtattgaacctttttgtttgattaattatttcttgttaattaaacccgttttccaaaaaaaaattaaaatataaataataataataccctggaaaagttatcaaatttgatagatatgtcgatttcaaaccttttaaaaagtcaaaaattgtcatttttttatatttaaattgttactataaagtaatatgaacttttcaccaaggttaatagatcaatctaataacctttataaaataaggttttatcgtagagtaatatctaagctttttaataaaacggaaattaatatcactcagacaacggtgatggtcaggtagagactcagcatgccttgtgtggttacttaaatatgtaatcaactttgaaagttacagagagtaagctgctacgtagttaatttcgggtccagctggcagagaacgtgcatggtgttgttctgtgtgagacaatcaatttttgggcaagctgtgtatatatccgaaagacctactcatatttttttaaattttttttggggggcaactagagaacctactcatctttaaagtttccgtttattactaaactttatttaaatatatgtgttttctagctagcttatgccattttgtataacatgctagcctggtttacccctatagtgtggggttgttcttttctagtagttcaaccaaacgacagcgactaggaaactgaaaggcccaaatgctttcctacaccaacagtcataagtaaagctgtttcaaaattctacttcaaaaataaaggcgcagcaaccaaaaattgagctgccatattcgctgaaaaaattcagcgctaaatgttaatcaacagtgcttgctgtcgcgttagtctcagtgtatcgctcgagttgttatttaacattgccctggtcacattaacctgtccattttggctccttgctttgtgaagaaagtatgagattgtgcacatacaatagcatagactaagcaagtcagccacatgggacaagcttaagcaccgcttttgcttcttcaatttcagcaaaactacaagaaatcgctgccttgttgaggaatctgcaacaatacataaggacacgaaccaagatggtatagaacaattgtggcttgaaagattttcaagataagtaattatgttacctgaactgcttggaactctgatgagtgagaagggtctcgttggggttagctatatatgaatctggttgtgttctattctttaaagccgccatgaaaacatgactgattctagcaaaaggatttttcttcccttctcttgcagtgctaaaacggtaagtcttagtgccgagaaggaagagaaacagagcaagtagcatgaaaacacttggaataccaaatcctaaggaccaacttaggtcctcttgtatgtagctagagaccaaacgaaaggtcaatatgctaacacaacttccaaacatcaaccaattaaagtaagaactcttgtcttttgcatcttttatatcatttccatcaaattgatctgctccaaataccttaatacatggtttgtaaccgccttgtcctattgctataagatacagagagcagaagaagagaatcacttggagttgatttggatctttagagttagaagaagtcatggctgaaaaagacagcaacccaagtccctgcttgtttcattaaatcatttcaagaaacaacaataacatgttttagtagagatgtttttaagaggagattgttatataccatgatataaagagaatacgcgatcacgattgt

SEQ ID NO: 31608 - DNA, 1042 bp, Arabidopsis thaliana landsberg
actaaccgttcctatgaagtttccccatctacactttgaacccttcgccatcatatcagccaaatcctacattttcatactttatcaaacttttactttcttgtttattagaaatgttgtttttgtatgattgtaaaatttgtaatgattatcatcacctctatctttgttgctggtcttaagtttatagctacggcaccacgaacacggagtttttctaagatctttttcttctcagccgttgatccatctgtcgatagtgatcaaatattataactattattaagcatgttctaatactatagaaatatatttgaaagtatttagaattatagaaaattatcgtacaaattttatttataaagtttatattacaaattttgaattaaagagagtaactaatactatgacagtattatgtggaatagtggttgcgtaaactttgatttcaattttcataacttcagatggtaccattttgtgatgggactagatatcgattaaataataattggtggaagataaaactatgtcgaacaactattttctttcaatcgttctatcttcatcaatttgaaaacataaattaatgaaacataagctttgagtctatgcttaaaagtattatttaaggtacttataaaattagaaggagattgaatttaccatatttgctactctatatatctgagaaggcccgcgtgtgtcattccaagaaagacatcattcccgttctgcaaaacaagtagaatattatgaagttattagtgtaggtaaatgaaatgaatgcctcaatataaagctaaataacagtggttatataccatgttcatcgtgtcctgtattaacgggacatcctcaaaactcattatccgatggacaaccttccaagattgagatccatcactcgggttacccataagagggtgtgtggtatcttccaaaaagcatactgtaagcattaacttggaaaactcaacaatagtggtgaaggtgactcttatcataaaccaaaacccaacaaacaaccaccaagccatgc

SEQ ID NO: 31609 - DNA, 5787 bp, Arabidopsis thaliana landsberg
  unsure (1)..(5787): unsure at all n locations
gtcttaactaattaatacttctttacttgcagatctgcaatagcaggtgaatgtggattccttgcagcaaacttatatgcaaaaagtgtgtttggtgaggatgctcttgtgaatttgagtattgagaagcaaacggatggaacattgagtggttacataaggataaggagcaagacgcaagggattgctctaagtcttggagacaaaatcaccctcaaacaaaagggtggtagctgaggttagctaatcttttggaaacattttctatctctcaatgcaatccataaatgtttgaatccttaaacttttaattggtctaattttcattaccataacgatgatttctcacaggcttggaatgatagcgtgcaaggtaaaaggtaaaaggtttaggctacgtttctctcttgagcaatttttcgttggttgattctgtttactacatggagagaagagtcgtttaaaggatatgtaaagagtaatttgttattattcttcctaagccggtatattttccggtatggtaccgatggattcttcctcaaccggctgtctttttacagtactagacgattttgttttatttgtaatactttttcttctataatcttgtttatcgaggagactgaactgttgaacgcgttatcaatagtagatttcaaagttacatgggtttgttccattttagactcgtcatttcatatacgatctctacttctgttttttttttcttgcctttcgtggttctctcttttcgcataacaaaagtttttcttttcctacttttctttcgtatgtgacgtaagacaacatattggcaagatgctatccaaagtcaagtcttccactacttatcattgtcaacgaaacttcctcatgtattcatattattgtttttagcaacatgttggtttcttcgtcataaattcatattattgtttgttagcgacatgtttttgttttctagtcatatattcacattatagatgtttactaagatagcttaaaatattgtaaaccagagggaatattaaagggacccgaatattaaacatcggactactttcttttctagtccaaaaacaagagcactgatacatttttattcgttaaaatgagaacatagtactcattaaaacaaaaagggatattgcaatgaaaaataaccattggtcacgccatatctaccagcagaaacgtcctaatgatatatatagcatcagatgtgtttcgttggtgcaagaacgaggtgttctttcttgtgcatagcgagtccagtcatgacgtccatctttatatcctctggtttaatccctttaggtagactccagtcaaatttgtagagaaggttagcgaaaggtatctctaccattgcaatcccaagatgcatggccgggcacattcttcggcccgacccgaaaggtaggagctcaaaatcttggcccttgaagtccactcctttgtgctcgttcatgaacctctctggaatgaactcattagggttgtctccccacgcggctgtgtcacgagaaaccgcccatgcgttcacctgaatgatggtcttggccggaatatcatagccacctatctttgcgtctgcgatagtttctctgtgtagaagaatggggatgactggttcgagccgaagagactccttgatgactgcctttaggtaagggagattaggtatgtcttcttcagagacatatcctttgtcacctatcacactcctcacttcgtcttgagctttcttcattgcttcagggtacttaataaggtaagtcatggcccataccaccactgcagccgccgtgtcagttcccggcacaacaatatcctgatgaaattacaaacaaaccgagttaataataatattgaggtttaactaacttagagaattgcaataagggttaaatatatagagttacgaaccaatatcatggccttgacattttcgtgagtgaatttgatggagaaaggttggtctttgtagatctgcatcaaaagatcaatgaaactctctgtttcttgttttgggcggatagggtcaagagtctcgtctagaagttcttgaaggtaagtgtcaagctccttganagctttcttgagacgtgcactgagaccagtgaggttgtcaaggaatccgaaataagggaaaaggtcggagaaaaacagagtgcccaaaagtgcttgcgtctcgtacaagatatctatgaatctcttcatctctgtgccgtactcattgtaccgtttcccaaaagcttgtctacatacgacacagttagtgaaagacaagagaagctcacttagatcaacggtgcctgattgatcagcggctttatagatcttgtccatcatccgttgacactcttcttctctaaccggtctgaaacttgcgacacggttcgggctgaagaggttcaccatacacatcttcctcatctcacggtagtacgcggtgtactgtccgaaaccaagctcacggccttgatacgacatggtttgttgccctttcaagagaggacgagcggtgaagttgaggtcttgagttttgagtagctccttggctagctcggccgaggagatcaccgcgaggcgacggccaccgattttcatcgtgaaaatcgggccgtatagcttggagagacggaaaaggaagtgttgggggttgaatttctccatctggtgaaggtttcctataataggaagaccttttggtcccggaggtaaccggagagatttcttggtcgtgctacggaggaaaaagaaggctgcagccgctactaaaccggctataatcaataagagatccatttttttctgtttgacttacttaagtctttgtgttcggatacttttctactttgaatgatgatgtggtttatatagcaagacaaaaagttttattggttggtttgttttggattttttgacaggtgacagaattttcccttgtttttaaaacgtgatgttagtaggtggactactggtttttggaattaaaaaatgtaacttgggtataataaccttgggttacacaataatactgaaagcgagatcgatgaagagttgaaaatgtgaagatattggataagaatataacctcttggttttgttttctaaaaatatactatagaacagtaagtatattatgaagtaataaaatatcatcaacttgttttttataaatctcataaacttttgttcatttagacatcattcttgatttttttctttttgaactgatatgatcgatttaaaaacaaagcataaaaaatggtactttagaaaaattcctaaaaatacctatgaaatttgaagagatcattttctcctatgctttacgtaaactgaaagaaaaaaaaagtatacgtaaccaaaaaacaaaactctcagtttttaagttttctaattactctgtagtcaatttttgtagaaaaatatgttcatatttttgcatttcaacagtaggtcacagtgagacaaatattctacttcgtcaatctaagatgaatcgtacataaattcaactcggtagagaaaaaaaaaaaagagtatttcggagaacgagcctaaagatgtccctattgacttcgcagccgctattgaaattactaagccgtcaatattaacgactttgttctcatgcggacattaaaatttatagaaccaatctcatgggcttactaacaaatgttaaggttgacaagaagtgtgacaaaaaaaataaaaagtctacttcgttgagaaaattcaaaatatacaaacagtcaaattaatttattacaattacacgtaaattggtttctgtcaaatcttcctccaacttatttgtcaacgaaactttatctactcttggacaaaagaagaagaatgatcatcgatcatcatcatcttgaaaactagttaagctaaaacagctcttagtctgaggaaccataaaatctctatggtttgtcatcttcatcctcttctctttcagcttactagtttcatcatcactgctactatcatcatcatcatcatcatcattgagtttatgatcctcgttgtcagattcttgcaatgcaagcaacggcatagaattagggttaattttagtgtagatgctgaaagaagacaaggacgatcttcttcttagcttattagcaataagcaatcttcttctcttgttcaatggactctccactttcaccaaatcgtttgtgttactcgcttccattaaattcccaaacgatttcgatttccctatgtaatggtttgataatcctctcctgtaacaaaaaccaaaacctaaaccacatgactaaacaaaaacacaacatgtagtaataacatttaaactgagaatctaataagtaagaaacaatttcaacatcttacagattcatcaataaaatcaaacccaagaacataagagaatctaatgatttactttattcttgtaataaaagaaatcgatcgaatatattcaggtgtagataacagaataattagaagataattaataaagaaacgtacttaatcggaagagaatcttccaaagatgaactaaacgaattgagccatcttccttgtgatgacgaaacggcgtcgtcttcatcttcctcgttttcgctggtttctccaacggacgacgaactctccggcggaggagatctaccacatctcctcaaaccaatccggctagacagagacgccggtacggcctgatcatgcgtcgtgacgctgctacgatccctaaacgtagaacctaccagaacctccattgattccggtagaattcttgaagcctttgtttatcaaccaaatcgagctcagctgtcataaaatcggagcacccgcgtaggttaagagctccaataagcaagcgcaggttaacaagtaatataaaaaaagaaagagagacaagactccaccgatcggagaagaagaagaagaagataaaaaagaaaagatagttttttttttattaaaacaaaaaaaagaagataaatagaaatatacgaaaacgtatatatatacgtatgagtgacagtatttttgagtctctctgtgtgtgtactaaaattagtatccgagggaaggacggtaacgtcgactctttgacgatttaacacgttnnnnnnnnnnnnnnnnnaatggattggaaattttagcctgacgtttcggggttactgtctccgttaaatccgatgctggccatgtaccgtaagtgttgggtggacaccagaaactctcttcaaccttatccaatactcattactaaaaaggcaaagttatgaattaaaatcagtggaaccagatatgaattgattactgataatctacacggatttaacattatattagctttttctttttcttacaaccgaatttcacttgtcgtaaaagatttaaacacgattattttttgaagtggggaccaaaatccaaaacttaaactaataattcttatatttatggaagagctgggtagtattctaatcatttagatcatcaaacagtatttaaccataattaacacaaattactagttttgaaaaacaaaggaacagttcaatcatttagatctactcacaggttaacaaacataatttttaaaacatttattatgtttgaaagaaaagagtggtaatatgttgatgttgatcaatattcaattaaagaagtagaaagaaacaagggaacataacttcaacaatttaacgtaatataccagtttctttgacgtttaagaatatcaaaggctgatgatgttctcgatcaaatttcacggtacattat

SEQ ID NO: 31610 - DNA, 2496 bp, Arabidopsis thaliana landsberg
aagtagcacttaacagagaaataataatcttaatatatttccccttctctgctggtttagtcttacacacacttcgaatcaactccagcaccaccatctgaagtgattcattccagtctgaaaccttgtcaacattgctcagaagataattcactgcacgttcttcagcacaggtaaagagcattagaaatgcatttctcttggcagaaggatcttgttcggttgatagaactttctcgatcatttcaggcgcatccacaaagagttggtcgccttgtggaagcttatatatcgacatgatggccagaatggcattcctgcgaacaaatggatggcgatgctccagattttgtaacactgatggagttaaaggctccacaatttcagtctccttcatccggcagagaaacctcagtgtcactccacggatgtactcattaggatgctgaaggttattacgaagattctggcatatcaaaatcatttcaggtaacaccttccccttagaatcagtcttttcaatcagctccaggtacagcaacagaagcttttggattgtgtggtcctcagaaggtagcacatatcttataatggttatgaaaagctgaggaatggtttcaccattcagcaaaagcataattgccttcttcatggcatcaactttagcttcaacatcatttccttcgagagcttctttaatctcattagcaactgctggagtccctttgtcatagtgaacaagcatggtactagatttgtccatcttctccggtgctgcacaaaaagtgaaagagaaaaaaatctgtgagctcaaatgaaaaggaaaaaccattcacgaacaagtgttcctttgttaatataagaaatagaagatgaatagagcaaaattgttacaattgattaaagacataatgaagtatagatcacaagtaaaaacaagatatcaaaacttttaatatttctggcaatttcaagttcgaattactgaatataagcaccttactagtgtcctcatcagtgctagagtaagttctatacaagaagttcaacagtatcatcggcgataatccatacctctctgcttggatttcaatacattgaatacatgatctctattctcgaatccgtggtttatgagaaaacatcataatttcagaagaatattcggtaatgtccaattagagacccaaagatgcaaaacattgacaaatctaaatcctcagatccagcaatacacatcactgtactacaactacgaccaatataataacataaaaacgaaaaatcagttaaaacagcttcggatcaaccaaaattcaaaaaaaaaaaaaatgcgatctatctccccagattagatgaacaaacaatgaaatctacataattcgcagtctcactcagctgcacaaacatgaaaatcggtttcctaccggaatcagatcaatattcaacgagatcaaacaaagagcgccagaaaataattgaacattgtagattttcacaaaggaaaaggcaaaagtgggatcgatctctatgaaatctgagtcgcaagtttaacacagagagacaaacctcaaaggtacgagatccagggagagaggaggaggagatccacagtaacacagctttggatccaagagaagattttggatctcggaaaacaaaacactcgcaccaaggaagtgagagatcaaatgtgcttaatattatggtggtggattcgtcaggtgaattaactcctccaaatccttttgggtttgattttggaaaacgaagaacggaaaaaagcgagtcaacctcaaaagcccaaatattgattaacgacaagcccagtccaacagaacttgagaaaaatatagcccctattgttttaattgtttccaaaacgaccccaaacgttataaaataaactgaatactgaaagcataggacactttgggtcagagtttataacctagctaacaaacggtggtcaactaaattgatttttttcgtctatttgatgttctatataatataaatttagttaatcaacggtaagctcaatgactataagcctcacaatacaaattgatctccaaggaatgtataagatttcttgaaaacaaggcatccaaatttgtatcacgttctctagcacaccatctgatacgcctcataaatctgcatagtaaacatgttataactaaacaagtattttaacagtggtcaaattaaatatctaacttaggttttcatttgaatgagtttgtatataatgttttatgcttgggatatattctcgttgctatgataaagtctcttcttacaagaaaaaaagaaaacatcctattaaaacttccttcatatataatgatctattaattagctcaataatgtatgctttgtttgaataaaatcattccctacaaataatcaatgttccaccgaaatgattagcacttgtcattgcgcattattaacatagcatgtgtttagattcgttagatgatatatacg

SEQ ID NO: 31611 - DNA, 5028 bp, Arabidopsis thaliana landsberg
gcaacttgggcaatctcctgtttctccacaccttattgttaatgattcgtatgagaggattgtgtggggcatgggattgctttgccataggaatgatgagatgaaaaagatatggttagaatcctgccgccagagttttgtcaagatgatttctgaaaaacagcttagagagatggaggaactgaaggcgaagacccaaacaacgcatgctcaacctgatgatctaattgacttcttccatctaaagagtcggaaggtattattacttcctaagcttccctttgctttattgggtttttttttccatatgagttttccttttcaatctgttcagttctgttacgttggtgtctactttttcttacagttcatatccaattttttttttcgcattctcaaagaaagttcgaaagttgatagtggcatgttatgtttatttctttcggtcagtagttgaaattactgacgataagtttctttcagggaatgagtcaacttgagttggaagaccaagtacaagatgacctaaagcgtgcaaccggagaattcaccaaggacgagaacgatgctaacaaacttaaccgcattcttcaactcacaggattcagtgacccagtctatgctgaagcatatgtgacggtacaccattatgatattgctcttgaagttacagtaatcaaccgaaccaaggaaacccttcagaacttgtgcttggagttagcaaccatgggtgatctcaaacttgttgagcgtcctcagaactacagtctggcacctgaaagaagcatgcagattaaagcaaacatcaaggtgtcgtccacagagacgggagtcatattcgggaacatcgtctatgagacatcaaatgtaatggagcgaaacgtcgttgttcttaatgacatacacattgatatcatggactatatctcccctgctgtgtgttcagaggttgctttcagaactatgtgggcagagttcgaatgggaaaacaaggtaatttattgaaaccttttatagttgtaccttcttttcgtatgtttgttggagtttggtataaccaattcctgttgtattctttatgtcaggttgctgtgaacaccacaatacaaaacgaaagagaattcctcgaccacattatcaaatctacaaacatgaaatgtctcactgctccgtaagtgtaaattcttctttcatcctgtagaaacgaaaaactcttcttactaattaatacttctttacttgcagatccgcaatagaaggcgaatgtggattccttgcagcaaacttatacgcaaaaagtgtatttggtgaggatgctcttgtgaatgtgagtattgagaagcaaacggatggagcattgagtggttacataaggataaggagcaagacgcaagggattgccctaagtcttggggacaaaatcaccctcaaacaaaagggtagtagctgaggttagctaatcttttcaaaacatattctatttctcgattaatacatgttttaatccttaaaccgcaattggtctaaatttcagtaccataccgatgatttctcacagtggcgtgcaaaggtaacaggtttagactacgtacgtttctcttgagcaattatcgttggttgaatctgcttattatatggagggaggaggcgttcaagggtatatgtaaaaagagtaattggctatcgttcttacttaaccggtatattttctggtatggtaccgatggatttcttcatctcatatggcagtgtgttttttactgtactagacgattttgttttatttgtaatgctttttcttctataatgtcgtttgttgaggagtttaaaccgtgaactttatgatattgtagatttcaaagctacatttggtttgctccattttagaactcgtcatttcagatttgatctctactcttcttttctttcatatgcatttgaagtgaactattcaattgtcaaagctagactttaatttgctagtagctatataatacgggttatgttagcaagtaagttgtaatgaaacgcatgtattaatatggaccatattcaaaatctacaagccaaagaaaccaattgcttcacaaccaaacccataacatttgattcttacagcctctcctattctcaagaaaaccaagcaataattttaaagcaaaaattaataatcttaaatcacttgcctcaaggtaccaagggacgatcacatacacattcgcgtaactagatatcgctaacatcattagacaagaaaatactagacgcgagtagaagaggaaagatccaaatacatcatcttctatcataaaatcatccatctctaaccgaaagttggagcacgtttcaaggaaaaactgacataattcctaattacgctcacttttaaaagtttggggtcgttttggaaacaataaaaaagtaggggctatgctttctcaacttctattggactgggcttgtcaacaatcaatatttgggcctgcgaggttgactcgcttctttccgttcttcgttttccaaacagaaggaaaaaaaactaaaaaacaaaatcggatttggaggagtaaacacaagggaagacgaatccacgataatattaaggacatttcataatctctcactttgtgcgagtgtttttttttccgagatccaaaatcttctaacggatccaaagctttgttactccgtggatctcctaccttgaggttcgtctctatctgttaaacttgcgactcagatttcgtagagatcgatcccacttttgcttttcctttgtgaaaatctacaatgttcaatattctctggcgttctttgcttgatctcgttgaatattgatccgatcccggtaggcaaatgattttcatgtttgtgcagctgagtgagactgcgaactatgtagattccattgtttgttcatcaaatctggggagatatattgcatttgtgatatgaactttggttgatccgaagcttttttattattcgattttatgttaatgttttggtcgtagttgtagtaaaagtgatgtgtattgctggatctgaggatttgaatttgtcaatgtcttgcatctttgggtcgttgattagacattaccgaatattcttcagcgattatgatgctttctcatataccgtggatttgagaacatagatgctttcttcattgtactgaaatatatgtagagaggtgtagattattattgctgagtagtattatggggatactctgaaacttcttgtttagaacttactcgagcagtgatgaagatactagtaaggtgcttatactaacttagtaattaaaagaaaattcttaaaattttggatatattgattgttacctgtgatctatactacttcattttatctttaaatcgattttcagtattttaggttcctattctctattcgctttgaatttcttatgttaacataggtacacttgttcttgcatgatttttccttttcatatgagctcacaattttattttatttttcactctttgtgcagcacctgaaaagatggacaaatctagtaccatgcttgttcactatgacaaagggactccagcagttgctaatgagattaaagaagcgctcgaaggaaatgatgttgaagctaaagttgatgccatgaagaaggcaattatgcttttgctgaatggtgaaaccattcctcaacttttcattaccattataagatatgtgctgccttctgaagaccacaccatccaaaagcttctgttgctgtacctggagctgattgaaaagacagattccaaggggaaggtgttgcctgaaatgattttgatatgccagaatcttcgtaataaccttcagcatccgaatgagtacatccgtggagtgacactgaggtttctctgtcggatgaaggagactgaaatagtggaacctttgactccatcagtgttacaaaatctggagcatggccatccatttgttcgcaggaatgcaattctggcaatcatgtcgatatataaacttccacatggcgaccaactcttcgtggatgcacctgaaatgatcgagaaagttctatcaacagaacaagatccttctgccaagagaaatgcatttctaatgctctttacctgtgccgaagaacgtgcagtgaattatcttctgagcaatgttgacaaggtttcagactggaatgaatcacttcagatggtggtgctggagctgattcgaagtgtgtgtaagactaaaccagcggagaagggaaaatatattaaaattattatttctctgttaagtgctacttcttctgcagttatctatgaatgtgctgggacacttgtttctctctcatctgcccctactgctattcgagctgctgccaacacctactgccaacttcttctttctcagagtgacaacaatgtgaagcttatcttgctcgatcggttgtatgagcttaagacattgcacagagatatcatggttgagctgataattgatgtgctcagagcactctcaagcccaaaccttgatatccgcaggaagacacttgacattgcccttgacttgattacccatcataatattaatgaagtcgttcaaatgttgaagaaagaagttgtgaagacacagagtggagaacttgagaagaatggagagtacaggcaaatgcttattcaagccatccatgcttgtgcagttaagttccccgaagttgcaagcacagtggtccatcttctgatggatttcctgggagatagcaacgtggcttcagctcttgacgtggttgttttcgttagagagataatagaaacaaatcccaagttgagagtttcaatcatcaccaggttgttggacacgttctatcagatccgtgcaggaaaggtctgcccttgtgcactttggatcattggtgagtattgcctatcactttcagaagttgagagtggcatttcaactattacacaatgccttggcgaattaccattttactctgtttttgaggagtctgagccaactgagacatcaaagaagattcag

SEQ ID NO: 31612 - DNA, 2765 bp, Arabidopsis thaliana landsberg
  unsure (1)..(2765): unsure at all n locations
tcaaatcttgatcctcgtctgcaaattttgcgtcttggtatgtagttattagatgtcatttattcccatatttaggatttttctggtggtggtgtgttttttcagagtgcatatggtgcaatgcaaactcaaggactggctcctgggtaccccggagagtggcaggaataccaatatgcagacaaannnnnnnnnnnnnnnnnnnnnnnnnnnnnngaatggagggttacgaggtccaaccagaaaccgatgttttactagatcctcaactcatgtcgcaggaagagaaagataggggtttgggatcggttttcaagcgtgatgaccaaaggcttcaacagttgagggagagtgacgcaagggagaaagatccaacttttgtatccgagagttattcagagtgttatccaggttaccaagagtacaaccatgagattgtcggtagtgatgaagaacctgatttgtctaaaatggacatgggtggaaaggtatgccctgacttaattacatgttccttgttatttattgtggaagagcaaaattacagtatctggttgttgaatgtacatggaacaggcaaagggtggtttacatcgatgggactttgagacagaagaggaatgggaaaaatataatgagcagaaggaagcgatgccaaaagcggcgttccaattcggggtaaagatgcaagatggtcgaaagacaaggaagcagaaccgtgaccgtgaccagaagctcaataatgaacttcaccagatcaataagatacttacgagaaagaagatggagaaggagggtggggatgttgcttctttggatgccgccgaggcacaaactcctaagagatccaagcattgatttgtctcttgtctactccagtcattctctcgtaatctattttgtatcttcaagtctgtttaggtttttggtaccttgagttcaaattcttaatttagaaaagattttacgtccaaattttgaaatgatagcattcttatttcctaattacccattaaacacgaagcagttttgggagttgggacagccttaggttttaggtttagcatcaccaaaaatgagacgcttcagtaaccaacccaacaagacaagcaaaaaactagaaaaatcataaaaccctaatcacaaaaatggccacagaatccatcaatgcagccaccgtcaatgactccgaccgtttcatcttctccacacctctctccgctcgtggttcaaccaaacgtgacgccatctccgtcgaggattacgacctttatcgccggtttcactcttctcaaactccattcaaatccggtttcacaaactacatagatcttggccaatacaacgacgaagatgacgatgtaagaatcctctgtttcacaccaatctccatagaaaagggacagtcctctgtttgaccaatacaacgacgaagacgctctttcgactgcgagatatgtgttgaacgaaaaccaaggattgaatcttttcgaatcaatggctgttctcacacttattgcaacgattgtgtctcaaaatatatagctgctaagttacaagacaacattctctcaatcaaatgccctgtttctggttgctcggggcagctcgagcccgataaatgccgtcaaatcctgccaagagaagtctttgatcggtggggagactctctttgcgaggcggtgattatgagttcaaagagattctattgtccttataaggattgctctgctttgctcttcttggacgagagtgaagaagagaagatgaatgaatcggagtgtcctcattgccatagaatggtgtgtgtagagtgtgggactaagtggcatccggagataacctgtgaggagtttcaaaagctagccgagaacgaaagagaaagaggtgatatattgttgaagaatatggcagagagtaagaagtggagaagatgtccttcttgcaaattctacattgagaaatctgagggttgcttatacatgaagtgcaggtatcttcttcgccgtctttttttgttttctttatgatacaaaactcttatcttctaacatttttgtaggtgtggattggctttttgctacaattgtggaactccatcaaaggaccatactcattattgttatagttgtaggcattgacaatacaacttctaatgatgtgacaagtgtgtcaatacaacgatcttttaagattacatacatttatcaacatgtctaggttcttttggaagtactttgtgtgtattttcatcgtatttgagatcaatggagaaagaaggaaaaacatttggatcctacatattacttataatatgcttccttccaaaaatattttcagcacaaatcgatataagtttgatacaacacattctcttagcacactatgttctagtatccgattttccaagtaaatttccatggatgaagttctatatccacatggctttctttgcaagcaacaagttgtcatcaagcatcataaagacccaacttaacgggagagcctgaggcactgatccaatctccttgtaagaagggtccaacagtatagttcaaagcctcctccttgtttatgaccttaaatccaggccatttaactcttgaagttgtatctccacttgatcctttattattgtactccgcgtagtacaacgtgtctatcgcgaaatccgtctcttgccatctcaaccatccaacagggtcaatcacattctcgattttagattccattatgatcgttcgagagtagttattccacggtgc

SEQ ID NO: 31613 - DNA, 1266 bp, Arabidopsis thaliana landsberg
gaaaaggaattcttgattctaggatcttgcattggtaacacgataaattattgcccatatgattgatattattttttctacctaaatagcgaaaataggtacaaagcatcaagaccaaatataaatccatatccttaaagcttaagcttagctttagattagagacctatataataagaaatgctgatgctaaacatcaacgcttacaattataacactaatgagtatggtccctcgatggagttccacagttgtagcaaaaagccaacccacacctgccaaaatgtgtttaaaaagatatataaaccaatgttttttaaaaacactcttgctaagaagaagacgatacatatatatacctgcacttcatgtataagcaaccctgagatctctcaatatagaatttgcaagaaggacatctcttccatttcttttgctttgccatcgtcgcaagcaaaatatcatctcttcctctctcgttcgccgctagcttctgaaactcctcgcaagtcatctccggatgccactgagtcccacactccacacacaccattctatgacaatgaggacactccgaatctttcatctttacttcactctcttctaagaaaaccaaagcagagcaatccttgtaaggacagtagaatttcttcgaacgcatcactactgcttcacacaaagcatcaccccaccgatcaaaaacctctttaggcaaaatctgacgacactgatctggctcgagccgaccagaacaaccagagacaggacattcgattgagagaatgttgtcttgtaatttagctgctatatatttcgaaacacagtcgttgcagtagaagtgagagcatccaccgatacgaaacgactcaattatggattttgaatcaacacatatctcacagtcgaaagtcgccgtctttgacgaagaagactgtcccttttctctgtggattggtggtgcgaaacagaggattctgatatcatcgtcttcatcatcgtaaagatcaagatctatgtaaattggagattctgacttgattacggttttgtgaggagggtagacccagagacgttgaagtttccgatcacgatcgtaattctcaacggaaatagcatcacgctttgtggaaccacgtgcagagagaggaggagtggagaagatgaaacaatcggaattatcgccgtcgtcgttaacatctccgggaagatcaacgatcactgcgttaactgactgtgtcgccatttcaaaaatgattctaattaggt

SEQ ID NO: 31614 - DNA, 1049 bp, Arabidopsis thaliana landsberg
tactcattaccaagaaatatgatgaagtccaaagaaaaaaccagtaacacattttcatatccaatattttcacaactatgtctttaaggaagactttgcccaaaaaaaaagaaaaaagactgtctaattttttttgaaaggtcgtctaaatataaaactacgactcaaaacataaaaatgttgttcaatgattaattgaatacaaaaacccaactactggaacaattcgtaccgtgggaattaaaaaacaaagacttgaaaatagtttatttgagaaaatgctttgatgcatgagtctaaataggaagaaccaaatgttgtgttgacgacataatgtagagttaatcaagggctagatagacgtatgtaactgatatgctaattaacatgtcttttcaagattgacaaacatatttgagagaccaatcttaggctcttagcatataaaaagcatgagagtgacctttttgtgcatataatcctccaaaattattccaatgtatgaaccgaagttttgaaccgattttaacaaaatcatttttaaaacagaaaagtagtcccttgaaatttcgttaaagatattcaacaacaaatttaaaccgtgtcagagttctccacggaatcaccattgagaccaaaaccaagaggaaacaatggcaaatacccatttgattcgatgtcaagaggtaactggtctacgcgtttgaaccaggtcgctggtaacttccctcggaactcataatctccgaatattacatcagcaatcccttgcccttctgtaccaggcagccaagcagcgaccagcgcctctgccttttcaagaacttgcggctcaagaaacataggccgtcctgagaacaagatcactagagtcgggattttctctgcaaccgcggttataatctcgctaccattgaaaggtattatgagttctgagttatcccccatagtctctgcatagggcgggttcccccaccgcaacaattgcataagaaaatctatatcctgaggctaaggtttcctctgatggacttttttcatagatcact

SEQ ID NO: 31615 - DNA, 597 bp, Arabidopsis thaliana landsberg
ggaactcttttgtcaatcataagcactattcaggattcataagatctgaattcccaactattccatttccagccatcgtgtcataccgaataattatactacaatggaaaatataataataatcatgattcttgaagccgcatgcattgaacaaaacctgaaaaatgattgattgttagatacatacgagaatctcatgattttgaaagaggtccactcaaatttctaaaagaatatatgaagtgagtttccataataatttaaaattagttagcagtttcatgactcaagaagggatgataatgattagtgattaatagagttttgattgactaatcttttgactgaattataaataaaaaggcaaatgcaattctcagttgagatgcattactgaatccaaccgacacacttgacgaaatatatatggtttttaaagcaaatagtattaggctgatgttgatgtaaagacttttatgccaaaacaaaaacgtttagaaaaggatctggaattattttgaaatggttctgaagcatttaagaaccaggcctaaactttttatttttgtggttttttgagaaaaaaataattaaaag

SEQ ID NO: 31616 - DNA, 3837 bp, Arabidopsis thaliana landsberg
aataaaaaacttttctttttttaatttataaaactagaacactatataacgtcaagcgtataagaaaacaacaacaaagagatcacaaaagttccgaactttgaaaaataaacatttaggcaagacctaaaaacacgatctttcttcaccaaagcttgtgaaagaagcaatcgattaacgatctccgtacccagaatcctgatcaacaatggctgccacaacatccttggcaatcgcttaaaacctaacaagtgttcatactttgtttcttttttttcaagcccattctctgtatttatctctaacaactttattcatgttgttgaaccgaaacatctagaacctaaacataaggaggaccaattctcttctatttttaacttgaagcaaatagcataattacttaaagaaacagagaacaagaaccctttactgcaagtattttcggtttggatattagtccccgtttcgatctcctcaggggcggtttacttggttttgcagctgctagggatatctttgtttatcatggaaagcagtggatgattactaaacactaactcttcttccatacgagcttcttcaaagatttcctcccctatccggtttctaacacatacataaccaattccgatactcacctcatctgcagtaactttcttcacgagcccttcagtagccatgtcaacctttgtgaccacagccagagtccgttcccctgttttgttcacaagttgtgaaatcaactgtcgctggcagaacattgaggatgatggattcatgtggcttgatgtacttcataatcaccttggagatttttcgcatggatgttttgagtctgtccattcacgggaactcgagttatctcagggagatcaaccaatgtaagatcaggaacatcagccttcttgacatggagagttaagggagtgtatgatacacctttaccagatcctgaaaacatgaatatatatttaagattactcatcataacaacaattcccaacaatccatttttttagtctcaaacatgctacactcaagtctcaacgatacagtattaaaaaaatcgattacttaggcaacacgtaaaggcgtctctagtgtgtggagagactcattctaagaatctgtctttgcaggtttaaaatatataaatagaacatctagtaacagataagagaaagtaagaacgtaccagcaatgacctcagctgcagaagaaatagcttcggcgatatgctcctcatcactcatcagtatcaactcttctgtcatcgtactcaagccagatttcaggctcagggcaaggagttctctgtaatcgcatcacaagaggaacccttgtgcaagtcctttgtcctcgaggcaacctgattccagccagagactcaaaaatttattacatttgattattcagaccaacgaaactcttgtaaaggtttaactttgcttgagttatgtacggactttcttttactgtctattttcttcttccaccgagcaaaaccatcatacgaagttattggttttattccacatttcctataaagaaattcgactttaactttttgtttttgatttgagataaatatcgtaattgagtgaatctgtgccaaatggttctttggtctagttagttactgtggattttaaatctcaaaatatgtttctttgcgactttgctactgaattaaaaaattaaaatagtcaaattctttcatttaaatggaataaattcaaaacaataatccgagtgaagataaaacgaagagatagtttcatataggctatatgatatagtagatggtatgaaaataataattgcaataaaaatcttcttaagaaacttataacttatgaaattcattcaaacagacgccaacataacgttattaagcttaatagcttaatcggtaccacacacaaaatatgaaaaacataaacgagaaaatccgaaagttcaaagaaaaacacaaaaggcccaactccaaaaaagaaacccatcaaaagcccaaaaatacctgacccgaattaaccgaagcaaatcaatccataaacccgacatcacgagagaaaccaacgatcaacgatctccgtacccagaactctgatcgacaatggccgccactgcatccttggactccttcggaagcttgatactgttcttcagcttctctctcttgctcgccaccgacggcgactcctctagcatcctctgaagacctccgccagctcttggatccaccatctccgccacaatctccttctgaaactaataattcacgagattcttcactgacagctgaagatacagagcaagactgtccacaatccttcgtaagactatcgtccagtaagatgctatcctcatcttcatatcgaaggcttgctgcaggagatgagcatgatacttccgtaggtgagagatcttcacaattccaccaaatccagtcaacgagaagtgctcaggctttttcccatcggacaacacagcataaatgaagttttgttgttcagcagtcatctgagtccaagacgtcatgtactcagggttacatgtgtaatcagtcagcttctccatttcaacaatctccaacactcgctccacagagtgttccttgatcttggtgattagatttcgaccagcacgtttgatggcagattggatctgtgggaagttttcagaatacttggcaatgacggatgagagaacaacttcaatgtagtcccatatcttcttgatgaactccacgggcttgacatgtatggcatcttcgtgttgtgatagtatagccaagaaggctgacctggggatgaaattgggcagtccaacacacttgcattcgtcaaggatcttgatctcatccatcaagaactcggtcacttcctttggcttctcttgcagattatcggagaattggcttaacatgtcagccaaacgagcagtacagtgcatgttctggtcatccgggaattcagagaagtctccttggacaaggattctgaagagggactccttggtagaaccaatgatgtccatcaatgccatcaatgcttctccggtagaagccataaccatcggtagcttgttcaactccaggacagcagtttccatcttgtgattgatcttgcgaacgatttcaggcaaacagcgagaaatcatcgttgcttggataagcattagcttctgagctaaaacagggattcccacgatgtcttcatcaatcaagctcagcatcgggtgagtcctgaagagcaactcttcttgcattctagcttgttcatacgtctcttctccaatgcggtttctgacacagacgtaacctagaccaatactcacatcatccgcagttactttctgtaggagaccttcgggagccatgtctgccttggtgacaacggccagagtccgttcacatacggatggattcacaggtggtgaagtcgactgtagctgacagaacattgaggattattgattcttgtggctcgatgtacttcatgatcatcccagaaatctgttcgtaaatattctccggttgtccattcactggaactcgagttataccgggaagatcgaccatggtaagatatgggaccccagccttcttaacatggagggtcaatggagcgtctgagacccctttgccagatcctgcagtataggtagtcaaaagttcaaaactggttagcatcacacacaacacttttaagttccttcaaatagcaaaactagtagtataaagagcactaaagttatcagactacactaggttttccataatcatatttcaaatctaggtacttgtattcaggttcatgtagacatcttatt

SEQ ID NO: 31617 - DNA, 1592 bp, Arabidopsis thaliana landsberg
atgatacttaaatgtttctttgtttcacagcgaggtcaaaataaaaaaggatatatttatggactaggcagtgttcaataccgggatatcaatccatcccagaaagtggctacaactatgtctcacaaccttgacaatgagatgcgcatgaatggtttggaaaaaaacaatcatgcgctcaaggaacacaatgaggccctcaaggaagacatggtggtgttgaagactggtgtgggcagggtaatggacgagctggcaacagcccgacttgcgctgaatgcgattatgaagtctttggagttcaacctgatgtgttgatggtcttgatgttccttctgcaggttgggttagttctcctgcacgtcgtgatggttctcttgcagggactgctgcacgtcgtgatggctcttttgttcttgttgcgggtcgtgatggttctcctgctcctgatgcattaatacattttaaatattaattttaaaaactttataattactttttgaaaatattttaaaatttaaaaatctatttttacattttcacatttttatatattataatttcataactaatgaaaaatatttttttttacaaaatatttacttattttattaaccatttatatattacatttatatagtccacagaccgaccgacaagtcgtttttattaaaacatttatagtcttacatatgatttagaaaggtttgattaattgatctttaataagataaaaaccataagattaaagggaaattcacgggttgggcagtgagatctctctctttcgctggtagacttcagttgattgctttggtaattacgggctgtgtggttttttggattactactttcaagctccctaatggatgcatcaaagaaatagagtctctatgctcacgttttctatggtctggcggcattgaaaatcacaacaaggctaaggtcgcgtggtcaacagtcttcttaccaaaagctaagggagggctaggtatcatgcggttttaagaatggaatacaaccctcaatctgaagcttgtttggcggttattctttggaggaggatctttatgggtggactggcataggtatcaccatctacagggtctaggggatgcctctgtttctaatttctggacttctcaagaattggtctctgattcctggaattggaaatgtctcatgcggttgagacctttagtagaacgtttccttcgatgtaacataggcaatggcttactgctaggttttggacagacaattggacgccatttggccccttacttattcacattggtgttgtaggttctaataggctgaggattcttattggggcttctgttgtagacgctactgaaggcattagttggagcatgtatttgacacgttcaccgcagctccaaagcttaaaatctcatcttgataatattccctttcatctacacctgaatgtaagtgatgagtaccactggattgtaaataatgtggactgtaatggtttctcctcttcaaagacttggcaggctcttcgacagtgggaagagaagaaagattcggctgcttctatttggtttaaaggctcaacaccgaga

SEQ ID NO: 31618 - DNA, 891 bp, Arabidopsis thaliana landsberg
cattgacagatccatagcttccaccttcttgagattggtcagccaagctggtatttcacttttcattctacatgcaccgacgccaaatattcggagtttggggaatccatctggggaaagaaagtcttctttgcttggaactgtttcatcgtaaaaattctttgccaaaattagagtggacaacttcctgcagccctgtagaatgctgagagcccctgtaatgttcgtcagtttattgtctgataaactcatgaaagacagagattcaagttccaatacttgaggagatatctgtcccgttaacttgttgcctgcaaatctgatcgcggtgagcgatttgcaggaaaaaatcttatcagggagagcaccagtgaagctattgtttccgagatctagaaccttaagactctgcaactgggaaaactcgagctctgttaagcttcctcccagccgattgaccctcaaattcaacttgacgagtttagtacaatttgcaagagaaagcgggactgtaccggtgatgttattgatatggagttgaaggctacgcaggctggagaggttacctatgtccattggtatttctccttcaaggtggttggagtaaagctcaagcgaccttagtttcctgagccgggtgatgttattatcgatctttccggtaagctgattcgctggcagaaagagttgctccagctcggaaagtttgtagatttcacttggtatttcaccatagagattgttcaagcctgcttgtagaacacttagcctcaaacatctgcctaattcttgggagatatggccgctaaaatcattataagaaaaatccagtttgctgagctgcggtgaactcctgcacatgaatgaagggattggacctgtgaagctgtt

SEQ ID NO: 31619 - DNA, 2790 bp, Arabidopsis thaliana landsberg
cagatcaagtgtttcaattgagaagaatctgttgctttcatttccacatgcttgttctaatggctactcaccattgaagctattgtaactaaggttaagaaccatgagctgatcaagggtcgagaaaaaacctggtgggagagaacccgagagacggttataagaaagatcgagacgagagagacggtgaatgttctgaacagacgaagcgagagtgccagagagtcctctagagggcaaggaaatcacagtgacgtgactatctgatgaatcatcacacgtaattccctcccaggaacaacaatcaatggaaaaattccaattcaaaggaaacacagaagaagaaacatttccggaaaaccacatgagagattctcgatcttgtaggttacaaacggcttctgaaagtgtaagaaagagggcagataggaaaagaacacagaggaggaagagatgcatgtgagaactcagaggctgtacaggttttgtgattgatggtctcacaagacctttggctttggatctcatttccttatctatcatgcaaggagaagaacaatacagagaagaagaagagaaatagaaaacttcttgtcgatacagaggtgaccaagggaaatagtcagccgagagtcactcagagagaagtgtgatcttgtcaataccatcgttgaccaaggcaaagtcattttattggtttattcaacccttcgactaagtttgttataacattgttaatcctttgttaatttaatctagcctccacatatatataaatatatctacggacagtatttgaatttgctccaatcagggatttcgaaacctcgagatccaaccaaccttgcttatctctcaggtaaattcctcgctccttatctcactgtttctgaaaaaaatcatcggtttagattaaagaccttactgcgatttgatttcccaattttgaaaatttgattttcccgttaggttttaaaacagtcttcgacgataaagaaggctacgcaggaggaggctgtggctgtgacatcggtcttttgggacatcagtatgtatctggttcccccttgctttgatcctcgtcgggtccgtccatgtattaaacaggttctggagaattctctggtcctctcatcatcactgccgttggcgtactaaaagacgttcagaatgacatcctgagatgagtctattccagaggaatcgctcttactaacatcccctaaggttgatatcttatcatccttatgcctttctacagtaattgatattttccttgatgaagaaagagtctcacgtctttagtttctgaaacaggttccatggacattttggatcttatttatagatttaccgtgaggaatccacctccagctaatataatagtcatatccgatccggaacctggtctttctgacttcctataaatgatgggatacaaccttcttcagccgtttccatataattcttttcaaaactttcttctggcaggtgtgtgtttgtcctctatctcagtgttgtaggtataaccagcaaatctgttgctgaactggctacttttttttcccacagattcaagggcacctgaggaggataagtgcagtgaaacgggtgactctgcctgatgggtttgctcactatgctgccgtgatcttgctgtccaacacgaataggctataaaatttcacctctcatctctcaagtagagcacataaacggaaggtaatcaagcatcctagttacaagttggtgtcatagttctagactccaactcaacaaacccactagattccttggtcagcaaactcaatctcctgttacgaatttggcgcgataaaactttagtagctggtttctatttttaatattatgtctgctggaaatacaaagagatttgaggattttgataaagcctgcacattctatctagtaatacgcagcgagcagaatcaatctaaaaccatcacatttaaccactgtttctttacaatgtataggaaaaaattacttactaatgaaagcatcgagtctagcaaaaaagcaccagtaaaaacagtaggaaacaaaaaatccagtggcaactccgagaataaaaataaacttcaactcctcttcatcctctgtatccgctttatttgtggttgtagcaggcagctttgttgaagccttgcaggaagtcagcagtatgccaccgcacaacaaggggtttcctttaaaatttgcttgtggaaaagtatcaaactgacttcctgtgggtattggcccgtcgagactgttgttcaccacgttgaaataagacatataatggaggcttgttagcgaccaaggaattctaccatataagtgattgttggacaggtcaagcctctctaagctggtgagtttcgacaactcacgtgggatgatgccagacaaatagctttgagaaagctcgaggacatgaagaacctttaactggcccaacttcgatcggtatacttcctttcaggttattccttcttatgtagatcccaggtgggaggctaaccagctgattgtattgttattgagttgtaccattattgggactgacaaaaactggcagctttagatagttcctttctgttgcgtcgtaggccttttgggacatcagagcctttagttggaataaatccttcggcagctctcctgaaagaagattttctgagagatcaatatagaaaaggtggggaaaagttcccaaccaaccaggaattgaccctacaagctggttgtgggacaaatctatgactgctaagctcttcaatttgt

SEQ ID NO: 31620 - DNA, 5215 bp, Arabidopsis thaliana landsberg
  unsure (1)..(5215): unsure at all n locations
gagggtggtaacgcagaagattggctctttcgtttggagcagtgtttcctttccaatcagaccctataggaggtcaagttagaaaaggtcatatcttgtttgataggagcagcagtgacttggtggagatgctcaaaggagcgagaacagatctatacttggagagattttcaggagaaattcagagtgcgtttcagaccaagtagaggcagctcggctattgatcacctattgaacataaggcagacagggagtgtcgatgagtatcgtgaaagatttgaagagcttgtggtagacttacctcatgtgacagctgatatcttggaatctgccttcttgaatgggttgaggagaagcctcaaggaccaagttgtccgttgcagacctgtaaacctcaccgatattgtggagatcgcaagactcaatgaggcacaggagcgtaacaacccgagctaccaggtgaggactcaaccgcgagtcaccttgcctcctaacccaaccactgcagtggcaaggccgtttgaaagagcacaatctagaccatcttttgtgcctactaaagacacaaacaaagcttcgggtagcggtacttctggaggcaatagtaacccatgtcgtcattgtggtgaccgatggtttacagggcatcgctgcaagcagcaaagactcaagagcctagaggttacagaagaggaacaagaggaaagtcccctcattgaagagctcaatgagccattaacagaagaaaaaggtgaacttgaagaaggttttcaggtaatgtcattaggctgcctggttgaaaaagaaaaagaacactccatgagaatgagaggctacataggcagaactaaagtagtgatacttattgattctcgcgccacttgtaacttcattagcgaagatttggtgagagctagagactggataatcactcctacccgtagttttggtgtgcgagtgggaggtggcaggataattagaagtagtggcaaatgtgtggatgtcagactagaggtccagggcatcgaattcagagaagatttctacttgtttgatttgggggagctagatgtagtacttgggttctcttggttagcaaagttaggagaaacaaaagccaattggggacagttgaggctcagctggcagataggcagaacatgggtttcgctgtatggagatccggatttgagtactcatcaggtttcgatgagagccatgaaacgagtggtgaagtatacaggagttgcttatcttcttgagctagcttccctgtttgataaccaagcgcaagaggaacagacttccatcactcctatgattcaacaaatcttggaccactatcaacatgtatttcagatgccacaggccttgcctcctacacgtaacagggaacacgcaatcacgttaaaggaaggtacctctccggttaatctcaggccatacaggtattcctttgaccaaaaggatgagattgagaagcttgtcactgagatgctgagaagtcaagtgatcagacctagtgtcagccctttttcaagtccagtgttgttggttaagaagaaggatgggggctggaggttttgcgtagattacagggcgctgaatgaagcaaccataccagacagatacccaattccggtaatagaagagcttctagatgagctaaagggagccacagttttctccaaattggatttgaaatctggatatcaccaaatcagaataaagatgagtgacgtggagaaaacagctttcaagactcatcaagggcattatgaattcttggtaatgccctttggattaaccaatgccccctctccctttcatagtgttatgaatgacctctttaggccatacttaaggaagttcgtgttagttttcttcgacgacattcttgtctatagcccggatatggagtctcacctgaaacatttagagatagttctgcaactgcttaaactccaccgattctacgcaaatttgaagaaatgctcttttggcagtacacagatcgcatacttaggccatataatctcagctgaaggtgtctctgctgatcctgaaaaggtagaggcaatgttgtgttgnnnnnnnnnnnnnnnnnnnnnagagttgcgtggatttctaggccttacaggctactatcgtcggtttgtcaagaactacgggcagatagcaaggccactaacggatcagcttaagaagagcgggttccaatggaatgaggcagccacaaaagcgtttcaggcactgaaggaagcagtcacgaatctgccagtattggtcttacctgactttaatcaagagtttacagtggagacggacgcttctggggttggaataggggttgtgttgtcccaaaacagaaggcctatagcgttcttgagccaggcatttttaagtcaaggtcggattaaatcagtgtatgaaagagaattgttggcgattgtgagagcagtgactaagtggaaacattatctgtccagcaaggagtttgttattaagacagatcagagaagtctaaggcatctcttggaacaaaagtctgtatcaactattcaacaacgttgggcttctaagctaagtgggttgaagtatcgcatagaatacaaacccggagtcgacaacaaagtggctgatgctctctctaggaaaccaccgcaggaaaggtttgctcagttcaccttaacggctccacaaacaatagatattggcgctttaaaagaagaaatcatggctgataaagagttgcgtcagttggttgatacttggcaacaagggcagagtacagaatctgaattttcagtgaaagctgggttggtttacaggaagggagccttggttatccctacaggatctcccttcattccaaagctactagagaagtttcacactagtgcaatgggtggccacgaaggagcgttgaagactttcaagagactcactagtgaggtctattggaagggcatgcgaaaagatacagtggaatacattcgaggatgccaaatctgtcaagagaacaagtactccaccttgtcacccgcgggtttgctctccccattccccattccacaacagatttggagcgatattagcttggattttgtacaaggattaccgtcttcgaaaggattcaactgcatcttggtggtcgtggataggctaagcaaatacagtcactttattccgttgaagcacccgtttactgcaaaggtggtagcagaggcctttataagagatgttgttaagttgcatgggtttccaactacaatggtgtctgatagagacaaggtcttcctcagcaccttctggtctgaattattcaagatacacggcactgaattgagaaagagtactgcctaccacccccaaacggatgggcagacagaagttgttaataggtgcttggtgtcatttttgagatgctttgcaggccgacgaccctcttcttggatgcaatggctaccttgggtcgagtactggtataacacctcttatcacactgcaacaaagacgaccccattcatggcggtctatggaagagagcccccagcaattctcagatatggggacacacctacagcaaatgcagtcgtcgaagaattactcaaggacagagatgggttgttgctagagctgagagaaaacttggagctagcttagaaacaaatgaagaaagccgcggacaaacacaggagagatgttgagttcaaggagggcgatttggtctacttaaaactgaggccgtatcgacaagggtcgttggtacacagaaaaaacgagaagctctcgcagcgatactatggaccctaccaggtgattagcaagattggtaaggtcgcatataaactcaggctaccggattacagtcaaattcatccggtgttccatgtgtcccagctgaaaccagcggttcctccctctttcactgctcaagaactgcccaagattgtgactccttctttagagtgggcgacggagccagaaaagcttctggatatcagacagagtagaacaacagacggtgccgacgtcttggttcaatggagtggcatgtcagctttggaggcaacgtgggagccattagtgactctagtgaagcaattcccgagcttcgatcttgaggacaagatcggtcttctgcgagggagcattgataggctaagggttccactagctactatgagaaagagaatgagaactggcgggagaaaagctaaagctatggtgaagtatttgaaaaaggtcttgaagaaaagtggctaagagacgaaggaaagaagaaggcatagaaagactcttgttcatctagagtctttcaccatctctctatcttttattaaactcagcgttttgtctatttcgagttgtatttaaaggtctttgcctctttagggcaaccttaccaaaaacaatcatcaaaacttataacattaaagttattaattctcttctcatcttgttctccgtcaaaaacggcgcaatagaattagtttactctgtttttactcttgttcttagtatccgttgagtccatatctatcattggtgctttcattttgatgagtgcgatggctcctccggtaaaccaagccgccgcaaacgattctctaccagagtcgaccgaactcagtgacgcgacagctccgccgttgccagaacctccttcggtgacttccttggcgacgcgaatgacagctgctgagaaagagatgctctatctgcgtgacgcagtcacccagatcctccgaaaccagatcttcggcgttcctcgtgaaggccacaacactccgatgggtttttcatcccctgttccgggagtacagtttcctgcttctcaaactccaagtcacgacattcaaaaccacgactttatgtgtgtgggtcaaaacccagagacacagctccggctgcgcgaaactcgttttcgtcctccacccttagaccaaccgcgatttcaggcttctccttcggagcctctccgctttcaggcgtcttcttcggaaccaccgggcttctcaacacccccgtttcaacatcaaccaggcttgcagaccggactacagttccagcaacctgttcccttccagacacctccgttacaacagcagtgtccttcaccacgtcttcgaacagagacaccacaaaggacggtggagttgcctgcttatgagggtggtaacgcagaagattggctctttcgtttggagca

SEQ ID NO: 31621 - DNA, 1776 bp, Arabidopsis thaliana landsberg
  unsure (1)..(1776): unsure at all n locations
aacataagagctggaaaaatgtcaggtaaaaattttcttttggccaacattgctgttgtgtcacatggtgggtagttggacatttatgattagctacaaattttactgtatacagtatactagtcatttttctatgattggtattatatatgcatttatgtgtaacatttaattatgnnnnnnnnnnnnnnnnnnnnnnnnnnnnnnnnnnttaattatacaaaatattagttcagcagtcctttcccgcatgcaaccaacaggtaagactctaatcaattatcagcctcgacgtctcaaatttatcactttatccgtaattaatagttttattttcaactatgtagacgtaaccaaattctactttttcatctgtgaaaaaggtaaaatcgtaattaattgattttttctaaataattttttatatatatttatcggttatattattattactatatcggataacatgttatttcacatgacttctatttataattttgacatgctagtttttttttttttttgtcaattttactaaatttttcgataccaaatctgtgaatcacatattatagttagggagtttttttaagcttactactcaatatataacgtcaaagccaaacgaaaaatttctacactagaaaattactttttacaaaaagaaactaggagtaaaagttgaattcttttatatctgtagttttaaaagtgggcttatacaagccttaattggaaacaatcgaaacgtacatgcgagccacacgtgtgtgtgaaagggggaaagaaagagagacttacacaaatgccgacaagtaagaggctttggcggtagtagtgatatcaagaggaggcaaagtgggaataagcttaatagacacaacctttgtttgctttgcgacaccaagtactgttgcagccgccattgttaggatcaaagccaacactctcatagttaactcaactccttttcttgacccaagctctctctttcctttctccatctccataccattcatgttgttcttgccctcgtgttccattattaggaatcaaacagaagtgaggaagatcaaaataagaagaggaagagtgagagataccaaagattgttctttttgttttttctttaaagtttctcatgctctagatgtgagaagagacatgtatatatatattaaaaaaaaattgaaatagtcttacttaacacacatcaagttgtggatagtaatgatgtttacgtggctttttaagtttatgtggcgcaagagtgaatctcagcttacgaaataaaaacatatatggataatgtatgggaacgaagtgtgaatacgttgtgtatataaaaaaaacgtgtgaatacgttgaaaagttgcgaggaaaacaaatttgtgtaatttttgacttagtgtgttcattgtaggtgtcaaaaaataaggtaacattggtatatgaaacctgatattcgttttgacccaaaaaaaaaactaaaaaaactgatattcgaagtgcatacggataaatatgcgtttggtaatagtatggaatttgttggatatgtgaattcgcacaacatatattgatttctgttaggtcagatattttgatttcggaaacttgttgggctatttaagttactgaaaattcgagtaagtcttgtacgttctaatttttcgagcagatacataaatttgtataagtatttaatctgataattacgaggagtatttgtctttggatgcatcaaataccgatagcaataaggatattggttga

SEQ ID NO: 31622 - DNA, 2612 bp, Arabidopsis thaliana landsberg
gccattgttagcatgctggcagatcctagagaggtagagatgtttctctaacatgaactctcttttataagactatcaccttcttagaagtttttctcatacaaaggttgtttatctgtaggcacgtgcaaacattagagaaatccatttcttaccattcaatcctgtggacaaacgtactgcaataacgtatattgattccgatggaaaatggtatcgtgctaccaaaggtgctcctgaacaggtatgtattcttagcactaccaaactgactctagttgtaaaaatttagtgaatttttttgtactgtttccatgaaagaaataccatcactaatacaactgcactatattataggttctaaacttgtgtcagcagaaaaatgagattgcgcaaagagtttatgccatcattgatagatttgcagaaaaaggtttgaggtctcttgcggttgcttatcaggtaacatcattgtcctctccctttctctcttgagctggttttatcataagtgtacttttgaagaagaacgttatgatgacattaattactccaattcattgcatcatttaaataattgtttctaggaaattccagagaaaagcaacaacagtcctggaggaccatggaggttctgtggtctgttgccactgtttgatcccccaaggcatgatagcggtgaaaccatccttagagctcttagcctgggagtttgcgttaagatgatcactggtaaatcttaacctttagcttggtaggcttggcccgacagagaaacacatatacccttgtgagtaaacggtaaaactctgggaaaatgaatgataagtttggaaccacatgtaggtgatcaattggcgattgcaaaggagacaggcagacgtcttggaatgggaaccaacatgtatccttcttcctctttgttaggccacaacaatgatgagcatgaagccattccagtggatgagctaattgaaatggcagatggatttgctggagttttccctggtcatattcataacacaaccttagtacctacgaaatttaagatttgctctcatttctaatcccaaaatttttttgtctctcatgttacagaacataagtatgagattgtaaagattttacaagaaatgaagcatgtggttggaatgaccggagatggtgtgaatgatgctcctgctctcaaaaaagctgacatcggaatagctgtcgcagatgcaacagatgctgcaagaagttctgctgacatagtactaactgatcccggcttaagtgtaattatcagtgctgtcttgaccagcagagccattttccagcggatgaggaactatacagtaagtactaaagttatagttatactactatcatatgatacctgatagctaaagaaatgaaaaatcatataatataggatatggatttcaagtagcctgaggacattctcaactagcttatgtttttctctgaattaccgactaatcagtacgaatctgcaggtatatgcagtctctatcaccatacgcatagtggtaaggagcttcatgatacatgatctaactcatgttagttaagttacatcaacttacttgaactttctcttcttgtcattgtttcatgcagcttggttttacacttttagcgttgatatgggaatacgacttcccacctttcatggttctgataatcgcaatactcaatgacggtaatctcttaatcaatagcttcatattgatgtaacctaatttttatcactttcaaacgctatgtttatctcctacgcatcagggactatcatgactatttctaaagatcgagttaggccatctcctacacccgagagttggaagctcaaccagatatttgcgacaggaattgtcattggaacatatctagcattggtcaccgtcctgttttactggatcattgtttctaccaccttcttcgaggtatcttcctatcactcaaagtaagttagattttgcttaccgagaagaatgcataccggtgaccaatctttaatggctgcagaaacacttccatgtaaaatcaattgccaacaacagtgaacaagtgtcatccgcgatgtatctccaagtgagcatcatcagtcaggcactcatatttgtaacacgtagtcgaggctggtcattttttgaacgtcccgggactctcctgatttttgccttcattcttgctcaacttgtacgaattccccatacttcgcattttttccatcacagaatgctatatagcacacataggtcgtgatattgacttgtccatttcatgtacacaggcggctacattaattgctgtgtatgccaacatcagctttgctaaaatcaccggcattggatggagatgggcaggtgttatatggttatacagtctgatattttacatacctctagatgttataaagtttgtctttcactacgcattgagtggagaagcttggaatctcgtattggaccgtaaggttggtacatgtcctgtgtctcttgtcctctgcttgttagtcagtctcacacttaaactatgcattttcttgaagatgagaccgccggcttgtcttgcagacagcttttacttacaagaaaaattatggg

SEQ ID NO: 31623 - DNA, 2953 bp, Arabidopsis thaliana landsberg
  unsure (1)..(2953): unsure at all n locations
gctcttctcttcaactttatctcaaaatatctgttgaacaatcatgtagtaaagatcataataacattttcacatttaataaaatcatccatgatattttcatgtctataaagagcatccttaatccatatcatctactccctattcttcagtaatgactaatattagaactctctatactactagctaaaactaaaaattgaagaaaaaacatgagtctcaccaccgacgaaatcgaagtgagagatttcgtggtgaaccaaaagaatggagtgaaaggactcgtcgactttctaaccctaaccacacttccttctccatacattcaacctcctcaagaacgcttcacttccgacaagatcctcctcggatcacctgtcccggtcattgacgtgtccaattggaatgaaccgcacgtggctagagagatctgccatgcagcgtcaaagctcggcttgtttcagatagtgaaccacgggatagctccggctgagttcaagggtgtgattgctgcggcgcgtgggtttttcgagttgccggcggaggagagaagaaggtattggagagggagttcagtgtcggagacggcgtggttgaccacaagtttcaatccttgcatagaaagtgttttggaatggagagatttcctcaagtttgagtatcttcctcaacgacatgacttcgctgccacgtggccttctgtctgcaagtaagtatagttactgtgttactaagtacataattagtgttttgaagtaacaacataagtagtgtttaaaattaataaatgtgtgtagggaacaagtgatagaccatttcaaaaggatcaaaccaatcacagagaggatcttaaacatactcatcaacaatctaaacacaatcatcgatgagtccaataaagaaaccctaatgggaacaatgagaatgaacttcaactactatccgaaatgtcctgagccaagcctggccataggaactggtcgccactcagacatcaacactctcactctcctcctacaagaagatggtgtattaagcagtctttacgcccgagccactgaggatggagacaaatggattcatgtccctccaattccgggagctattgtcgttaatatcggagatgtattacagatattgagcaatgataggtataggagcgtggagcattgtgtggtggtcaataagtattgtagccgggtttccattccggttttctgcggaccggttcatgattcggttattgagccgttaccggaggtgttagataagaacaatgagatggctcggtatagaaagattgtgtattcggactacttgaagtttttttttggaagacctcatgatggaaagaagactattgagtcgataaaattaccatgatatgatttacgaagcttaaatcatcattatctacggctcaaaatcgatgaaataatctctataactctacatattgagttcaatgttatatgaaaatatattcattttacgcaacctttcagcaagtaaagtacccataagtaaatcttaagcgagagtaagagtatttagaatatctaataacacgtccttgttcaatgtaactctgattgaaaagcttttccctgcgttctcaccaccaagacagtgttaagatttcacctgctcccacgttgtaatgtgcaagcgacgtgttgtcctttaagaatccggcttttccacgtaacttctgtttgtttgtaggaaattggatctcgccagatattttctccttcaaacttgccacgttttccgatagcgactgcactgtgatcttaacgactttccaatcatcggggtctggaacagaaaccatgatcgttgaggaaccctgcaaatgtatgttactcctaattagatacagagtacagagtcaagtcagaggggaaaaaataaccggatgttgagcaagaaactggtcttctggaacaaggacagactcgtcaaactctggttcctcagattcccccccaagcggaggcatacgaggctgcagctttgttagtatgttcttgatcgctgaagggtgttgaagtagtggcaaatcttcgtccttgatgtcagcaaagcagccatcaggacccacaaaagcatacaaagcaccaaacagagtacaagcctttgccgctccctccttgtgggtcaactcccgcttttcattttgacgacgaagatggtagaaaaaagccttactaacaatcgccatacgagaactagtcagcttttcggatcgctttagtccttccgaagccacaacagaaagccgattgaaataatcgaacttgctgtcagctggcttcaaaaactcaaactgaggtttgttatccacttccttgatcaaatccaaccaaaattcctccccgtaccgacccacaatctgcgctgtgagaaaaatagtatcaacatcctctatagtatatccttcagggagaacataatctgggaacttgggagccggatcgcttaaaagaaaaggccggcgatagtgttgtgcatcacctttaagggtagctggagcttcaggttcctgagctccttcatcttgattcttagcaaggtattcactaaccttgtgcttgtaatatgcgtgataaggatctgacttcttcagaaagtcgaatttagagggaatctaactaacgttcatgatctttctctctatcctcaaccctttccgggcaaccacacgtgctattttatccatatgaattctcatctctcgaggtggttcagccggagcttcatttgaattgtctttctccaactgcaaatcattctgcaaggagtggacatttttttttacaggaatatatatatatatatatataaaacaaatngaaggtgagattcgtagataaattctgaaaaacaccatgaatataaatcatatgaacatcaaaatcagatctccgaattcatttgcctaaattat

SEQ ID NO: 31624 - DNA, 1392 bp, Arabidopsis thaliana landsberg
taaaacatttcatcagttattgaacttattttgtttataatatcacaaacaaggacttggggttggaaacctttctttatatatctctcctttaactagaagatttttttatctcgcaaaagcaaaacaaagcatatgcttgatcttcttctatttgcttttaaccccaaagaaagtggctttttctctgtcttgatgacccatccatgactcatcctttaccacaaagatctcttatcaacgattcaatgttttgttttcaactgccacttgtttctttgtatttccctttaaataccttcccaccaacacggtttcatcatcaaccctcactcacaatttctctctctctctctctctctctctctctctctcgttctcacaagatcaagaatatcaagaaacaagatcacttctcaatcctcgaagatgacattgagcagagttcatcaacaagttattgcatttcctgctgtcaatactgctccggtgggttacttgcctgatccagcttccatcaacaagcttcaaatcccaacttcttcaaagttttcttttctaacaggcaaaggaaaatcgatgctacgaaagaagaaaaacgatagcttcacaaacggagttagagatcaggacaagttaggaccaaagctaaccgaaacagtcaagagaaaactatccttgggagctaggatccttcaaatgggaggcttagagaagatctatagacgactctttaaggtcagcgatgaagagaaactcttcaaggcgtaccaatgctacctatccacaaccgcaggtcccatcgctggcctactcttcatatcatcaaagaaaattgcattctgcagcgaaagatcgatcaaggtggcttctccacaaggagttctcaatagggttcactacttagtctcaatcccattgagcaagatcaatggagtgaaccagagtcagaacacaaagaagccatctcaaaagtaccttgaaatagtcacaatcgataacttcgacttctggttcatgggattcgtgagctaccagaaagctttcaactgtctcgagaaagcgctaaacaatgatgagcaataaaccgcagtggttttctctgacggagctaattagtgcaggtggaacaagaaatatttcatttctacttttccctgtttcagtcagagaatgtttgtacaaactcacaaattctttttttttgctttacccactttggtttccattgtagacacgagaaagagatgaatatatttagttgatctcatctgttaaccttaattcatagttcttttatgcaccaaactatgtcaaaagaagtgtaatgggatgaatcaagtattaagaaatcagtacattagaatcagagcttacaaatatcgagtgcct

SEQ ID NO: 31625 - DNA, 2674 bp, Arabidopsis thaliana landsberg
ctttcctcttcaaagaacctatagatgggctctcttcatcttcattcgttgattcaaacccttacctagttgctgctttcgctactccttcctctgttctcattggttatggcattgctcgatctggttcttctgctttcaacgagcttcgtactagtgttttctccaaagtagctctccgcaccatacgaaccatctctagaaaagttctctcgcgtttacacgatctcgatcttcgttaccatctaaatagagacacaggtgctttgaacagaatcattgatcgtggaagccgcgctataaacacgattctctcagctatggttttcaacattatgcccacgatcttggagatatcaatggtctcatgtatattagcatacaaatttggagctgtttatgcattgattacttgtctttctgttggatcatatatagcattcacgttggctatgacgcagtggagaatcaagattagaaaagctatgaatgaagctgaaaacgatgctagcaccagagccattgactctctcataaactacgagactgttaagtatttcaacaacgaagattacgaagctcgaaagtacgatcagttacacgaaaattacgaagatgctgcattgcaaagtcggaaaagctttgccttattaaattttggacagagttttatatttagtacagctttgtcaacagcaatggtgttgtgttctcaggggattatgaatggtcagatgacagttggtgatttggtgatggtgaatggtctcctctttcaactgtctcttcctctttactttctcggggttgtttacagcgacaccgttcagggacttgtcgacatgaaatcgatgtttaagtttctagaggagagatctgatatcggagataaagatatagacaggaagctccctcctcttgttctgaaaggtggaagcattagttttgagaacgtacattttagttatctaccggagagaaagattttagatgggatttcatttgaggtaccggcagggaaaagtgtggcgattgtcggtagtagcggaagcggaaaatcgactattcttagaatgatattcaggttctttgatgtagattccggaaatgtaaaaattgatggtcaggatataaaggaagtgagactagagagtcttagaagctccattggagttgtccctcaagatactgtaagttgccattttcactataaattttgctagctcttacattttgttgttatgagtctaaaccggtttttagtatgttagcatatggttacagattggggtttgattattagtactgtatactcttttgtattacaatcacgtttactacataaatcatgaaggaaatgatattgacactgcaaaatgcttcttaattgtaactaaaatctttattttaatatcatggcctttttcatacgttttggtagtttaaaatgtaacatgtcacttttctacaaattgcatgacttcaaagtaacttccatatacaaatttaatatcattatcaggcatatataccaatcataaatattcgtatcattaaccttaattcacatggcaggtgctctttaacgacactatatttcacaacattcactatggaaacctttcagcaacagaggaagaggtgtacaatgcagctcgacgagcagcgattcacgatacgatcatgaaattccctgataaatattcgaccgcggtgggagaaagagggctgatgctgagtggtggagagaaacagagggtggcacttgctcgtgcatttctgaaatcaccagcaatcctattgtgtgacgaagcaacaagtgcactcgacagtaaaaccgaggcagagataatgaaaacgctgaggtcgctagcgagtaacaggacttgcattttcattgcacatagactgaccactgcaatgcaatgtgatgagatattagtaatggagaaaggaaaagtggtggaaaaagggacacacgaagtgttgttggggaaatctggcagatacgctaaattatggacacaacaaaacagtaaattggaggtgtgaattttgtaaaactatgaatcaaaaagccactttgggcctttatatagccttttaagagagtgaaagagcagaaaatatagacaccagaaaaaatttaataaataaaaacgaaaaagatcaagcccaatacacgatcccaattatccaataaacaacgtccacgtagatcccgacaagcgagtcatactcacgcgctgtttcaccgagcgtgaaaaaaacgacggctgatccctttgtttaagacagccaccacctccgaaattaacaagaaggcgaagaaaatcatcaccaccgtcaacttttctcttgcggacaagacgattctccgattatccccaagaggagaatcctcataatcattttctccgattcgattcgtcttccttggtcctggattgcttcatgaatttctaggtgagaattttcgatccttctcctttgccttttggtaatccacagagagatagagacagagaatttatatctttcgagcatagttcggattcgatttggttttgtttttccagcgaagttgatgtttggttggataatgattctctcttgcaggacaacaatggaggctcgtccagttcatagatcaggttcgagagaccacacgcgc

SEQ ID NO: 31626 - DNA, 3269 bp, Arabidopsis thaliana landsberg
  unsure (1)..(3269): unsure at all n locations
gatccagtttgttaaccatcaaacacgcactgaaaacccaccaatccgcagcgtcttccgccacagctacaacgtctaaccaagtggttgaaccaagaaagacttcaccgatctccaccgacgtccataaccaggaagaaacggaagagaagcctctcatccaccgagaaagggccaccgctgcaatgtcggagaagatagcttgccttactcctgctttgtcttgcaaattcataacctaagatgaagaacagaggcagaaaaaactagatctgtaaaaactggaaaaaacttcaaagagagagaaaatgaacagtagcggaacgattgtccaaagtcctccaaaaagagaaatattttaccagtacgaataagtaacatgcattgactagtaagtagtaagtaattagatctgaatgatgactgcattttgcagtgtgggagaaatgtgatgcagtttaaaaagtaacaaaaatacataaatacatatatatgtagagattttgatattgttacagcattgttgcggtgcagttttggatgcggttttggtcaccattcacagcctaagaatcattaaaatcattaaaatagtgtaagagattttgataatcgtggtctggtcggcttcaacttgcataaactccatatttgtaccagcgacacatatgttcgtatcgttttcttgctatcatgttggtacatacactcttgatttctttaatgcaacccaaaaaaaaaatctgactttatatcgttgcaattttttttcatatgaaaacaatgtttaaaaatgaggcccatttctannnnnnnnnnnnnnnnnnnaggcccattaggtgatttaataatcttctccgccgtgttcttccactgcggtggactatcgtcgctatcacacggtgcaggaaaaacaaacggagaaaggtcgatcatctcttgatcatcgtccatggcgcagatccccagcttggagaatgctcctctcaatctgaaatccattaggtgactctattttcattacttagagattgattgatcgtttcttcttctttcctctcacatcatatgtttctcgtttcttattcagggacaagtctgagagggagctcgtaaacttgcttaaagacgtaagtctcattactctatcttttttttttttttgggttgggagacgaaagttaggaaatttcgcggattatatttgatcaaacatatctcttttgagaatgtgaaaataaaaaccaatgctttgtctctcttttactatgaattcttctcttttctatgcaattacttcaccaatgtcgtatgattgagaatcattaggatgaatagacttcggagatgatttaccgatttctcaagacttttttgttttctcttctttttggtgtctttggttgtaggttcgtggaactaagtgtttggttattgatccaaagctcagtggttcagtctcattgatcatcccgacctctaagcttaaggtaatttcgtttttcttttaaaggttgagtttggttttaacattagtggtgatttgattttttgttgttctttgcttaacaggaacttggtttggagttacgacatcttactgcggaaccagttcagactgaatgcacaaaagtgatttatcttgttcgctctcaacttagctttatgaaattcatagcgtctcacattcagaatgatattgcaaaagcgattcagagagactactatgtttactttgttcctcgtaggtctgttgcgtgtgagaaggtatgtggttatttgcgtcctctaatactattgttgctttcgtttgcttgttttattacttttttgaataagggtgataaaaaaaatcattctgctattttcagattcttgagcaagaaaaagtgcataacctggttacagtgaaagagtttcccttgtatatggttccactagatgaggatgttatttcatttgagctcgagctctctgaaaaggtgtgtagaactctcatgagtccaattcttgtaactttatgtgccattttccgtgaggccttaaaatcacagctttcctaattatcttgttcatgattttttaatgataggattgccttgtggatggtgatgttagctccctttggcatatcgcaaaagccatacatgaacttgaggtttaaacattttcgttattctttacatctcgtcatcacaactatcatctcattactaactcttcctatagttctcttttggagttatatcaaaaatgagggcaaagggcaaagcatcagttcgtgttgcagacattctaaaccgcatgcaagtggaggaacctgtcaattcgaatgatgtaaaatacctgcaatagtttgaatgtcataatcaccatttatttcgctatcttgtttttgtatccttctttcactattctaaatgatgtttgatctatatcacgtgggaaggcctgaagtggatacactcattctattggatagagaggtaagattacaatgtgtgtttcctgttatttgtaatccttaaatacaaagatatccttcaaggattgaatgttaaagagttggtgtgatgtaatcattgggaagtctgaattatgttttatatgacacaaacgatggatttggaaatgtgcatataaaggttaagagatatagaaagtggttaaaatcccacttaatctggaattgggactggctgataccttgttaggcggtggttaccttttacttgacatggcgctattagtttcaaattttacgtttctgtttcaggttgacatggttactcctatgtgttcccagttaacttatgagggactaatagacgaggtaattgtcacaaattttggatactgcagttttgactagaagtagcttaagtagattttgcagtcactgcaactggtggactttttactctctgaggaagtgacactgacttcatgtatcatacttttactagtaattatgttgagtgttttcggtttctcttctcgtaagaaagtcttacacaagtgtgagatccagattagcttctgcgggctttttcattatcatgctgagttgatgtacttttctggaatttggggagggaacataatggtgtgaaactatttggtttcattggatgcaatgataaccaacaacaacacaattttgacttaagttatgctggctgattgagttttcctgcgagctgactccaacctttctttaaagattttgcatatcagcaatggagctgtcgaggtcgagtcatctgtga

SEQ ID NO: 31627 - DNA, 4516 bp, Arabidopsis thaliana landsberg
aaatgtagggcgacacaaaataattaaaaatcaagggctttaaataattaaaattcttaatgggtcgtttaccatcaatcaaattaaaataaaaaccaaagtgatcatcaacacaaacagtgttgttatttggcatcggctcgtatcaaaccgtaaacaatcggaccaaaaccaaaccaaaccaaaaatcggtttaaatagtcttcaaaataaaaggaaaacctctagcttcttcgaaggctctgacgtttattgaagtttcatcgcctttaatgttggaccatcattatcaatggcgaggatcatcagaagaccgttaaatttgacggcggccgtccggttccgactttctccgttgtctccattctccggtaactctggttctattaactcggaaacgactagttggtctgagttaattcgagaaccgagtttagtcgagggatgcgattacaagcactggctggttctcatgaagcctcccaatggatacccaactcgaaatcacattgtccaaagctttgtcgaaaccctagccatggctctagggaggtaacactgatcacactcgaaaagtccagtttttaatttaaaaatcgaagctttttggtatatgattgaggttgctttgttgtttgcagcgaagaagaagctaagagatcgatatactctgtatctacaaagtactactatgcatttggctgcaggattcatgaacctttgacttacaagattagatgtaagaacattttgatctcgtcttctttctttggagttttggttcatttgttcatagtttcgtggcaaatgttgaaactttggcttgtattcgattgcagctctgcctgatgttaaatgggttttaccagattcgtttatagtggatggtgacaatagatatggaggtttgttttgctctttcttgtgaaaaactcgtatgttgcaaccattatatctcaaaattttaggattatgtgcttattctcattttgttgggtttctttggtggactagaggagttgtagctcttaaatttagtacctgtagatctttcttttttcttaaaacattcatagttttttttgcaggagagccgtttgtcgatggagaagttgttccgtatgatgagaagtatcatgcggactggctacgagatcaaactgatgaggatgctaaaagcggagtagtcaaaaagaagcataggaggaaaagaaagaagaagttgatttaattggagatattttggtatttggaagtcttcttgcttcagtgtggcattcaagccttgaagattttctggaatgtcttttagtgttactaatataagctgttaataagaatcttaggtgtaatggtagagaattttttttttactcaatcaatcaatcaatccgagatactgagtagattccacatcattgtctacctattgaacttagaagctaacaggaatgtgtctagattaagtgatgatgtaagccagtgccagtagtagatgtagatctgtaatgttttactgatctcatcaaaattggataatcactttggttcatcaaagttctctcaattgcttcagttttcattagtgacataatctgttaggtattgaagtctccattgaaaaagactgatccaccaaatggctgcttcttattgttcgtttgtcaatcaggccatatagaaattcgaggagacgaaagcaaccacagaagagttttcctacacgtctttttgagtggggtttggtaagattgagaagtcttttttcttcatgaccaaggtatgtaatctaatctttggcttcatgtgaaactgttttgtctgaaattgaaacatgcttgcgtatgtacccagatacttaaacattgactaggaataacatgcttaccactgaaattcttagttggtgaactacagtcaatttaggatttgatgtggaatctttgtggtgaaaaaaatccaagtaatactgtcccttttgaacacgcatacaattcagacttatacatctgtggttacaaaattgaaaattgattgctaaatatctatgtagctcactttttaagctacgtttctatcacaacatgtgcagaattttatgaaaccttatggtatcttcatttctctaacacaacttcttcgtatattccctgtatactaacgtatcctaatatctatactatacctgtataaaaattaaataattttgctttttgtgcatcaatttagttggctggattatataaactggttcctagactcttgtatagagcagtgtctgaatatactgcacgagacctcattgccttgtgtttacgtctgttccttcgacctgctcggtgtcgtgggaagacttttgcgtccttctctgtttcctcttttacgactttgacatcatccttacatttgatctcatgaacttcacttacacctgctactggaacaatgtacacaaacggtccgttttggatatctttgaggtctagaataggctctagggttttaaccacagtggtcatagttggtcgtgacttagggttgtggctcaggcactggtaagccaaagcagctgcctttctgatgccttctaccgagtatttcccttcgagactcgggtctatgatccgttcaagcttgttgggatcctttaacatgggtcttgcccattccactaggttcctccctctctgtgcccggtacttctccactgcctttctagctgttagcatctccaaaagcaccaccccaaaactgaacacgtcactcattgtcgtcagattacctgaaattcaccaagaaaacatgtaagctaataatgcaccggctttatgacaagtagccttattgttatgttctttaacctgctgagatgtattctggagctgcatatccttctgtgcccattacacttttggtaaagtttgagtcttcttcctctgatccatctgtggctaagccgaaatctgaaagcttagagctgaagtcctgaaagttttagatattgagattttaagttatttgacatgataacagatatatggaaatgcaaaataggcaccgaagcattcgaattaccgagctcaagaggatgttggaaggcttaaaatctctgtatatgacaggtttctcttgtttgtgaaggaactcaaggcctttcgcagcacctagaagaatcttcactcttgttaaccaaggcaaggctccaccatactctgcattgcaccaaacagtactcatattgttagtaatctgcatctctataacaatcatttttggaccttttgtatggttttggtcttttaaccaactcactttgaaataaatggtcttccagattgcctcgttccatgtactcgtatactagaagcctctcatcatcctcacagcagtatccgaccaaatttaccagatgtggatgcttcaactgaccaaggattataacttcagcctgcagaatctcgaagaaacgtttactattagttttatggttccattcttatataagctgctatataattcttgaaatgtgattcattgatatgcagatggagaagaaatcattaccagccactctctatggccttgtccaccttctcgtttcaaagccttaacagcaacaggctgatctttcaaaccagtcttgaggctatcatcaacgaaacctttgtagacttccccgaaacctccttcaccgaggaaattatactttgagaagccttgtgtgatcgttttgagctcttcgtaggtgaatatgtgaatgtttatgaagaaagagtttgagaagtcgttgagtgagatggttgaattgctgaaatcggacatgtagactctgcttggaacagaggtttgtttggagagaagaagaagtttttcctttggtgggtttgttgttgtagtcttcttctggtttgtgttattgatgcagcttatgggaagacatatattcttccaagaaaatctcattggtttcatctgaaactgaaagaatctctctgtgtttgttttctttcacaagattttgtctatatttgattaatggtttttattttatttttctgaatgaatgaacatatagagattatatatggaaacttctttgaaaaaagggttagtgagaaattggagagagagagaaagagagaggtgatagattggtgaagactccaaaaagtaagtctgcagtcttataaagccatcaaagatggcatttgccactaagcatataatcaaatgaaaaatgttttggttagttataatatagtttcgtaataatttctaagaagaagataggtaaaatgtgttattataacgtgaactagacaattccagatacatatttggatctattagaaaaatctttgactatctcaagccatctcatacttttttgcttactgtactatatcatacacttgtaagttgttaatgaattggttatatatatagaaaataatcattttcttctagaagacatggttgcttctgctaaatatattatgttagttctgtcaaaaat

SEQ ID NO: 31628 - DNA, 903 bp, Arabidopsis thaliana landsberg
ttattagttattaaagcagagacaaagaagcagagtagagaaaattaagacaaagtaagaaacagagaaatgcttagcataaagtcataaacaataagatctggaatcttgagatcaacaagaaacgctctgttagctacgccttttgttacaaacttaaagccagttaaatattgatatacacataattaaggatttaatgaagactttttagtttcaactatgagctatataatctatattgtaattatggaattaattagccttttttaagattccaacatgcacgttactcacatccttttatctcaaacgtttacttctaatatctccatatctcttagaacaatctcatcacttacccttaaaacatctcttttctgtctctatctctcccactcttgtcttgtctcaagaagaaaatggttaatagtaagaagaaagttgccactaaaaaaacctctccttctctcgcaattgccaaaaagaagtcccgtggcaacaaagatgttgtttctgttgaagcaccgattatatcttcatataacgatcggataaggccgttgcttgacactgtggacagactaaggaacctcaatgtcatgagagaagggatccatcttcccaccattgtcgtggttggagaccagtcctcagggaagtcaagtgttcttgaatccttggcaggaatcagtttacctcgaggccaaggaatctgcactagggttcctcttgtcatgaggcttcagcgaagctctagccctgaacctgagatttggcttgagtatagcgacaaagtggttcctacggacgaggaacacatcgctgaagctattcgtgctgcaacagatgtgattgctggtatgttctctttctctctctctaagtgttaagtgtattttg

SEQ ID NO: 31629 - DNA, 1327 bp, Arabidopsis thaliana landsberg
aaactcttgaactagatcctcctgttctgaatctgtgagaaatttagatatatgtttttaggttaacgagttgcttggtctatacgaaaaatgtaagaaataaccatcccttgaagtggaagatacacttcacgccgaagcttaggaagaacaaattggcagcgaaagaaggagactgtaaacacactgaggaccaatattgggagtttcaaactctgagcaatgggttgtgtgaacatccatccagaatcagcgatcaaacagctaatcctctgtttctcttcccctgtttctgaatctgcagactgcaacagtttactcaaacattcacgaaacggagactcacagttccggttgagaagcgttaggagaagtttggtattgttagttcttttctctgtttcggacaagccatctgggatctctaagaaggtgaagagaggatggcttgaagcttttggcgcgttgaagcacgtgtggatcacagtgatggagaaacctcttgagtggaggatcttggcgagctgaatcatggggttgatgcagccttgtaatggaagtggaaacagaatcactcgaaggccattactcttctccattgaagctttcttcttctttcttgtttctcgatccaaatgcaaaaagatctgataaatcagtgaagctatatcacacaagaaatcatttatgttattaatatgagagtggacccctaggccctaactctacgcttctcgatcgatgtgatgataaaaaaaaaaaaaaaaaagataagatccattttctctctctcgagtggaaacaaaattactcagctttacaactaacgaagcactaacaattaacaagtgcaagtgacttagttttatttaatctggtttaacaggtaactaacgtgtatcaaatagtcgcaagtaaatgtttttaaacctgtatccatttgtaaataaacatgaaagtctatgactatgtagcagtaactcgtatgtattaccaataccatatcgtaaaaacaaaatttctcatacatatcacataaaaatgattcacaatatcacaaaagctgctaatgaaactcaagttttcaacccaaaaatattttcgtctactactatcaataatataacaggtttgaaaaatcatgtatcttgctctgtaaagccgcatcaaactttgatacttcagttctttcaaccatgtctctattcgattaataattattgctcaagctcatggacaaatgagtgcaatgattattgtgctctgttcttcctttaatggataaaatttttcaacatctatcaaacaaccaactttttaagaacct

SEQ ID NO: 31630 - DNA, 1682 bp, Arabidopsis thaliana landsberg
  unsure (1)..(1682): unsure at all n locations
ttcctcctatcgttgacctaaatgattgatctgtcttggttattttgtcacacgatttgtatgccaatcatctttggactacaatgcatgttaaggttcgtactaaaaaaaactcagcatgaagaatgttggttcgaggacttaaattctgatctgacgtagctagtctatcgattatctgcctttaaaccaaagctttttggattaaagataggtaatccgtgcgttgaaggtatatcattttcttacccaacaaattcatttaacctcatagtataaatttcgtttggttttgatttttgatagcgacaatatatgccttttcaattaaaagtgaaaagaaaaaaacgcatgccatttacttgtttgagttaagttactcattatggtatatgctcttcaagaaaacaaatcaaatactactttttcgtcacgtatctttctttttcagctcaccaaaatataactttcaaggaatcatatcaaaactttactatttacatggattttgtgcatttgcataatttacgtatacaaatcccaaaggttagcgtttttgccaactatatatatagatactagctagatgattatccagatttacttcttcttttttaataatatatatatcgtatatccattaaatgtgtaaacctttacttctaacagatttagagatctataaaacgtatacactaagaattatttagaaaaactagaagtttgaaataagttattgtctctctaatacaccaatattgcttcttatgttcattacaattttacaaatgtatgcttaccagattacaaaagcatgttgaaaattcgaagttatgataccaatttattagtagcgaatgtaaaaaagactaaacataaattggacgtagtccaccaagatatataatgttataattagcggggtaaaatattgatttaatactggaggcgtaataacatcttgtttcagaattccaacaacgtacgagtaagaaaaacaaaaatacagttctcaacagactaattggacgtaatactctaggccagccaaactgacanagcatatgacaaaaatataaatgatagaattggcaatttcagattttccatcgatcatgttaaatgaacattagttggaaccaaaaacatttttgttttcttgcacatacaacagagctataggttacgttatgactaatgatgttctgatttattgatcaaatcacacatcagttttttcccaacagatatcaatttcattatgtaatgatacatatagtctgatagtattattcgtctgttgagaacaacggctttttgttggatacaagtttttttgtttcgtcaaaacaagtttaattttggacttcatcacttcaataagaaaaagaaaccaactgaaaataaatgcaccgtataaatttagttcaccaaattatataaatgtggaaaagaatctttaaaggttacgccactattgaacatagatcaggaaaatgccgaaagtgaagaagatggcgacttttaacttacaatattagcaatatttttggtcatatcgtattaaaattgatgacctaccatttaaaaatggtggatataacttcttctagcatatgttactctaatgcatgatcaattctgaattctcatacaaatgaaaacacaacggaaacttttcg

SEQ ID NO: 31631 - DNA, 1121 bp, Arabidopsis thaliana landsberg
  unsure (1)..(1121): unsure at all n locations
atcgtgtaggataccatgacaaatcctagttcattgataaccataatcataatatttttctttttgtcagtttggatatataatgtttaaaattcagcattaggatttgttatctttaaaattcagtatgtttgttgtatatatcgcaacttatcgaatcgtatcctccaaagctttatttaatgataccttgacttattgttttatagaaaaactattatagaaaatacaccaactagttgatatacatcattcctatatcttaggtcaaattattaaaatacatatatatatatatatatatatattatgaatctaagttgatcttagaaaattttaagaattttgtagatttttcataagagttttataggttttttagaaaaaagattaagaaattttgaagaaataaaataattttagtttgtcctcagattttcatattactttcgccaagagtagttaaacatatatgtttaaaatttatgtattgtaatagaagacaaaattaatatgtatattacttttggatatgtaaaattttcatttattttttaacatcttagggcttgactggtatgttaagattaccaactgaattataaaataacgaaactactttgtgatagcggtctagagtctttcaaaattattttatattttacgacgttcaggataaatttttaaaaatcacattgttccttctacattttgtaattcagcacaaacttttgacatgaaaaaacagtataacattcaagcccttaatgaaaatttgaaatagctagaccgttttttttgtttgatactgtacatggaattttcagttttattaatatgctaatccattcctaatttcagtgaagcaagccaacatacataaaattaattccctttttaattgtcacctttaaagaattttctttttcgttaaaacaatttttgaaaatcacgtataaacacatgagcacaaggagaaagaacaaaggtagcatctcaattatttggcaaaaaatggcgacgagagcctggaaatggaccatttattttcggcggtttaaggaattacttgagcaattggtagagaactganggttgaattaaaacccataaaaaaaaac

SEQ ID NO: 31632 - DNA, 2197 bp, Arabidopsis thaliana landsberg
  unsure (1)..(2197): unsure at all n locations
gacgttcacaagaaaaatcgcggtcattttgccaaatcatgagaagtccctttaactttgcgattgtatgcaataaaaactcaaataagtatgttggctaaaaaaaaaaaaaattgtatggtatgagaaatttaaactattttgatattgacgttcgtcgttatgtcgtaaaatcaaatcaatatctttacaaaagcattgtgaattaatgaagaaattaacctaattgtttatcaaagaaaaagaaacagcaatacacgaaagtatttgaagttcatacacaaattaaattttgaaaactaatttattagcttaaagccttgaagtactcagcatatattattttatttgttttcttgtagctaggttactgagcctggttcgcgtcttcgcgaggagttgtataagttttaccgaattaaaataggtactgcaggtatataacagatgttaacaaataatattttatatatcatatcatatcacttttggtgaagtcgctctgtctcgggtactatatatagaacaatcaggaagacggaaaaaataacattacacttgaaaaaaatccacaaatataaatgaaaagagagaatcttttgttcttgaagaaaaagagagaagaagatgaagacatggggaagcatgagatcaatattcatgcatgccgacggtgtagattggatgttgatgggattagggttaatcggagccgtcggtgatggcttcatcactcctattctttttttcatcacagccatgctattgaacgacttcggtagtttctctttcaacgatgaaaccttcggtagactttttttttccaatgagtagactgtagacataacaagtggtttctcatgtaatgatgacagagagttgtacaaattccagccaagaaatttaccttaaaatggaaaatcaaaactagacatgaccaagtagtccaagcatggtgggattcttaattaaaacgatcggcttatgactttttcaaaaaataaaaaactatcgtcttacatatatgtccatatgtgtatgttaaatagggatagcaataagagaaatgtgaaaacccaaatattttattacataatcttaaacttcttactataactcaacgtgtagtaagattacgattactatattgccccacatatcaattacattacttaaatatataggaaagagtactaatatagtatcttccttctttttttcacgttgtaactaacagaatgctctagccctgctttatgtggcttgtgcatcttgggtgatatgtttccttggtaagtgtgtttctttcaattttttttttatcaaattaaaatattaatttggtgcacctcaatataacaaattttgtttaattttgtggatgggtttaatatttaaaacagaaggatattgttggacaagaacaggggagagacaagcagcacaaatgagagaaaggtacttaagagcagtgttaagacaagatgtgggttactttgatcttcatgtcacaagcacttctgatattattaccagtgtctctagtgacagcctcgtcattcaagactttctcagtgaaaaggtctaaaactttgcatctttatacatcattttgtttttgaaaacctgtttttgatgatttttttaattcaagcagttaccaaattttctgatgaatgcatctgcgtttgtcgcaagctatatagtgagtttcatcttgatgtggagactgacaatcgtaggcttcccattcatcatcctcctcttggtccctggactaatgtatggacgagccctcgtcagcatctcaagaaagatacacgagcagtacaatgaggctggttctatcgccgaacaggccatctcatcggttcgaactgtctacgcatttggtagtgagaacaaaatgataggaaagttctcaactgcacttagagggtcggtgaagctagggttgagacaagggttagctaaaggaatcaccattgggagcaatggtgtcactcatgctatttgggcattcctaacttggtacggaagtcggctggttatgaaccatggctccaaaggcggtactgtcttcgtagtcattagttgcatcacatatggaggcgtgtaagtaactatgtttaattttcttttgttttcttgacacaaaagaaactatcgnggtgtcttaacccttggtatcttacat

SEQ ID NO: 31633 - DNA, 2292 bp, Arabidopsis thaliana landsberg
aatgagtgtaaatgtaatacattctagcatttgtctcaaagctctcatgaaactttgttgaatcgttttctgtggcattggagaatgcccttatcctttgagttttaaactttggatcgttgatccctcattctctttgtatttggttccttcaatgaatacaagtattttgtacacacaaaaaaactactccctcggtttttatttattcaaaatgttaaaagtcaataaatggatttgtaattttcttaaatattacgtttttcattttcataatgtgcaaatactctaaaagtaaagtgaataaacaattactatagagtatttgatggtataaatcacggtaatcacgcatctcataataatacaaattaatgtttcatacatattaaaagaccaacggtctccctttgtctcacaaacagccaggaagacgtgaacgaacaacataacatgataaaattaaatactctaattgtttcctctttaatataaccgcaagaggagagaaccttttgctcttcaagaaaaggagagaagactgcaagctgtcgtttccctaattaaggtcaaggtttcgtttttgtattttctctgaaatagaaaggaaaagattacgtggagggacaagatgaagagttttggaagcataagatcgatattcatgcacgcggacggtgtagattggatgttgatggcattaggtctaatcggagccgttggtgatggcttcatcactcctattatatttttcatctgcagcaaactactgaacaacgtaggtggctcctcttttgatgatgaaaccttcatgcaaaccgttgccaaggtatttcctctcttcaatttcctctttgttttctgtttatggtctttaagtaaacatgacaaattaacaaaagaaaaacaaaagtatactacaataaaaatggaatattgatacgattattatcgtcacgataaaaatatattcggtcacaataatttttttgtgacgaaactaagttaaattttagaatgtcacaatgaaatcgtcacaaattcctctatgtctcaaaaaggtaacaaacgaatgtgacgattaacaacagtaacaattcatcattgattgtgacgacgttaatatagtcgaaaaaacagacacaattcgtgacagacgatacttccacaactatgccacaactagtgacaataaaatcgtaacatatttgtcacagattattaccatatctaagtcactatcccgtaacattttgtgaccaaaatataatcacaactatgccacaactagtgacaataaaatcgtaatatatttgtgacaaattattaccatatttaagacactgtcccattacattatgtgaccaaaatataatcacaaatccgacacaattggtgacttgataaaagtcacacaaacgtcacagattgattttattttgtgagtgttttcttacagaactcgtattaatttattacaaaactagaaatgtgaacaacacatggacgtttggtcacgaacgtaagattaccattttttggttttattaattgttgtcactatatctacatatacatttttggtagactttttggccaaaaatccctatactatttactaataacatataagtccttacaaattttatctcaaccaaatattcaataactaagaacttacaattcattaacttgcattaaatacttgaaaataactttttcctaaatttttacccttaattaaatctttctttattgaactatattcaattaaggctaattttctcaaatctcttaatcgccattcaatataaatatataattttttgtcactatatatctaatttaatttgactttatatataaaatacatatagttaataaaatattaattgttttttgcatatgatgtaattcaaatttttttaaacagacatataatactcaatcgatgaaaaaaataagtgctgaaggtctcacattgcttaaatattgagaaatcatttagaataatattataaaaaggatcaaaatgattctgaatatgaatgagcaggaaccttgatttatcaaacatccaaaattaaaagtgttattcggtttactccgattttttattttgaataactaaaattttaaagtttcaaaatattatatatatttacactttattaaaagttaagtattacaatttttcacacttttcaaaaagttaaactctataagagttttaaatataaattattttaaacatttatgaagtcttaaatttttataatatttaaactttat

SEQ ID NO: 31634 - DNA, 1151 bp, Arabidopsis thaliana landsberg
tatcaagatattctcaatgtaatcaatctctcgggacgttatgatctgaagagaggcataggagagcgtcttggggaagattatttggaaagaataaagcaacaaggattcatcgatattaaagaaggtactgccatcgctctttggtcttcctgtactgtcccagatcagtactctagtgtctttttatcaattttctggtcttttacaggaaacgctgggtttcgtgttaccgaggagagcttaatggaaaggttaaactctgatatgcatgaagcttgcctcaagattgacaaagaatgcaggtgagatttgctgagttctctctaactcatatcgcatgtttgggattgaaacaaacgatgattgattgtaatggcagggtcttgacggttcatggctcggctgacgaggtaatacccctggaagatgccaaagagtttgcaaagatcataccgaactacaagctggagattgtggaaggagctgatcattgttaacagagacctcgacttaataactttgttcactcagtgattcagactacttttatcttttatgcaacaacattgtattgacatctctctgaatttagtagtatcaaacagaaaatagattccaagtttgtttactggatgagaatataatcagcatcaaagacatctccagcagtaggagagaggttgtttctacggagttgggcatgagtctctgcttcgtgttgaaatatcttaaccacgtcttgtagctccagctttctaacttctacttgttcttctgtaatgggttttttgagccccaagtataccaaaccaaccacaatcagaatagccccaaggagaaccatcagaaaagtgaatagaccaaatgcataaggcgtgttctgcgcccccgggatcccatccacattgatcccaaacagtcctacgatgatggtaagtacaagaccacatcctccgaagacggccaagttgtggcttactctcaagcttttgtcctgaaaatgcaaactggggttttagccaaatggatccattatgctagatttatgagatacaattttaattttgttcggtggagtaagaacctgtaaccaagcgcggacactgctttgcatgacatcttgaattgtgaagagacgtccacgaact

SEQ ID NO: 31635 - DNA, 1753 bp, Arabidopsis thaliana landsberg
gaaaccgagtctcgatgtctcggcaagtgggaaaccttgtcaaattttatctatcctaaccatttggacccatcaagcggggtagactcctttaacgaagaaaaatcaatcctttgttgcgtctgatccggacctttattaacaactggaggagatgctgcaataggtaggtttgatgcaactgaatgcacagtgtagttcgccaaaaggatcatcacataaaccatcaaagtaggtgtctgagagaacacacgttggaaaatccacaacaatgaagcgtgcatttccttcttaacctgcttaagaacacccactctagtctgcaacgcaaagctatgaagctcctcaatcatgaaaaccatagaagaaaaagctctattgatagaacagtaagtagtagcactagctttcttaagagcttcttcttgtaacttcctctttattatcctaagtgatagaggtaaatcaacactgtttgctttacgctcaatacttgaatggttaaccatctctgcccatggagcttccaatgaagctaaacctggaacagactcttgtaatagcttcaaagaaccaaatctatgattattgctatcgttatcgttatctactgcttctgatttctgtttgttctcttcttcttcttcatcgcctgcgtttctgaattgtgaagctaattcctgcattttcacagagaatgcttcgtcggaggagaagaaaccggagctcgcactacaaactcttctcaaaggattatgtttcttcttcacatcagttcttatcttcttcgtggtggaattagaaaattgccaaagctcacatgatttagatcggtgaagtttcccagattgtgttccgagaaacgtcgaaggttttaatctcaaagatcctcctccgacggaaacatcaccgccacgggaacgacggcgttttgatgaagttagggtttgtgaaaacgacggacattgaggaatcgccgtgtgtcgtcctgaccaatgaaacgacgtcgttgttgctactttcacttccattattccgatgaaacgcaaacaaatctcagaatctgtataaatcgagaaaagctatgaagattaagacaaaattgactacgagaaattgaaagatagagagaatgagaatgagaaagagagagagcttacttcttcttggtgattcgaaattcgttcgttgagagagagattttctcgggagaattttttgtatggttgtgaggtcaaatcgaattcagaggcttacgagagctcctgaaatttgttagaaacagagaagaagaagaagaagacaaaagcccttgtatgtttatataccaagagagaaaaattagtaaattatgtaagagcaatgagaaattaatttaccggatataggcggtgaaaaggcgcgtgctattttagagaagagattggttttatttatttattccacgggtagagacggttacaggtgatgaatgataaggattcggctaaactaagcgacgcggtttattcggaaaaattttgctttcatcgcggcttcatcgatcttgatctgacggatgagaatgaatcacgtgttggttgatatagcttcggtttgatctattgccacgtagggggttgaagaatatggagatgggttcacggacctaacgaggacacaaacttgggttttctcgaccttgaccgttatgaaatttgtattttctcgaattattaatgaaaacgaaagtatgaaaagaaaatagcttgtt

SEQ ID NO: 31636 - DNA, 5621 bp, Arabidopsis thaliana landsberg
agattgtgaaaggagctgatcattgttataccaattatcaaagtcaattggttttaacggttatggagttcataaagagtcattgtgaagaaaaaaacgacaagacttgtaattgaccctccaatattgcattggacatttatttatgtttggttgaccaaataaatttataaaaggtaaataaaaatataatacttatataatcatatgataataataagactgtacatagtataccgtgagagctctttgtaaaacatttgagagccgaagtagacatttaacagattcagataacacaaacataagaggaagataataacatttgaagaagcataagtaggtagagttcttataaccaagttcaaggttttatctaatagccttaacggagaatcattgccggtaaggatcaaactggtgttgggacattggatatcggcggctgcggtgctacagcaaagtgcagtcctctgcgttgaggcccaccaccgtgtatcatgaaagtaacttctgcggcagctagagccgctgcttcctgattacaaacaaaagcagtacattgtctcatctgttagattgagtatcttacaatataacagagtttgatacagagagttttttccgtgtacacacctgtctttgtcttcgacgttgtagtataccgatggcccatgccatgatgtaacatgggaggagaaaaccagcagcacgaagaaggaatagctattgaaacaaacaagtgtagtcagtgacggtataaagaagtagtgaaagtaagtaaagatgaacatacagagaagaaggcagttggatcgtcctcgtcgtctgggttcgttgtgagatttagcgcatctcgtaacagtaaaagtgccattagctgccattacagaagttagagtgcaggcatttagtattaaatcatggtaagaaaacatcttctcaactgagagcttacgatgagagcagcagagcgacaaaaggcagctccgcttgagttattctcagaatattcatcatagtctgcttccaagaaatgacgttctgcagccgccattgccagaatgcgcgggtcggtcaagtccaacggaactccgttctcccaatcgtcactgcacacaacacaggtcactcactactttgttaacttgataagttcttcacaaggtattattaattttgttataactggttacagataatccacttgtacaacaattcaacaagtcataactctctatgtttaagcaaatttacccgatgtgaattatagtttcatcaggaggaggaggcggaggtgcagtgtatccatgttgataaggctgttaaaaaaaagagagcattttagttgtaattggtattctcttagtgtcaatagcagttagataagatacaacatttagcagcagagtgatgattaacctggtgacatatttcacaggttatgtcgcctttctcattacaccaacgctgaacacacttgcggtgagcatactgcataaatcaaaactcaataagaaaattttctctaaccaataaaaaacaaagaacaatgagatccaacgtgtttacctttaaactaccattacaagcacaaggagcttcaaggttcttagtactatcttcctcttggcaaatacgacactcaacagattggagaagaggttcttcctcatccgcaaccgcgtagtactctctaggaacctcagtttcattcacagatgaagaagccaagtctgtgccttgaggccggtaagaactttctcctgaagaatctgaatctttctctgagtccaagctctcagatgttatgagacgatcggtacataaactcaaatgatcagccatttcttaaataacttaatcaccaaaatgatatctgtaacaacaagaagaagctccaatatattagaagaccaaaaatcaattaaatgcaggaacgtttgataatttaacaggaaccaaacaaaccctaatcgaaaaaaaatccccaatttcaatagaacgatttgatttccagaatcacaaatgaaaatcattataaagagagctctttcgaaatcaaaacattacctagaaatggttgtgtaacacgaaggagaaaaaaaaagagagctttttcgaaatctggaacctttaagctaaaacgaaactttgtctttgtttttgttgaatttttgtttcttcgtgttcggtctgaataataatcagataaacataattcaactctattaaatatttttgggagcgtgtttttataaaatatctaaaagaaatgtatacatacatacgtgtataagcattggaagaggttcgggtttgtacgaaccagagctttggagtttggtaagataacgtctgtttaacggctagtagagaaagccgcttgttcttctcgtcaattttgacggaaaaatgtgttacagttttttggttttgagtttaaatgtttattaagattgtttcacctaaatctgatacaggaattaattaaaattggtccatatggtaaattattgaagtttcgttggaaaagaatttatgtgacatataataatatacatatttgtttcctttttccaatagagtaggcaaaatggaccaagttggaaaattctagacgttcctaataagtttgactctttgacttttccctcttttttaataacatgcggaaattaaatgaaaccgccttctaatgtttgcatgattgagaatttgatataaccggttaggtttttttttaaacagcaaaatcatgtaaaatcaaggtcgcttatccggtttatataatctcaatatcaacaaagtaagacaattttctcaaagacaaatctgaaacttgcaaaatgacaatagtaactctgataaatcaaggtatatatgtagcttagtattatgatgtttcgtggatacttgattatacgatttgattcatatggttctaatactggtttagaggagttgaaataccgtgggaatgaaccatttatacttttaggatttgtcaaagataatatgtttttgttttggttagaacatgactattcaaatcggtttctaagcatctgaaagaatctcgggtaggctaatgtatttgattgtttgtgcaattttttattgagacagtgctactagatttggccaaaaagggtcatccccatgcccgagaagacgattagaggaggcgtcaaaacgttactaataaacataaggaagaccaacaatcaaatacattagcctaccatgagaatgtatttaatctatagcgggagaagatagccgcgaagaccatgaggaatcaagtcctctattgaagggaaacgagaacgacaacaagatctgctcggagggagatgccaacggcggatggagtgcatgcgagccatggtagcgtgattttaattgtttgtgaaaatcgaaatgatgaatcttgcaacatcgatctccatgtttgtgaataagcatagattttgtatgattggcttagatagacaaacaacaagtagctcctagctacaaacatagatggttactagctagacataagaaagaccaattctcctagctcttatatattaacacaacgtgatacaataacagttacagaatgttaattcatgtacttgcgattctgaatccttgccctgtttgaaatgtaacttcttattccgcattatcacgtgacacgtcacgtgtatgcgtttgtaaaacgttttagcaactaaggttatgaccaggatccacaccaagctgtctacaatagtctctatagtacccaatccttgccttgaccgcacctgaattcccaccgttacattccatcccattgatggctcttatagtggctccaaatccttggttcagcaccggccttacgctattaatccaaaacgacaaacccttcctgaaagctacagttgggttgctacccacaagctcaggctggcgtagaaggtcgagaccgagactctgatgaccacgaccggagtgacctttactctgtgatggacatggtctctgctctacgttctcgtcgcacctaccacgtgaccttttctttatttcttctatgtagcagaagtctatacgacatagagatcacatggaaaaaaaggttatgatttttaatcagcttaagtcaaatgttcagttttacaggtttaatcttaacgtgctctaataaaactattataatcaccatttgataatctcaaataataatgaaacacctcaacccttagacaatctccaatgtaaatctctattttttactttaaaatagagaaaagttttgagaataatttactcatgactagagtagatgtacaaacaaaactaataagtttttaataatatataaaaacatagagaaaaggaaaaaaaaaatcttacgtccggtctcgtgagtgacatgagcaaacatgcttgcaatttcacgtcttgtaacggaacttgcaaagtttggaaaattattagcagcgtcaatgaaagagtcgcgggtgttgaatatttttctcgtgcagccattaccggcttggttgataatgttgttaaagaaaccttgtgtcacaatgctactgactgattcagcagcgcttgtggttccagcgcctatacaaggacctacgaggcaaaggaaaaagactaaggaaattttggtggaagccatgttatgttgtttgtgggtgaaaaagaagaggctgtgtgttatacatatagggataatggttgggtagtttggtcattttatttttgagatatccatcgtttttttttttgtaaataaatgtttttctttatactaatggactttggtattttggtcgttgcagtcacgtggtattttcatcggctatataaagaagactaatttggcgatccggtgaagatgaaactccggcacggtcagctttcttcattacgacgaaagagtagtagtggaagtggttgttacgtggtggcaacctttatctttctttttattatatatattttctttgtttgtttgtcttcttctataagttttcttttaaatgaagttacatgtcatttagctttttatttataaggtagctagaaaattcaaaatagactaaactcgttcgaattattggctcgtccgtgccgacagtattcatgagcgttcattcaactgtccctcggagacagggtcgagaattaccatgcatggttgcccatctgttttttatttctgtcgatcctacctaaaaagagattaaactatgggcctatcctacagtaatgaacaaggaagcttgactgaggttcttctagggttagtttctagtttcttaactggttttaaaagtagtttagtcgattcaaatagtacatcggggatttatccttttatgatagaatatcatttgtaggatctttcctaagctctttaagttgagcttctttcaccaaactttgggctaagtttttacttttatttctatatgtttgagagtaaagcggcattactctttaaataggtttagttggtagttgatacaaatttgggttgtaacctcttatggtaccatctattaataaaatcacttgatgtcaaaagaaactagtatttggaaaagactttggcgccgccttta

SEQ ID NO: 31637 - DNA, 3259 bp, Arabidopsis thaliana landsberg
ttacgatgttagatagttctcgaatcctagattttgcggatttcgcatactttgaacgcttgtaattctcaacaagccttgctttgatcacagatgttgctagattcattagaggatctgatgtagctggtgtttcctgtagtagagtaagtattaaccttagaaaaattgcaataaaaacttgactatgtatccaaaagactttaatttgtgcaatgttcttgatattgataatggttactaccacacctgaattctctgagatcctttgagtgtagctgtgactgtatcaaagtccgagtttatacatcgcagaaaatgatcggaaggattcctcttcttcgggcacgggaaacccgattctgcaaagaacttcattcaaacaaacaaaagcaaaacagagttttcttcactatcaaggcaagaaaataaacaaaagaaattgtgtgttttttgtactgcaagaaaacaaagagtgtagggctttacctcaacagcagacttggcttcaccaaagtagacagactcaccactcgaaagcaagaaaagatcatcgaacagcgcaaaaacctcgctgctgggctgatgaaccgaggagattacggttctgccatcgcgtgcaatgttcctaagcgcctgaataacgaaaaacgcagaagcactgtccaaaccactagtgggttcgtcgagaaaaaggatttgaggacgagtgaggatctccaaagcaatgctgacacgtttcctctcaccgccactaactcctctggcgtgccagtttccaatgactctgtctgaacagtcttgaagaccaagctccatgattgtgccttccacgatgtcactcacttcctctttagacatatcacttggaagtctcaagtgagctgagtatgttattgtctccctcactgttagtgtccccaacaatacgtcctcttgtgtcacatatgcctatatatatagtcacaaaatgcatacacttcaagagcaatcaatgtaaatacctagtcataaaaactttaggtttttgttattttgaatgtaatgttttattgttatacatacatgggctataaatatatttttaatgtgccaatattatcacacatttataagaaaataatgtatagatctttgacctttgcaccactatgtacttaggacggagctgtctaaaatttgttgccataaatgaaaattgataatgtttcgccaccacaagtgacaagccacaaggacgttactattatatattgaactaacaaattagctgcatgttgtgaaattgtgggtagaaatattaacgaggaaacttactacgagaccgtagtctaatctagctttcttgccgttcagtagaagattaccggtcatgaccacgtttcttgcgagtctacctgtggataattcgggaaactttattttattaatggattacaaattttatctatgatgtgaaaaaaaaaacagtagtataaaattgctttctgtttgtattgggatgtggaaatgaagacaaatatcagaaaaggcagctccagaaatcaattttgcatttatgaggaaattttctgcagtacttttctgccattccttgcatgcaatgcacccgaagtaacaatacatatagaattatagatactattcaataatcaaactttccagtatatatatcataaggatgatcgtaacaactagaaaaaaacaaaacaaagggctttataagttatactttaactagcaggttaaagatgatctaaaacatagttacaaataatattatcaaacaaatatagtagttacatcaaactatttttacagtagatatgtgttatgcatgcaggctgcagcagttaaatcatataactgcaagaacgaacctgcaagagagtcaagaagagtggactttccggatccggaaggacccattatagccatgatccgacccggttctgcataaccgtttagcctttggagcaaccttctggttggaccatcactgaaattgggtattaccaccgtcaagtcttcccacgccaaatacgctccacggctcatctccaactttgacggcagctgcctccggccactactcgagccctccagttccatttgtttttagttttgtctctctaactagctataacaatgctatagagagaaagagagattttaatgttttgtttgtttctttttcgttggtcggagagtgaatagtaagaaggaacagaagaaacaaaacaataaaaaaggatttataagcttttgcaatcaccaaacaactaaattcattaatggactgtctttaatacggcaacatttacaagtgcgcatgtatatctacaattttgaggagtaaaatgtcaatgctagttatctacgatataatattagtatttttctcaatagtaaatgcgtatagagatggagatagatcgatggcacgcgtattaatatacgtacaatgcgcttttattggcttatgatgggtatgtaatagtcgtatatgtagatcctattcatatagtcgtgtagattgagattacattttgaaattagttttgcaactaattgtgacattaaattttgtaatcgtcggacaaaaactctaaactctcatagcaaaataagagaacctctgcagtctgcatcctcaaatattaaatcagttaactgagttaaacctctttttcaaaataaaaataaaaatcagttaagtgagttgattagccactaaaattgaagcaagtctacgaaatctgacatgtttttaaacgcgaaaatgatgcagctttatacaaaaaaagtaaagaaatgtttcatttttcatttaattaagaaaatgagcagcttggattctgcaacagacatgagctgctttggaatcattgcttgtgccttatagaatttgtttcgggtaagctgctttggcttgtttgtagtaggtgtttttgctgttttgatgtttttttggtttagggttttagacccggtgatgtctttgttttcaccggctttttatttcaaaaacgtatttttcaagattgttaaggaaaatttcagatgacaaacgaaaaaaaatcaaacagagagtcacgggtcttaaattaaatgcgagatcgtagttgaagcccatatgcttatctacggttacacattcattcttgctttataatagtatgcttctccatttattatgctctaactttgttatggcataactttatttatcatatgatatatgacagggaattttaaa

SEQ ID NO: 31638 - DNA, 1903 bp, Arabidopsis thaliana landsberg
  unsure (1)..(1903): unsure at all n locations
tcactatcaacatttacgaaaacaccttcttgagcagtttatttaaatctcccaaagactttccatttccattgaaaatacacctattcatttcatccacaccgaagacatggtcaaaaactacacatcaacaggagaccaaataaaaaaatattcaaactttattattggggataaagaatcgtactttgtgggatcgaaaccagcaagaagagcaagcctgagctcatttccactaaccaacacagcaccacagcccaaactcctcaaatgctccaaaatcttgagattgttattagctttaatagcgtaaccaataacagatctcactccttccaaagcctctttataagcctcaaggtttctcgtgatctgaggtttgctatataagtaaaagggtcgtttctcgactgtttccatgatatcttgaaccttggttccttcgcaatagagaaacccatctgatgatttcttgaaacagtggtcgaaagaggaagcagattctttcgtgagggttttggtggagttttgggaaacggcggctttgacggagaggcgtttgagtggcttcaatgttgacttgagagacaaaaatgggattcttgagagtgaagtctgattcaattggtactgatttagggttccgcggattgatgaaggttgggagagaaattgagtaactgccgccatggctggaggatttttgttaggtgtgcgactgttacagtaacactgaagggtttagaaaaaaaaagtcaacaagtttaagagtagttcctgtcgggtccggttttagatatccgacaatatcgaaccggtggttatagtcgaaccgatggttaaaagaagaaagaacaaagtcgattttaacttcttttggatatggtttttgtccttgggggatagtttctgctagtgtttgttttgttcggttgtgttagttgtgtgttgtaataatcttgatgcttaaggggtcacctaaagccgtcatggaaatctagccctatctataaaaatttgccatttctcatcacctaccaatacttctatttgttcgtattatgcggatattcagaggataatgtaaaacattttgttgaatgctaacgatgaagtgctctatctagccgtgcacgttgtggagaagttatgttttagaatccacatttgttgaagttatgcttatcatactctcttaattatctatatctattacaaagagcaaggaatgttcttagttaggatttgttttgtttggcaaccattgcttctggttatttgtgctctgcctcctttgtaagttaggatttggtttattcttacaactntgcttctctcgtcatactatataatctctgactatgtatgtaattgcattcatgtcgatggttgtgggatgtatatttaggtgtttgactgtaagacgttaaaaacaaactttaccataagttattgggatgtctagacacttttatggtttggtgaagtaggctcaatgttttgccctttatgtttccattgttgatgtttatgtaccttgctggttggaaccacttgtggatgtttccgacaatgcttctctgtaatgcagttatcttttaatgaaatgtgatcgatcttgagtgttatttatttttatttttttaaagactttatggtgtggacacttgaccgggtgataattggtaactatactacatagttagagagctcttgaattattaatcacgctaaatcttgggaattgagagctcggcagcaaaggttattaacaaaattcaaagcagagcaccattgccgatgaaataattattgacttgggatttactctcttaagtttgaaccaaatcgagattattctaattatatttttaatttccgatcccctaatctattaatacct

SEQ ID NO: 31639 - DNA, 11832 bp, Arabidopsis thaliana landsberg
  unsure (1)..(11832): unsure at all n locations
gtttaacgaaaaaccacaaatacaatacacaaattcaagaacgttcttatactaaaaatttccacaggacttgtatatttgtgtaaagcttcatcgataagaggcaaaaaacaagaaggcgttatattatacagattgagatctgttttttttttctttttttttccggtaattacttttactctcttccaaaaatgtaataataatagaaaagaaaaaaactcacttcaccatcatcacagtcgcaggaaaannnnnnnnnnnnnnnnnnnnnnataatcagactagccggatgggttaagcaatgatgaaatgaggaatgaggagtgtgtgtgtgaagggaccaagtagaggcttcatgcttccagagattcgagtcatttttgttgaagcaaaaaacaatggttcacgagtacttcttcttgctaatctcccagatacgatttaccagatctgctttcaactcctctggaatctgtgatttcaaacttgatttcacatcttcaatcaacctccttctgcacaaaggtccaaccatccaaaacatgaatttaaatatgacgattataatgaagcatgaagccaaaagaggtccaaatgcaatatatgcagattctagctattatactcaagtaagaggaagagaatgtatgagaagatcatagggaacaggaataattcgtgcttcacttacttcaagtcgctaccatcttctccacctgattgctctgtacgcaatctcttcttggcatgcatggagatgagaaccttgtcataccatccgcatgaacgtagatgtgacagcgcgtcttttttcaggctgtggaaatgtgcaacacaatcaattataggttagctatggcgtcagaatataatagcgagtatttagcaaaggcacaaaaccgaagttacctctcttttattgcttcaagttcattccgagatgattcgtcttttctcagcaaaatgcaggggtcttcctttgttgaagaacacaagcctttggattgggtggtactaacaccgttcctctcagtttcggggtgagcagttccattttgtgagccattacttccacatggatgtaagttatccttgtggtgatcacccccattgctggagccattactccgctcatgaggatgcaatgccactttatgattactactacctggtgcactgccgttttctttaactccattgccaccattttcagtaccaaactttctctccgtaccagagttaactttagtcggcaaaactgatacactattctctttgtttgcctttggagctatgttctcatcttggtggaaagaaagtctaccattgacaggagagacccttttggcaccaaggttgacagatatactgactttcgcatgtggccttaaaggcgccttttcaactttggaagaaagcaggttatcctctagtggggcctgctcggctcgtggtttgggcctaataaatttatggggctttgaagaagccaggttacccttctggaaggactgctcggcttgaggtttcatgttgaaaccattaaggggcccaataaacttctggggatttgatgtctcacagccattaacttcatgagatgtagtcccattggatgttaccagagttttagcagacgctggcctctggtttgaacggctgaaaaacaggatataagctttctctgataaaacctcctgcaaggtggagagcgagacaaacgaatcattgcagcaataccatcgacccaaggaatcctacacaagacagttaagatatcagcaagtagttcgagagttcaagttgcttgaaaattaaaaaaggacataaaagaaccttaacgtatgcataatagtgcccagattcaggagaaaatcctgagtgcacaattatcccaaagagcttgtattccggttgagggtcctgcagtttttaatagagtaaaccaataagcaaaaagtaggaattgggaagtacagttacatagagcaagaaaattttcacaagctagagcactatgatgattcaataggtagatgcagggactaataatcatattgaatttcatgtaagagaacttggaagcaataaatcaaaatatttaacagcctatgacaaaacatgatatagactagaagcataatatcaaacttagctgcttgaccaaacttgtctcaaccttaacttttttttttccaacttgtctcattcttaactaatcagatataatcaaagcaatacttgaaagtgatgtcagacttctgcctcaataattcaaaggataaaacttagccaacctaaaaactatgaacgttgcaaattcattcgatattctatatgcaaatcatgtcaaaaggcttaatcaggttgaaaatccagttaaacgctgcagtaaactattcatcctgcactaaaacccctaacattctgatatgcatctaactggatatgtagaaccattgcacaactaacagaaactggcaacacacttaaagttaagttgaaagtgtcagaatcttgtaccttgcttgctttactcatgaagttcgagagaaccagaatctcaccaaatgaaatggctttatcaatcttcccaccaaaaatgcccccaaacctctgcaaatccattaaaattattatataactaaaataattgccaccttttgtaaacagaacatgatacacttactttcaattggataacaaggatattaggcgcttgcagtatagacatctgcttcctcgccgtcaccagtttttcacagctaaatcaaattgaaaatttcagttaaaaacagaaccacaaaaactgaaagaaagacaaactagaagagaaatcacttacgactcgcatctatacttattgttgccatctaaaatctctgattgaaagaacttttgcaatgactccttcacagagctactctgcaaaatctcaagactgatatccataatctcatcggctttattagactccgcaccacaagacaaacacttgacctggctctgcaaagcaccaccaaaaatctccttcacgacactattgccattaaagggctcgttaccgttgtatcgcaacttcttgagtctgagagacgtattgtggcatgcatcaatgacatagcgcaagaactcatgagcatcctcttgacgaccaagcttaaaatgctcagcaaaaattttgagacagcttgaaatcttgttaggcgcatcggtagttagatccacactaagagaccttgctattcttttctcaactatgcaaaatggacaatcccttttcctctctccatccacatatgtgtcgcctatcaaaatctcgaacagagagaacaccaatcaaaagcgtcagagatacaaaacaacaagtgtatctataagaaactataattccagaccctattagaagctaatgatcaacttccaattgaaaaaagtttcgataaccctaaagtgtgaaaggaggaggagaaaacgtacagtgagaggagtgtttgtgagtaaggcagaaattagcgagaggaggagtgaaagtgagacactgaaggacactattgaggtaacaggtgttgccgagattccgtaaccctaagggaggaccattcctacgcttttgactcagtagactcggcatccagctcatctgcagtttaaatcccattcaaaatcggttattctccgccggagaaaaccaaccaagcaaccgctcatcgctgactcgccgccgcggccaagccaacagctgcgatcgcatcttttgtcaccacgcgttttcctcgcttttctctttctcttctaattcacgttttgggggcttcctccaatcaatttgtagtcgaaattaaaggaagattttcacgaatttgaaagagttggggaaggaagaagatgaagatcgaattcgatgaaggtaactgccgagggaagagacccgcccagcaacaaaccccacaatcccttcgcgatgtttatttaccctcgtcccattttttattttaaaaaaaatataatttccaggtaggtaaacaaaaaaggaaataccgttactgggctttttaggcccatcttttatgccaataggaaaagtcgatacacgagttatgtacgtgtagccatatttttttaattattaaatttaagctgatgatattcagaaaatatttacttcttggaaaggacaaaaataaaactaaatttactctttttttttctttctctgccttatgtggatgataaattttcggataataacctacaaaatgtgaataaaatttatgagaattgaacaaattgattcatcttttttttttcctttccctggtacagagtttgttgtataagttatataattcggacggtacaaatgagaaaacaaacaatcaaagattacctcaaagactgatgatgagaaactacattttctcggacatcatcatctctctgtattagtattaccttgtgacaccaacggtattgattcagcatctcctggagtttctgtggtaacaactttggatgcttccttcttcagcttatggttgttataagccgctacaccggcaatagctgtgtgtgaacacagagcacactgtatgagaagcaaatttttttcttgttagccaatttgtatgtgagaagttttgtcttaccgatggcgtaaccgaaaagattgatgattgtgagtttcgtgtcggcaaagagaagagctgacaccaagacaaccacccaatccttgacaacgccagcaactcggatagtgagagcactcgtgtgagaaatcaccaagaaaaccgacaagttgagggcaaatgtacagagggaattaagggtcaacactacaaagtggaagttccatgggccattgccatctatcttcgatttctctagaaagatccacggcacaaacaagcagatagcactgcaaaggaggtacaaaaagataaaagtaacccttaggcttaaataatgagagaaatgagatggcttcctcttcttcgattttacttacctgcatgggctcacgtagtacataagagagattgggtttaacttgatgcccttcctcttgacaagaagttccatgaagattagcctcagggcttctccaacaacaccacccatttggtaaaccactccaatccagttgatgtttaattccccataagaagctactaaaacaccaaaacttatgatagacattatcaaaagcatcctgcagctcatcatttcaagtccagcagctactccaagaataaacacagcaacaggcactgcaagtatggttgaagaatactgtacattgttagtcagatataagaagtaaacataagacttatgaggaaccaagagcatgaacagtttcttacttatagccttcaacatctgcgcaaatgcaactgatatgtagaggtaggcagtgtttcccaaccagagggtcattgcaaacattgcacctattggaataactgacgtaacatatctgagtacataaagtgagttaatactgctacattgataaaattagtaaagatatttatgttatgggtattttcgactactccaaaatcaaattccttacgaagtctctttcttccttacatttctagtgtcattccttcctcgaccttcacaatcttcatggagaaataaatagagaacagagaagggaccaaaagttaggcagtctttacttgtgaacaaaaacagaaagaacattaattgcaagattaccttaagaactttggtaagaagaaagcacaagacagaggaaaagatcatatggagtaaagtcaatccaagaggataagggaaattaatttccttagatgacaaaacccactgcagcagagcaattcaaagacaaaaacgttagtcatgacgaaaagagagaaaccacaatctatgaatcgttacttgctacagattgtaaaacggtgaactctgatgcataagcaataacagagaggtcaaaagcaaacacaacacgatcaaacaaaagcaaacggatgttgaattctacacaaccgagggattctaaaatctgctagtcaacttcctagaaactagcacagtacattgcacataccagctcaattccttacgaaaactagcgatcggtttctacaaatcgaaagagcacaaaacaatacgatgcgagaacatagatccagggaaatatagattgtgagatttaaggtaaaccttattgaagaagatttgaccactagaaagagcgatatagagaagaatgtaagcataggtcacgaattcagctctcataaagcctttgctccgatccgccattgaaaccgattattatgatctcagattacggaataaaagttgtcgcttctggtttttatgtaacacttttccgagagctttttgtttcttttccaatcgtcttctccttcactgagtatttcactttcccatcttctcaaatttcaacaacagctaaataagagcgacggtgacgactttaagtgggtcccactttttattatcctctctcattttatgggcttttctcacatttaaagcccaaatactgttgggtttataagctattgttatgtttcgtcaagcccatgaatttggttctacctcgcacacttttttttgtttcagtttcatcatccacccttggatatatgtccaatgaaaagaaatgaaaattattaagtattttttctcgagattgtgaacgataatatgaaagaaatgtaaggaacacacaagttgcttgtggattagaccacaacccatctgatatttgtccgcatctccacaaccattcttcacctccaacttctcatccatattataatccaacttgccaataattttttcaactgttacagattactacatcaacgaaatattaaacatttaaccatatataaaagttggatatatatgatataagcttttcttagcagtcccacccttcctctctcgagagagctccattccaatcaaagctgtgtaagattctgtgttctagaccaaacagagacgcgtctgtgttctggagattataaacatatgtctgataatcacaactgataactaactcggggttttttgctcttttgacagaaacacacttcagaagatggagatcactaacgttaccgagtatgatgcaatcgcaaaggcgaagttgcctaagatggtatatgactactatgcatctggtgcagaagatcaatggactcttcaagagaacagaaacgcttttgcaagaatcctgtgagtttttcttttcttaataagataagatacactttttgttattggttttcacaagagaactgagtttgatgtacataacttgggatgttttaacagcttccggcctcggattttgattgatgtgaacaaaattgatatggcgactaccgtcttggggttcaagatctcgatgccgatcatggttgctcctactgcctttcaaaagatggctcaccctgatggtaaaagacgtttttcttttttcctgaaacagtcatttctagagagttaaaacttgttttagtatcactagagacaaagactgaggcttactctaatggaaactaatgcaggggaatatgctacggctagagctgcgtctgctgctggaaccatcatggtatgttattatattcaaaagaagattttaaccgtcttggtgttcatagctgcttaatccaccaatccatgcataaccaagtttctggtttgagttattttcttccatgatgtttcagacactatcttcatgggctacttcaagtgttgaagaagttgcttccacagggccaggaatccgattcttccagctctatgtaagttgcttgatgaacaattctgatatacctgtggtcacacgtgatggttcacacgttatgattgttctgagtaggtatacaagaacaggaaggtggttgagcagctcgtgagaagagccgagaaagctgggttcaaagccattgctctcactgtagacaccccaaggctaggtcgcagagagtctgatatcaagaacaggtaaagccacatcaattgaaatgtgataagagttgattagactcgaatatgcaaacatatagctaaacaattatagagtaacgatgtgtgttcttctactacagattcactttgcctccaaacctgacattgaagaactttgaaggtcttgaccttggaaagatggacgaggcaagcatcgatcagatagtatccattacttaagtctgaatagtgtcaatgatccacttaaaaactagctttaaagcatacggtttgtttcctgattatgttcctaaacttgttatgtttccacctgcaggccaatgactctggcttggcttcgtatgttgctggtcaaattgaccgtaccttgagctggaaggtaagagaatacaacaaattttcagataccacagcaaaaccaaaaacttgattcagattgctctaactttcatctacaaaaacaggatatccagtggctccaaacaatcaccaacatgccaattcttgtcaagggtgttcttacaggagaggatggtgagtttccatttgccaaacaaataatttcaacactctagtgtcatagaaatacctgacaaggtcaactattattgtccccatgcagcaaggatagcgattcaagctggagcagcagggatcattgtgtcaaatcatggagctcgccagcttgattatgtcccagcaacaatctcagcccttgaagaggtagatcattctcgactacaaacataaatctgtgttctcgataagtatttatgtacaagcacattagctttgttctcttgtgttcaggttgtcaaagcaacacaaggacgagttcctgtcttcttggatggtggtgttcgacgtggcactgatgtcttcaaggcacttgcacttggagcctctggaatatttgtaagcatcacatcatatatccattcaccagaaagttgcttaaaaacagtaaatatttaaaatgccttctcaatctcagattggaagaccagtggtttttgcactagctgctgaaggagaagccggagtcaaaaaggtgcttcaaatgttgcgtgatgagttcgagctaaccatggcactaagtgggtgccggtcactcagtgaaatcacccgtaaccacattgtcacggaatgggacactccacgccatttgcccaggttatagagaagaaaaaaaaaacagagaacagaaacaacacgggaccaaaacgtattcatattctgattgatcactttgcttctactctgctatatttatatctcgaaaaacttgtttctccctatatcggatcacaaaaacgtgcgtagagattctctgtaatgctatttggctacattttacctttccgtttattcttattgcttgtacaatagatgttgattcctacaataccaatgaatactaaaatctgttcccggaaaactagtatagtcagaaaatcttacattgcacccaacttccacaatccaaacacagttcaaatcttatattaacagcagccaaaacctcacagaaactagctaccaaaagagcacaaaagaatactataggagaactcagattaaggaaagacaggtttgtgagatttacaataccttattgaagaagaatgtaagcgaattcatccttcactttgtgctgggctaagtattgcatcgaaaagcccaaaataatttggctcacgaattcgaaactcttggatttatgcacttttctgaaaaaaaaagaaaaacgattggtttacgaattactactatttttctacgagattaagaacgataatatgtaagaaaaatctaagacacacaccatccatcagatttttgtccgtatctcctcatcaattcttcacctccagcttctcatccatatttctttctttccaatgcaaacaagttttcaactgttaaaagataaaccaaaaactcacaagccaattaatctatcagaaatatttaacttttaaccaaataaaaacgttgagatatatataatataagcgttccttaccactcacacacttcatctctccccagagctctattcccatcaaggtgtgtgagattctctgctaagacaaaccaaaaaccagattgttttgcgttcatggacatgttcctctctggagattagaatcgtagctatgactatgtctgaatttcacaagaggtagctaactcaggcctttttgctcttttgacagaaacacacttcggaagatggagatcactaacgttaccgagtatgatgcaatcgcaaagcagaagctgcctaagatggtgtacgactactatgcatctggtgcagaagaccaatggactcttcaagagaacagaaacgcttttgcaaggatcctgtgagtttttcttttcttttcgtaagacaagaaatactgtttgttattggtttttacaataggtgtgatgcataccttgggctgtttaatagctttcggcctcggattctgattgatgtgagcaagattgacatgacaaccaccgtcttggggttcaagatctcgatgcccatcatggttgctccaactgccatgcaaaagatggctcaccctgatggtaaatactgagttatgtagagactagagagtgaaaacttgttttagtatcgctagagacaaagactaaggcttgttctaacgactctgtttgaaactaatgtaggggaatatgctactgctagagctgcatctgcagctggaactatcatggtatgttcttatatcattacgaaatatatcatatagagcaagatttcttctaaccttcttggtttccggtgtttggagcttttaaatccgtggcccatgcatacccatgtctctggtttaagttattttcatccatgatgtttcagacactatcttcatgggctacttccagcgttgaagaagttgcctctacagggccagggatccgattcttccagctctatgtaagttatctcaagagcttgttgtacatcctgaaaaccccggtcacacttgatggttcttatgttataatctttgagtaggtatacaagaacaggaatgtggttgagcagctcgtgagaagagctgagagggctgggttcaaagccattgctctcactgtagacaccccaaggctaggccgcagagagtctgatatcaagaacaggtaaagccaagtcatttgaaatatgacaagagtttaatggattttaatacgtaaacacagctagaaagtgtaacgttcttctactacagattcactttgcctccaaacctgacattgaagaactttgaaggacttgacctcggaaagatggacgaggcaagcatctatcagatactatccagtcctataatctaaatatgattctcacaaagcaagtcttaaagcacacttgctatgtttacctttcctgagtgttcctgagcttgttctgttttcacctttaggccaatgactctggcttggcttcatatgttgctggtcaaattgaccgtaccttaagctggaaggtaaacagagtagtttaacagataaacaacaaaccgagaagttagtagaaacttgattgttgactcgttgtcacttcattttcacgaacaggatgtccagtggctccagacaatcaccaagttgcccattcttgtcaaaggtgttcttacaggagaggatggtgagttaccatctgacaaacaaatggctccttccctttagtttgattgttgtgcacantaacagngacacctagtaattatcctcgtacagcaaggatagcgattcaagctggtgcagccgaaatcaatg

SEQ ID NO: 31640 - DNA, 973 bp, Arabidopsis thaliana landsberg
  unsure (1)..(973): unsure at all n locations
ttattggcttgaaatgattagatccaactaatttccaaccaaagacggtcaaagccaaataaaaatgcttagctctccatgagcaccaagagaaacccatccaaatggttcagacaatcgtggaccccacgcgccgcttctcttctctccccacttgctattctctctctctaattaatttttaactttgattagttttggtcaactttatagttaaccatggttaactaataaaatatttatttttgtccaagattaattaatgaataagtgattatataggtatatgtgttagcctaagtttttttcttcaaaatagctttgtttatacacgttatttttttttgttgcaaggcttacatcttaatttaggaaactgatatgattgctatatataaggcctgagtgtacaaaatattaattaagtttaaataaattaaggcaaggcaatgatggtggagaatgttttgaaagacagaaaagaggaagcatcttaatgaaacccacaagataaccccaaccacatattatcatgatggcttcattcatcttaattaaactttaaactttcattttcggaaaattttaacttattataccaattagatacacccactcacatacatctccttcccaatttctcacgctcctagaatatgcgtggagactacttcgtaggctacttgatacaatcataacaatgattgctactttggaactttgaatttatctagttaaaccaatcaactatgagaagaagtgagcggtttaaatgggggtgtatatgttcaaaaaaagagagaagggaattcataccttgaaataattaataatacttttctagtcaaatatttgtatggatcgtaaacatatacaaacatggtacanacaagtttttttgtaccataattatcgactaaatactaacataatatttattttattataatatcctatactatataagttataa

SEQ ID NO: 31641 - DNA, 951 bp, Arabidopsis thaliana landsberg
aaattatggatggagtttaaaagtcatcaaagcaataacactagaatatactaagaatataataatccattaacgaataaatgtggaatctgaaaagtttttaaattaaaaattcatcaaccaataacaccttcttagcagcaaaactcaaaagttaggcgatcgaatttgattttgtctcaacttagcctgagaattcaaattatttttctatgattttgtcccttaaattataactgatctacttcatatagactattataactaaaatcatttctagtcaataatagaagatgctacgaacaaaagcacttaattttgaaacctttaataaaatacatagtgtaacgaattctatatacttatctattagatcaccaaaacttaattcaacggtaaaaataaagtccataaatttatttgagatattgaagaggtaagaaaatattatttgataaatatatcacaacaattattttgttaaatattacataaataaaatgatacacgaatattatcgaaaatagtcaaatatccaaaatagataatagagatagatcttttcaacttcatttccttgcatgatggtcaaaattgatattttgttacatgtatcaagacttccagtttacaaaggtgaatttgaactaaaataaatatgaaaatcaaagaagaaataagtataatctagtaacacaatataaataaagggttttgtgcaaaaaaaactgaaattgtatattgttgcagctttacccttcacgttaaaaaaatgcaaataatcctataaattttaaaaataatgcgaaatatagccatttttttgcaaatttacatatattgtaaatattttcatgatcacatacatttgtttttgaattagactcttccaatatagcaatctattgaagaaataagtattatttatcaaaaaattgaaaatttgacaat

SEQ ID NO: 31642 - DNA, 177 bp, Arabidopsis thaliana landsberg
tgcaccactttgaccactattagtagataaaatgatttcttttacttctgaatcccaaacaattcgattcggagtcagtacacaaagaggtaaggtcatttcttcaatttactctccatttctaagttcgtagccttcgcaggagcttcatcgatgttacccactaacataaaggcc

SEQ ID NO: 31643 - DNA, 4692 bp, Arabidopsis thaliana landsberg
ctgtcctcatagtattgctgcaacaagaatatcaacaagcattatctgttagaagatgcatttcataaaatcacaaggaaactatcgaacagattcataccgttgcatccatctcttcatcatctgctgccactgccttctgggagcttgctttaggtgcctgcatcaatagaatcaaatctcaataactacgaaaactggatatctgaatcaaatctgctaccaagaggattcaataatctatgatgacatccccagaatatagagaatgttaggaatcataagaaagctaagaagagtgctcacttgtttagccttttcagctttctcttcgtcctttcgtctcttctcttcctctttctgcttcattttctgttccttcttcaaagcactacaaaagaattcaacgcatccgctacaatcaaatcccgtacgaaggaagatacacagaaatcggagagtaatataataacatcagacgaaaacgtactttttactccgaggtccagctccatcaccagcgctagactcagcagcattcaaggtggtagaagaatccatggctaattcagataacgctttcgtagtttgatcagccgcaccttccatcgtaatggagattccaaaatcaacaagataaaacgctctttgctcagattgttgtttcaagtttctctatatgaaatgttaagtctatgagaaagacggcgacgatgagacttgcttagggtttattatcccctttacgcgggtccaagcccattagccatttagggcttattcggtttactcacgaaccgaaccggtttgttttgagttaaccatattaagtttcggtttattcatacacaactttattgtatcttctttctatggttacatttttattgaaacacttgctctcaaaatcttaacactatgtttccttgtatataatgatctgcaacttcaaagagacaaaatatttggatttaccaatgacaatttcaagtccttcttctccaaaacctgaaaccaaagcagctcggtttacgtttcctctgcagatttgagctcttacctccgtttaaaccgctcggtttgtaattgtcgtcactattctctgttgtttggcagaaaagatttgttgcttgcgagactgttatccttgttacctcagagtttgttgtaagatcgatctcgggtgatgcaggagctattttgttgctgttgtgataatgtgcaaaggatgcttcatcgataagttcagtgttaggatcttgaatacaaactttgctactagaagcaatctgagtgctccctgaatgctgcattggagatgatgatgcttcttcttcttcttcctccgaagaggttgatgtattattattatctgttttgagattttctaaccattgatattactctctctaatgtccgtaaagcttgcttcacctccggacttatgcaccaacgtgttttgccattcttgtcttcatcaacaaaagaagaagaagaagaagaaggagaacttttgttttcttcctttaaatcatcaacacattcttcttccttgatctcaggaacatctcttttgcaaggtacagattcattctcgcagtctcgagtctcattctctttttccatatcatcatcagcttccaacttgggttctttctcttcacaatctcttccttgttggctatgaagctcatttacttggcagatttcatcagttttatcactagaatacagagcttcacgtatatgagtatacaatggatcagctaaaactgtcttgtaatcatcggattcagccaccgaaccaatagtctgtaaacattcaagtaaacaccacaacatcacacaagctagcaaccaggcatatcaagtttttgtgaagtaaataaaactggaactgaccttcttgaaaagtttgaaaccgttaccaagaagctgcctagacataaaattaataagagatggaggaaccaagtccagctttatatccacttccgctataaatctacaaaagtttagcgattcaaaaaacccgccaaagacattcgaaatgtttggttatagaaacatgttctcattcactcaacactcaccttatgtaactcttctctggagtcactttttgtatcgcaactccgcctacgaagtcaatcctcaccgcattcacttcagctacactgccgctctccacttcgatctaaagatgtactaatagataagagtttaggatactgtcaaatcactaagaactggattaagatgcaaaaaaacaaagctaacatggttttaccgagttaagtaggatgatgactaaatcatctttaaagtattcgaatacgaaaaactgcagaacagcttctctgtctgtcagtggccacggtgctttcaccctacctccccaaaaaatatgatcaaagttttcagctttggattagcttcacgaaaatgtaacaataggaacaaacattattacaatttgtgaaaacaaacctcagtaaacatatctgttcatcaatcctaaacttttgcaagcatttagcttctaagaccctgaatgacggaaatgtcaactttggccacctgaaagacatagaaaacatcaaacaaaaagaccaaaaaatttcgcaaacaatagacaattccataaacaaaacattaaactctcaccatttctcatagaatgatgattcccagcatacacataaacctgtataaacatagttagatacaaatcgaaaactgttttcttgcggtgcaaactctatagaaaaacttacagtcttcgatagtcccatcagtgcaaccttcaacgagcaatgtatgaaatggacttcctttaagtccttcacggtacataacacgacaatctttatcatcatgtttcacctataaacaagaaaacactaattggctaacattatgacaattctgtttcacaaaaactgtccaatagagccaaaagagaaacatactttccaatcaccataagatgcctcggtgcttgatttagacaagtcttgatcctttgttgatacactcctaagcttctcaattgtactggataaagcagctactctttgatccaatatatcaacactacactctgtgaaaacataaaaaaaaaacattgtagcaaaggcaaaattaaagagtatatagcaaatcaacaacaagaaaaaccttcattgagttgttttctgactagggttttaagagtttgctcattaatgagctcaggagacgacaaggtctcattaagtctctctctgtactcagaaacatctcgtttcttctccatactcaattgaatcagcagacacctttagaaaacaaattaatcctcaaatcaaagaccaaagagaatcaaagattgccctgaatttgtggagtcaagatgaatcatggggaagaagtgagaagagaacaccttaaaacgtaaggcaatttataagaaaggaagcttttggttatagttttgccagacaaaacccagctgctgatgcgtaacctacgagacgggcaaggaacgtggagatgtttttcccgattagaagatactttccctcattttctcgggaatatacatatctggagaatgtgaagaaaaagtctcattaccaataataataagaattggatttgacaaagtttgagagtctgtgtcagactttattttagagggaccaggtcggttaactgtcgttgtcatgagatctttcctgtctgtctttttatcattcaaacaaaaaaaaaatgattttataaaacttaaacacaaacaaataagatcacttttgatttattttatttttaaaataaggatgtgcatgaatgagattttcttctaaaattgtgggagtaaatgaatgaatctaggtatgattgatttcatcaaaatcagaaaactgattgtttctagaaaaacatgcatttggggtattttgaaaccacatgagtatatgaggagttattataaactagaattgcgttgtaaacgaaatagaacaaatcttcttttggaaatccgtatactttagcgtaagaaaatggaagaatttgatttggactcgtatctttgaagtatatataattcagcatttacattattgagatttatctctcatatgttgtttttgcttttcctcattctatggacttagctgcaagttttaaatatctatggtaatgaacatggtccagcctatacagcaacgaatatctatcactatttttaatatatatacacaatcaaaattcaaaaccatgagttgcttgcatatcccctgtgtggtcaaagtcaagactgaactatattaaagagaagtatcttgcaactaacaccatagcttattcaagacacagcgacatggaatattacattgcttagttgttttaaacagccattggttttcacaacacttagttaaaaaggaagtaaaaaaagagtctcagatagttttgattgaaacattttttaaactactgaccgcagcaaccgccattgttctgctggattggctgacctttcatttggacagttccaggaccagatgtcttgcttgcattcgtttggcttcccattctgcaaagaaaatgagttacgatatgattagactcaattctccatgttacataaactagactgaatcagcaaatgtcgatacaagatatcaaccatatggaaaatctatc

SEQ ID NO: 31644 - DNA, 3855 bp, Arabidopsis thaliana landsberg
tcaagaaaaaaagtttatcttctgtttcttgttatgaacagttgaaaggaatgttcaagaaatggggaagaaaggaagttggttttctgcaatcaaaagggtgttcacaccacattccctagagaagcagctatgcaacaacaccgtaagaaattcttttcaacactttcactttgtcgtctgaactgacatgataaattctgagactgaagtgtatgagcatttaggtgtttggttttgtgtcttgaaagccagaatcagagataaagagtggcttcaaagaattgaagaagaaaggttttggaaagaaactaacgaatggagaacccaattcgtttcttcccattttgagacagcctagtagtatcgataagatcttgggcgaggctgagagagatcacaatcttgtcttcaggcctcctactcctgatcgaccaaatccatattcagcctctcctcctccgaggcctgcttctcctcgggttgcttccccaagaccaacttctccaagagttgcctcaccacgagtcccttctccaagagctgaagttccaagaaccctttcaccaaagcctccttctccaagagctgaagttccaagatccctttcaccaaagcctccttctccaagagctgaccttccaagatcactttcgccaaagccctttgatcgatcgaagccatcatcagcctctgctaatgcccctcctactcttaggcctgcttctactcgagttccttctcagagaattacacctcacagtgttccttctccaagaccaagttcaccaagaggtgcctccccacaagccatctcttcaaagccgccttctccaagagcagagccaccaacattggacactccaagacctccctctccaagagctgcttctctaagagcagacccaccaagattggatgctgcacgacccaccacgcctaggcctccttctccactagcagacgcaccaagattggatgctccacgacccactacgcctaagccgccttctccaagatcagacccgccaagattggatgctccaagacccactacgcctaagcccccttctccaagatcggtttctcctagggctgtgcagcggcgggagattgtttatagaccagagccaacgcttccggtccaacatgcttctgcaacaaagattcaaggagctttcagaggttacatggtacgtatacacattctttgtttctctatcaagatttgtccattacacttccatttccaagacaaggaagttatattgacctgaatgaaacaggcaaggaagagtttcagagctctcaaaggtctagtcagacttcaaggtgtggtgagaggatacagcgtgaagcggcagacgataaatgcaatgaagtacatgcagcaagtggtccgtgttcatcccaaatccagtcacgtcgcatcaaaatgtggataaaccaagcccaggtagagaaagatgaagccaaatgggctgcgtctgaagctggtaatgataattgggatgacagtgtgctgacaaaagaggaaagggattcaagatcacaaagaaagactgacgcaatcatcaagagagaaagatccatggcctatgcatattctcgcaaggtaatactcaatccttcttcatgccatcatcatgttgatgtacattttaagtcttttccaacgtatctatctctgtgcagttgtggaagaacagtcctaagtctactcaggacaatcgttctttccctcaatggtggaactgggtggaccggcagaatcctcttgctagtcctgcaccgagctatagccaaccacaaagagatttcaggctaacaccatcaagactgtgcccaagtcctctgtctcagtcaagcaaacaacaccatatcaggcttgacaaccactttgacacttcaacacccagatcgtcaagatccacttttcacactccctccagacccatccacacagggacatcaagatactcaagaggaagactaagaggtcaagattctcctttcaaggatgatgatagcctcacaagctgccctccattccctagctacatggctccaacagtctctgccaaagcaaaagttagaccaaacagcaatccaaaggagagagtgatgggtacaccagtcagcgagaagaggagaatgtcgtatccccccacgcaagatacgtttagatggaacaaagggtcattggtcatgagcaacagcagcagccacagaggtcctggttcacctggaggtgtggttcttgagaagcacaagacacttaaatcagtaggaaatttgagcattggttccactgcctccatggcaacaacagttgggagaaaggaatttaacagatttgtgtgatttcttttgatttgaacatttttctttgggttgtgttgattttgagtgttgtaacataataaaaggtaaaacagaaaaacaaaaaaaaacggaggatttggtttgaagtagaactcttagaaatgatatgagcattagacttggtaatactattgaaaaaagttgacacttgaagcaaattcacaagggtaaaatgtatcttacggtttttaatgaaagctaaagagactgtagggcttcaacattagcttgggctcgggatgcttccctctgcaactggttaagctaccacagaacagagactgtagtctgtaggagggattcaacatagctatctcaatgagttccaatcatattctcctgaatttacgaaagaaccctctcgacttaaattatgattaggaggcctatatctatctaatgggccatagtaggcccatttaacttcggtgtttcttttgcctttaacacttcagtctacatcgatccctgagtccgccggccggtacggggacattgccgggaatgagtcacaggtgacgagagggttatcggaaggagggcgaaaccattctacccgaggaatctactacggctgcggtggtggtttgtgtttctccctctcttttctattatttttcgttttaattaatttactttttagtccttcatatatatactcagttatatttttggcccaaacttcaaaaaattaagatttcatcctcggcgttacttctcttgcctgcttattcctaaccgaagtagaaatgatctcatgtttgtaaataagatcgttggtctcaaacatttgttagaaaaatatattcatgccactgccaactctatggctctctgtttaataaaatatttgctgttcttgtgactatttcgtgtatctgaagtcctcacttgactttttccttacttatcacagattttaacaacacaaaatgtataatcttcttccctcgtaaaccgctcaatcaatcaatcaatcaatgagcatgtcttgtaaaatcaactggttgatggttctggtgatcattgctctgtctaatcttgaaagctcacttggcaggcttgtttttgagggatccgccgggttaatgaatggtttcacgacgttgacaaacaccaagaaacacgcctatggtcaagccttcaatgacgagccattccctttcaagaattcggtcaacggtaacatgacttcgttttcatttaccttcttctttgctatcgtccctgagcatatagacaaaggttctcacggtatagcctttgtgatctctcccacgagaggcattcctggtgcatccgctgatcagtaccttggtatcttcaacgatacaaatgatggaaatagctccaaccatatcattgctgtggagcttgatatacataaagacgatgaatttggtgacattgatgataaccatgttggtatcaatattaatggtatgagaactattgcatctgctcctgccg

SEQ ID NO: 31645 - DNA, 10528 bp, Arabidopsis thaliana landsberg
  unsure (1)..(10528): unsure at all n locations
tgcccttgtgatcgctcccgccaaatgcttatatgatagacataccacttgttttatttttctctgtgtttggtcgccgtagaagaacattactaggagaggggatggaaatgtgtcaaggtgtgagatgcatgtgtcaagcatttcctgtcttatcatggttgttgttgttgtgtcctttgttttctccgttactcacatactaacgtgttcggccacgaattaaaaaaaaaaaaaaaaaaaaaaactcaattagaagagaaaatctttttaatcttatcccctaatgaattacttggtacatgtagaatagaatcaaattactacaggaggcttaataaacacaacttataaatttgataggcacgtcaaaagttaaaacagggatttgttaacctcagtaattaactacgagggttagttaattaaccaatcaggtgaaatcacacggattggtagcgagaggggtatttaagtaactgtacaaggagcgttggtgtttgtttgtttgcaaagggcaggaggcacacaagtcttccaaacggaggagccaccggcgttgttagctttctctttggctgattccttcttcttcttctctaattcttttccttggtttcagagtataataatccccagcttctttgatcctctctctctctctcttcctctgttacatgatggctacgacggcgagtagtgccgctaattctgcatctcgcttctccattgattcctctatctcgcgatcacgtcacggcgattcctctccctggttgttaccttctgattcccatgatcatccgactctttccctctcccaggacgatcccttctcagcgccttcggtctccccgcccaccggaaataactcttccgactacgacaatgctgataagaagcctcctcctgtctggaacatgccttcttctaatagctcctccgatgtcggccctgtcatgggcgccgccgaatcctggcctgctctctctctttctgctcgctcttcttccatcaagtctccctctttggatgcttccaaaccttttcctgatggatcatcgtcatcaataccgcctccccaggtcgtttctttttgctctccaattatgtcattacagaatattagggattcaccagtatctacctattataggcttgtggtttcaagtttcatttctcaagctccttcttttgcatgtttcgaatccaaagaggataatttagtctagtcgtcaatatgcttgtttgattgcctatagtagatacatatatccgcttttgctcattatccatccatatatattgcaggctacttccaacaccagcaccaatgccaatgcaggctcgagtgtttctgctacctcatctgaaaacagtgctgttaataatagccagaggaaaccttttagacggaataacaacacatcatcttccagtaccagtagtaacgtctccaatgctgcgcctttaaacaccagagatcagaatcacagccaaaggggtggtggctcttttggttcagggaatttccgtaattctcagaggaatcgcaacagcagctcttaccctcgtggggaaggtcttcaccatggaaacaggcgcaattatgagcatggcaaccaaagcggcttttctcaccgtaactatagtgggagagacatgcacttgcaaccgcagaggggtgttgggatgattagaccgcagatgctgatggggccaccatcttttcctgccagtagtgcgcaatatatggcagcgcctcaattaggttcatatggtggccccattatctacccaggtatggttttgctcatcttatgctctctcatacattcccatttctaattcattcattctgctatgttacatcttcagattatgcacagcatgtctttatgccacatccatctccagatccgatgggtttagttggacccttcccacttcaacccatgtattttcgcaattttgatgccatcttgtacaataagatattgacacaagtagaatattatttcaggtaatcgtttcagttttatttggttgtgtttgcacttttctacttgtttatgggttaccccaatgctccattagatgcatctatcagaagtgtgaattacaaattttatcctttgttaatttttaaacgcagcgctgataacctgagcagagatgaacatttacgggatcagatgaatgatgaaggttgggttcctgttagagtaatagcagcattcaggagagtaagtggttttccatcttctattctgaagctgacatgcgttaatcactttacaatgtctactgcagaaagtatttcttattgtatcaaggtgttacttatattagttgtgtttgtttgtttacgtgaccttggaagtagtagtcttagtttagtaagtgtattggtggtaaaaaaaaagagtaattctttgaaatttttgcaacttttgcagcttgcggaactgaccaataacatccagactatattggaagcactgagaagttcagaagtcgtggaaattcaggtatgtaagatgagcatccttgtctctcattcattgatggatataagataagaagtaaagtggaaaggtgtaaagataaaaaaaggcatagaaagactaaaggtagaatgtggatgggattgtagggtgaaacattaaggaggcgaggagattgggacaagtatttattgcctcgtgagccttcaagcgtccggtccagctgcgggggctagcaacaatgcctcactggtgtctcaaattgagagcatgactctatcagagaggagcagagagggagtgtaagagagatgcgactaagagagagaaagaacgatgtgtttgcaagcctatctctcttcctttccttttttgtgttttgtcgagaattggatatgaactgattgatactcagtctcataagaaaaaaaacaataatatgctgctcaactttttttgaacttttctggtttttaaaaattttttggataggaaactttaatagttggtgtttggctgatcattgatttagtcatccttgttaagaaaatgtaatatctgaagatacccgccactcggcagagagggtttcacgtcaaaccatatccgaaatactagagagctctaaattgaaaacagctggctatctcagcagtgacataccattccttcactcgtccacgtgcaaagtgggcatgttggctttactttatgtatgctttaataagacaatttgaagttaccagagaaggaaaaaaaactgtcgtaatcggcgctaatgggcttccgagacatttgttaccggaaacatcacaaaaagcttaagcagttccaggcactcttctcccttctctgatatatctgattccttttttttgcttgtaactgttgtgtaacgagactgtgtttcgtatgatgaaaaaagaaggtggagataaaagtgaagatggactgcgaagggtgcgagagacgggtgaggaagtcggtggaaggcatgaaaggagtcagcaaagtcaccgtcgatcctaaacagagcaaactcacggtcgagggattcgtccaaccgagcaaggtggtgcatcgggtgatgcatcggacagggaagaaggcggagctgtggccttacgtaccttacgaggtggtgccacacccttacgcacctggtgcctacgacaagaaggcccctcctggttacgttcgtaatgcactcgccgaccctctagtggccccgcttgctcgtgccagctccttcgaggtcaaatacacttctgctttcagcgatgacaatcccaacgcttgtaccatcatgtgatcaattcatatatatagttaactacacatgtgactatgtaagtgtttttagataccctttttaagtaattctgaaaagacagtctgaatgtttgtacgagtcatcatctaaattccactgaaattaaaagggagaaacagaagaagagagaggtgagtagatggaggagtaacaagagaaagaagagagaaaggtgagaagccatgaatagactgattaggcaagccatgacccaaacagggtatatcagaagcagtgtgtaacagatgacgacaaggcagtagcagacgagactcgccactttctcgatagcttctcccaccggcatcttgatttgcgtatttgctactcctctggattacatgacttcatttaaataaatagtaagaaacacacacagagtctttggagaaatacatgcacaagaagttgtttcctctctaaacgggacaatgcatcccgcatttcagcccttcctctgtttcttctttttcccctctgtttttgcctcttcactgtgtttacataacagaaacgtgctttgtcataaagctcaagtaacaatttcaagaggcaagtatccaaattgaaacgcatatggtgtccaataacggggtatttcttcttttaatatctcattattatcacattccacaaagctagttacaaggtcagtatatatgagtacatatgcgtatgtgaacaaaacaacaccaaaattatctcaaatatgaaatgctcaggatttggagaatgcacgaagcgtggcatccaacgcttcccgatcataatctccagtgaacacgcagtttcccagcgggcctttgagaagaatcagcctcagcagtccatctgccactttcttgtccacctgcatcaccacacacatttcaatgaatttttcttagctcaaaagttgctcaaaagttaccaacttttttccatttacatctggaattcactaaaaactcaccgccattatggacttgaacatgctgacggtcatgctctctggcggagttgtaggcaatttcgcccgtactaggatcttgttcactctcttaacaatcgattcatcgatccaaccaagacgatatgacatgtccactgccattacctgagtatatataacaatgtgaacaaatctcgaatttggagagaagaagatggttagcaatatcgcagatagagaaagataccgtgccagctgcaacagcttctccatggagccactctccataaccaaagccagtttctatggcctgcaaaattaagtgatgggtgatgagtggatctaggcccgaagagaagaaatgtccaagagaccatcatggactacttacatggccaaaggtatgacccaaatttaaggttgctcgcaagccgctttctttctcatcttgtgatacaacgtctgccttgttttcacatgatcgctttatagcaaaagctaatgcagctggatccctgcgatgaatattatcacacaatgttttttcagggatagactcatgatctcaatgtttttgttttgggcacacttgtaacgtaaaattaccttgccagcaatgcctcaatgttcttctcctgccattcaaagaactcggcatccctgataagcccgtacttgatcacttcagctaggcctgatgccatctccctatctggcaatgtgttcaacgtgtcagtgtctactagcacacactgtggttggtaaaatgcaccgatcaaattctttccaagacgatgatttatgcctgttttgccacctacagaagaatcaacctgcagggcaattaaatgaattgcagcgagaaataaaaaaccttttttctggatgttaatgattttagacaagaaattcctacagtgaagtgaaaaatgtacctgtgccataacagtggtaggaatttggatgaaattgacaccacgtaggtacgatgcagcagcatatccacacatatcgcctatcacaccgcctccaagggcaacaaatgtacatcgtctatctaggcgagactcaatggccttgtcgaagactttcatgagagtatcctagaaagaataaaagagtctcaataactcacgattactaatgattctttattataaacagggaaatcaaaatccaagataacatgtaccatgtccttgtatttctctccatcaggcaaaattacactttccactgtcacgtttggatttcctctggttaaagcatctatagtcttgtccaggtagagaggagcaactcgatcattggtgaccacaagcactctctttccgtgaacatgcctaaacatttatcaacaaattatgtaagaccaaactctaaaaaacttgagtattgtatgtgctctgaaatttttttaaacaaaaaccattggcctaaataagctcactagttatctccaacgacatcaacaccttactaaatcgatactatcgcttaaagagaagtcaaaactcgaccgtttgatggtggcgacaattaaagctcaaaaagctaaactaaattaaaatgaaatggtcttatgggacaaaagatgaaacctttgaagaagttctgagtgatcaagcaagccggcgccgatatagatcggataactccggtcaccaagatcaacctcgacgacagtgggagaagagatggagcgttgatcgttaagcggttcgttcatgagctggctagcaccggcgcgcacacgagacctggaaagagtcgtggaagataaagaaagttccccaggtttagactttgcagaagccacagggaaaaaaatagttggtggagcaataaaggcacggctttgaaaggagttgagattcttggaggcggcgacgttggaaagagaaatggtgttggctgccatggaaatcgatgcggatcagaagtcgggtttggggagaagagagagttgaagaaaagaaattgggttggtgaagaagaagaagactgaattgaagaaatacattagaggattgatttcgtggtgttgtttggtgaagccttcggagacggcgtggggtaggtggtggtcactctctcaggccattggtgtaatctcctacaactcaccctacgctaaaacaggttatttattttactcacgtgagataggcggtctagatattgacacgtcacgtaaagacctcactacttgtcttctcatgtacgcctcggataaaaacgatgccgtttgattgacccgcgaaaatatcgagcgatgaaatagtcatttagtggagcgagccaacactcactcctcatttcgagacaaaaacgcggaaggcgacgacacgccgttgaggaggatccgactactcggaagtttcctgctcatctggaaattggggatcgttgctgagagagtttaattgagtgatcaagttccgnnnnnnnnnnnnnnnnnnnnnnnnnnnnnnnnnnnctgaaaggtttcggcaaaaggaaattcaatgcttaagaaaaaactatccctagaagatgaagatgacgatagatcgtataacttaaggtcatcgcgttctaatgccaagtcgaaacccaggtcctctgctggtaccgcaacgaatcctagagcgtcaaagagagctcgcctttcgggtgctagtgcgactcaagaagactcgagtcttgtagataaggtctgcatttgtttctacattttttgtttgcctagtgtctgtcatatgtttatgttttggcttgtcaccttgatgaaggtctcgagtttcgctttttatatgtctcgcagattagattgtctttcgaagatttcgatgaagctttaagcggcttcaaggtatcttctggtacgcgccaactttgcctggatcctactccacaattttcacacttttattgatgttccgctatgatgcttcctcttacggtttttggagcttataatgtctgtcatttcattgctctgtggtctcttgtttaggttatgaaaggagcaagaataccgatttgtgggttgacaaatacaggcctcgcaccttggaagagcttgctgttcacaagaagaaggttgctttgttctttcttttccttttagctctgctttctccttggttcaccaactcatctcctttcttgtttttgttatctttaggttgacgaagtcaaattgtggtttcaggaaagtttggatttcttaaaggtaatgtttcgtttatctttgaaattgatttatgatttcagagctcgtgatgcttaatggcagtattcacttttttgcctttctgtttcagcagaatggtttaaggaataacgttctactagtcacaggacaagctggagtcggaaaatctgctaccatccatttgattacgtctatccttggagtcacagtgcatgagtggaacgctcctattcctaccatctggcaagaacatgtgcacaacactagttcaggtacttgaaggaattatagttgttagttactcagttttggcactgctattacagaccagaggatggttgttgtactaatccggttataatctactggattttcattaattcttctaggactgaagtacacgtcgaagctggatgagtttgaaaactttgttgagagtactaggaaatacggagtaatggcttcatcaagtactgacggaataaaggcgcccgttgttcttttgattgatgaccttcctctagccaatgggaggcatgcttttgaaaggctgcaaaattgcctactactattggtgaaatcaacgcagattccaacagtgatattaatcactgaccacaataacgcggactcttctgaccagactgcacgacgcatggaggacacacagtcatctcttgagcgagcaggggctttaaaggttgctttatcaaactatttacagtctaaatcttattagaaatatcattttttcaactctagttgattgtccaggtatgtattctcaggttgctttcaatcccatcacgaagaactcaattaaaaaggtacttcagaaaatatgtagggaagagcattgtaaggtaacaactatggagattgatcagatggcaactgcaagtggaggcgacatcagacatgctattacatctttgcagctcttctccgttaagccagagctaaatcatactaagataaaatcaccaaggcctggcatggaagacaattatcatggaaacgagcagacaatgtacagtggtttggatagtggaatatcttcctgttttggtagagatgagaccctttcgttgtttcacgctctgggcaagtttctccacaacaaaagagagacggataatgtcattatatcaggtaattcgttattaagaaatttaaagaatgcaatttagagctcaggatcactatcttctaagctaaagtttgtgtagagtgcagcagctctcttgttcatgacgagtttgcaaggttgccactgaaaatggatgcgccggagaaggttctcagccaagctcatggacaggcggggcgggttgtggattttctacatgaaaatggtatcaactactacctcgtcttgactatccagtattgagttagcatatgcactatttcctccttgatagagtgacacatgagagcatacctaaacttacatttgtttgtgcttttcgtactgaaagattttctaaaatggactctttatgttaatgaagtgttagattttgtgagtgacggagccatagaagatgcctggtgtgtttcttcgtatttggcggatgctgatctccttctcgctgatataagaggaaagatgagtgggcataacaacacagaggatgttccacagtcagccggtgcctcggttgctgttcgtggtgtgttgtatggaaacaagcagccatgttcatccaggtttcttttacatacggataccagctgactgtattatagtttatttgtttgaaaataatattatcgattgatctgtattgtgattatgcagatggcacgtgattcggaagccaaaactctggcaagtggagcaatcctcaatacaaacaaaggtcagggtctttccctttttttttcaggaatagaaactaattatacatgtccaatacatatcaaacctgtatatgcttacaaatttgatgtgtgaatgcagaagaatctgagagagcagaggaacataagctatgaggggtcaagagtggcagatatatcagtgatggccccagagtatagccccgtgctgaaatggcttagctacagggcatctccagatgcgtttccgggaatgggcgaagagacagatgaggaggacagtgatatttctgaagatgatgaaatacaagactggtgacattcaccatcttaagtgtcttatatgttaggtcagatagaactggtatgatagttaacaacttaacatcaagggaaggaacactaattgttctgcttacttataaatagaaaatggagagtcacttctctatctaacaatgagcaacagcaaatttatccttggtttgatcaagatcaagcgaattttaaaccctttcttcagtttttttttggagcattttcaagttaacaaaacgatggggtcaggttcttcttttgccaaagagttggctcgagtcaaaacaagattgagaaacagaagcagcgaagaaggtaagttcagattgagaaacaaaaacagttattgttttatcaagtttcctttggagggcctttcttggcggcttctgcgg

SEQ ID NO: 31646 - DNA, 4872 bp, Arabidopsis thaliana landsberg
  unsure (1)..(4872): unsure at all n locations
gagcttgctacaagtaagtttaacttaggagtaaatcatttcgttttgaaattgaccaccacgactttctctggacaactatttatctgttcaaatttcaatttcggtgacaggcttcgatccttaatggagatgtgcatcctaatcccaggtagctctttaaaacatggtggcgccagctcaaagcaggtagaggacagttcgttcttttaacttacaatggttattaaaaacgtaggttattaaaaacgtatgttttatttgaccagtatcaaaaagtcaatttgaaatgagattatgtttatgagatattcttgttaagcacattcagtttttttttttttttttggggtctcatagcgatccatgcatatttaatcgaatatatcctgtgatgtatgtagggtggaatttcacttgcgtcatggaaatgctctgaagaattttttgcagaacagataaagagcagagacccactgaagattgggtgggtctgatgattcctttacttgatggtgtttttaaaatgttgacaagaatttgttacaaagccaatgtgcatatggtggaaaatgcaggtttccaaatgtttgggcattaaggttggtgaggggtctattacaatggtaccctgtgagatcctctgtcttttctcccttaaaccttatatagcatagttgtgagaaattggaattggcgtgttgacacgtatagattatattgtgggagtgcaggaggacagagtaaccgtagatgaggctctgcagcacccttatttccagccccctcccagctcctaagagtagagaagaagagtaagtcattttatcatctagtaactaaactcctttctacattttaactaactatgagtttacttagaagatcgaaaatgacatattgacaaacaatagtatgtaatgtttgaatataaaataatatcagagttcacacaaacggaaattataataagtcaaactctagtatgtaatgtttgaatataaaataatatgagctacagtggattatgtaggaacaaggttaaaacgagcaagggaagattctgaacttgcagagacatctaagggaagcaggtagccatccaatccaaggttgtgaacgattttataaatagcctcttgtcttttccttgtaaataaagttacctcaagatgncttcttctttcttttttttttttcttttttcttattaggataataggattataaattatttcacattttgtaactaatttgttgtccataattgttgtaaataaagtcctcaaattcggttggtaaataaataagcgtggtagaaaatacgagttgttttttcttcttaacggaagatgatatcggttgtgaaagatgttgaaattttggtatctttatttatcgttgtagttagtattaacaacgttgccgcggaatcttcaacctgtttgagtatttacaaatatggtggagctccggcagttttccgatctcccaattgccctctctggaatctccagaatcgccgatccttctcctcccccgccagtcgttgccatacggcggcgattcaagggcggaggaaataccaggaggatcgtcttctctgtgcccttgatcttcgcattccctttcccggtatgcatcgttgccttgggatcgccaaagagaatcaactgtttttttttttattccccaagataagatgattcgcaggcaagaagactggaacaccaaaggatgttttggttggaatcgcagctgtctttgacggccacagtggttcagaagccagtgagatggcttcacaacttttgttggattattttgctctccacatttactttctcctggacgcaacattttctaaggagctcactggaaagctaccaaattcactcatgcatctatacgacctcgattcccaaaggtagtcctcgtgacacagaatgttgttcttctcacgagatatgattttgcaaccctgtcccactcacttttttacacaggttccaagattcattgccgctcaattttcacttggatattctgaaagaagccttgctcagagctatctacgacattgatgcaacatttactaaggtgtagtgcatggccttctactctatcatttggaccgttgttttttcagtagcgtgattagactctgttgtttaatgcaggaagcatctactcgaaagttggattcaggttcaacggccacaattgcacttatcgcagatggtcaactactggttgctagcatcggtgattctaaggcacttttgtgttctgaaagatatgagactcctgaagaggctaaaggttcccgcagcatccctttttagactataaccaaccttgtgaagccactaagagtataggggaatgaatgaacgttttgttcttttggtgtttgcttattgcagctactttaatagagttgtacagagagcgtaagcgcaatcaagactcttccccatcaaggttctctgatttaaagctggaacatcgcactggactcatgcgttttattgccaaagaattgacaaaggaccatcacccagatagagaggatgaaatgctccgagtgaaagctgcaggaggttatgtcaccaagtgggccggtgtgccaagggtgaatggtcagctggctgtctcccgttcgattggtgaccttacttatagaaggttggcactgctggttgtatcctagaatctctctggaacacgattctagctggtttacactatgagaagttgaaatgtgagttttgatatctctttcagttacggtgtcatctctgcacctgaggtgatggactggcagcctctagtggctaatgacagctacttggtagtgtcatctgatggtatctttgagaagttagaggtgcaagatgcatgcgatcgcctgtgggaagtaaagaatcaaactagctttggagcaggagtgccttcatattgctcaatatctttggcagactgcttggttaatactgcctttgagaagggaagtatggataatatggctgcagtcgtggttcctctaaaatccaatctagattgggagagctaaccaaaagagcaatctgtgggtccttcgggattcaagatgaagaatacatatgcactgccatgtgagtttctctcatcacaacccaacttattccgtatgggatgaagagtgatctttcatttctaaatatatctgtttttcaacagatggaacttttaatccattgcaattgaagcagactcaaccactttcaaccatgtttaacgagttattggtatgttcccaccaagacattaccatacagatgtgtgaaactaactcgagaagcttgcactaatgcccaaggaaagtgtacaagtactttataataaaatgagtcaaccttggtattgtaggttgaagaagaaaacagcagctattataaacttaatggtacctttgcatcatatgggtgacttacttactggtagcctcttccgagtcattattctctggtaagtgaagtgactgactagtatcacctcgttgcaatcttgtttaatgttttatctttttctttctggttctgtatactgcactaacattcaatcacaactcataccttgtaggtgcaactaatttttcaacaaggaccaatttttgtgtattctgttttttaccatctaattcgttagtttttggtctagccataattgttttgtttgtaaattgaaaattggaacataagtataagaacaattataataattcaaagtacaagtgggtgtgtatatgtggacgaaaaatgtgaagaaagttgttgaaatggtttttaattggcacaatcatttgtggcaaaatccaaccaatgatgtgaaaaataaatcaaatccaatggaaatgggctgtagaaatgagtgcatcattaacgttgtttctcctcttcagaggccggcccactgaataatcttaattccaggtgtcaagatcggagccgtctgattatattatttaattgcgggacgtatcgggaaggttcttctcttggccgcctctctcggagtctattacttcttcttcttcttcttcttcaaggaggaatcgggatcgtcctcacatctcattcgcattttgctgaagacttctcaccggcgttgacaaaaaaaaaacgaatccggaagatgtggaatcagaagcatgatttggagtcggctcagacgcctctctacccgatgatgtcggagagcccggagctccgatggtctttcatccgcaaggtctattccatcatctccatccagctgctcgttacaatcgccgtcgctgccaccgtcgttaaggttcattctatttctgtattcttcaccaccaccaccgccggcttcgctctctacatacttcttatattgactccattgatcggtacggtactccttggattctatctctccatcagctccggctctttgatctgctttctcgtttttgtgtgtgtgcagttatgtgtcctttgtattactatcaccagaagcaccctgtgaactatctgttactcgggattttcaccgtcgctcttgcctttgcggttggcttgacctgcgcctttacaagcggtatgtatgatccagttgaacgatactgttctctccttattctttccctaacgtgttttgtttgattacagggaaggtgattctggaatctgtgattttgaccgctgttgtggtcatatccctcactctatacactttctgggcggccaaaagaggccatgacttcaacttcctcggacctttcttgttaggagctgtcattgtcctcatggtgttttccttcatccaggtatcaatatcgctcacaaggcttcaatgttctct

SEQ ID NO: 31647 - DNA, 2747 bp, Arabidopsis thaliana landsberg
agcaaaaaatggtgaagatcgaagttggaagtgtgggagactcattcagtgtatcatctcttaaagcttacttgtctgagttcatcgcaactcttctcttcgtattcgcaggcgttggctctgctgttgcgtttgccaaactaacctctgatggagccttggacccagctggtcttgtagcaattgcaattgctcacgcgtttgctcttttcgttggagtttccattgcggctaacatttctggtggtcaccttaacccagccgtgactcttggccttgccatcggcggaaacataacactcatcacaggtttcttctattggattgctcagtgtcttggctccatcgtcgcttgtcttctcctcgtctttgttactaatggcaaggtacgtactagtaaatttagttagaaaattaaaaaatacataggttttgtacttttgttaggtttggtttatatgttcgtaccgtcataggtacgttagtatattaatatatatgatgacaaaaatattataacgtttcaaaaactaaacggtttaagggtataaaataattgactaatgagttgtttcccggtttgctgcagagcgtaccgacccacggggtctcagccggtttaggagcggtcgaaggtgtcggcatggagatcgttgtgacctttgcattggtctacaccgtttacgccacagcagctgatccaaagaaaggatcgctagggaccatcgctccaatcgccatcggcttcatagttggtgccaacatcctcgctgctggtccattcagtggtggctccatgaatccagcaaggtcgttcggaccagctgttgtcagtggtgacttgtcccaaatctggatctattgggtgggaccacttgtgggtggtgcactcgcgggacttatctacggtgatgtgttcatcggttcttatgaagcggtagaaacacgtgagatccgagtgtaattgactgggttttgtgattgcttgatggttggttgatgttttgtttgcgtgtgtatgtttggtgtccactttcttgcaagattgtatgtagagaaaagaaaaaaagttatgtcctgttaataagaaaatgtatatacatttcacttcatctccttttttttaacgtatagcatgtttggtttctttcatatgtttttgtattctatggcattttactttcataaagttatcgacataattaaaacgtacttaacgatcggattcaaactacttatcttctcttagatttttgttgttcttgtgatttgtgattgtgaatggtccattgaaatatctaaatcccaaatacaaatggattccagtttccacaccaattttacatcaaagatgtgaaaatttgccgaatgatatgagcaagtcaaattttattgatttgagattcgtgagaagttactaatagactatataattgatgaaattgtatggttcggttaagtgtaaaccggtatgaaccgggtctctctagtatataaagagagtctcaatgtaacaaactttcttaagatgaataacagaaagttcttcttcttcgttcgattctttgattctctctagttctattacttactataatttattaatcaatttggccaaaacataatcaatttgcaaaacattcttgttgaacgaattgcttcgccacagtatgcgatcatcattttcaacgaataatggttcatttgcaacatttgttcatcaatctctctatctacggttgccttggcgaccaaacgacaaccattgtcacctcgaagcaattttacagaaaactcacctatggcaattacaacaacattgttgatggccgttacggcgaaaggggatcattctcctattggcccgaacggtggcatcaacaaaaacggaagcaaaatcggaaactaaaattatatcgtatgttagtttatattgaatcgataaactaatctgtagaaatatttccgttttgtattgcttttgtggaaccaaatatggagtattgattacgtaattatccatagatatggaaggaataataatggtaatattcaaagaaaaacaaaccaatagccgagagttattcgaattgtctttaacacttttgaactcgtgggagtatctttatagagaaaccaaaagcgttgttgttacgtgtgactacaattataacagaaactggtcggtagagtcacgaactccgttaaagttgtcaggtcaaatcttctcgaactcaaaaaaagacaagacaaaagagcagcttatggctctcaaaccaatgcatatgtccccacagtatcctaccatcttatcttaattattcatattacgagacttccatgatttctctaatctacatttgtacccatttgatgagacatttcctgaatctattgagtctgctcaaagcacaattacatcgatttgtgttctctctgtctcttcctttctttctctttactaatatcagaacatggaaacttcgtttatttacttagcatcattttctgatttgatatttgaacaattccaagctagtattaaagaaagaggtagtgtttgcttattggtgatctgctttgttgtcctcgtcttcttctctttcacaatcttgagtcaacaacattattaacctctttcatctcaaaaagttctttcgtcatcttgggttctctgtacactaagaaagaaatggaaggtgggttttattccgattggatgatagttccctcgtcgtattcggatc

SEQ ID NO: 31648 - DNA, 740 bp, Arabidopsis thaliana landsberg
  unsure (1)..(740): unsure at all n locations
ttctctgcaaatcttgttggagaaagtatcttgaaaagaatttctatttggtggagaaaacccaaactcgaagctctggtgctcatggagcttgtcaagccgcggttggaccggacacgattcagaagctaaccgtaggtgatcaagagatgtacgtggagtatattctgagatcttacattgagggaaacaaggtattggagatcaaatactgtcctgcacaggattgcaattacgtcattgagttnnnnnnnnnnnnnnnnnnnnnnnnnnnnnnnnnagactatggcttcaacgtggtgtgtctctgtggtcatatcttctgctggagatgcatgcttgagtcacacaaaccagtgacctgcaacaacgcgtctgattggttgtttcgagacctaaatagcttatcgaaggaatcaggtgaaaagccattgagcctctcctcgttcgaaaccagagaaaagacttaccctctctcctcgatcaaagccaccaagaaagtttgccctcattgtcttcgtcctgcggatcttggtactaaacaatacctccggttcttgacttgtgcctgcaggtaagaaaacctattttgcaaattagatttctctatttgaagcattattgatcatactaatttgtgtgtttcttgatctagcggtcgtttctgctggaagtgtatgcagccagaggaagcccacaaaacggaatcaggattctataaattctgtaatgtatcgatg

SEQ ID NO: 31649 - DNA, 2520 bp, Arabidopsis thaliana landsberg
aaactcaatgacgtaattgcaatcctgtgcaggacagtatttgatctccaataccttgtttccctcaatgtaagatctcagaatatactccacgtacatctcttgatcacctacggttagcttctgaatcgtgtccggtccaaccgcggcttgacaagctccatgaggacaagagattcgagtttgggttttctccaccaagtagaaattcttttcaagatactttctccaacaagatttgcagaaaatgtgacagcaaaagggcgtggagattaagtaatcaccatcatcaagataaacctcatcacaagtcttaaagcaaatcccacaagaagaaatttgattcggatcaactaccactggtttcaaacctgattccgacaagactttttcgttgttttcaaccaaaaactcagaaacttcatgagagtcccatcggagaaacatgaggagtacggtcgcatcgggttttgataacgagaagatctcagagatttcggcgatctgcttcttcatatttcctttaagttgatctctcgttagaacagagtatggtccctctcgattgttctccattgtgtgcctaagattgacaaaaatcagaaaaacaaatcaatgaatcataacaaagagatcgatcgatggatacacttataaggaatagggttaaggcttacaggtagcttgcgcctcaatcaacaaaaagaatcgaaggcgagagttatcgttcttagttttctcttaatcgtctctagatgatttctgtttcaactttttagggttttaccttttctcactcgcttatgggaaatatcgagttttataagtaaacaaaactattgaccaacaaaaaaaaaacaagtaaaaaactatctgtttttgctaaattgcctgataagtttttaattggaccattggaccttcatctaagctaaacaatcgtctaatcaataaatatggcccattagcacttcttgttttgtctttttgggcccaattcggtttatatagtaatcttctgaggtttcagtttttgagaacaaaactagtcgagtgagagatggaaaaagggacgacaacagaaccacatattttcttgtggagtcagaggactgagaacataagaatcataaacgtatgcttaatgcataacacttacacttttttgaagtatatgaacttaagacatcccctacaatttcctacatatgtctccttcagtttctcttcagagaatccactgattatttcaataaactcttcatctctgtgttctttctgaactatcagaaccagcaacttgatcttttggtggaatttttcatcaacaacttgatctgtctcagcatcactttctgtctcagttttacattcctcgaatcagttactaattttgttgtgtgtttgaggttttagaaagctaagtcttgagccttaaataaacaattgatttttgttgtgggctgagtctgtggaattgattgaggaacctaatccatgatatgaagaggtaaatgaaatccctgttaaaccagacgttttctactaactacatggttttgatttatcaagagtgtattaaaaaaggccaaggggctctaatttcgactatgataatttattttaccaagagcaagtaaataaaaagatagaaattattctgatgactaatgaacatttgaaaacacaatttataagtctaaagaacaaagttctttatcagttgacaagaaatttgggatcttcagatgtaaaagcagtgctcttcatcttctgttttagtccatcttcagggcttttagttcctgagagcaaaactacagtagtagagcgagggatgaaaaaagacaacaaaaggcccacatattttcttatggagtctgagaacatcagagccaagcgttgcttgtcacaaagcattgtaagtgtgaactatcaggaaagaaagaaaaagtcaatgcgacattgaaagttggtagtccaatataaagctgcagaaagaaagaaagaaagcaaaaaaaaaacagaacttaaagagttgcaaggttactctgtatcctagaaccttttgttttatctttaagaaacctagttaagcgatcaatcacttagctcgtccatcttagacgcagtaggatcactgcacatcaaacactctttatggaaccaagtgtttccatatgtgcagcgatcacagagccaaaaaagaccaccatagtcgtcgtaggacttcaccttcacgtcatccaaaccttcttgtaaagtcttgatgaaatgataaaagtagttcccaatgttgcttgtctcaatggttaccttatgcttgacgcaacaaaaattttcataagtagctgacgaggctcttcctatctcctcatttaaagtctttgagaaactcttcacaagggaagaacggtcagcttgcaagaatcgcaagtactccctcttcgacatctgatactctgcatgtacggaatcatatacacagttccatttaaggacttgactgcattggacaat

SEQ ID NO: 31650 - DNA, 1707 bp, Arabidopsis thaliana landsberg
  unsure (1)..(1707): unsure at all n locations
gtaacatgggagaagaaggctatcaataggataataagatgacccaattagtctaagtagaactagttctcattctcaaccagtcacatccacggttaaaattcaaaataattacgacaaaccatatgtaatcctaagtgtcctatgcaaactagtatggcagctggcaataaccatatatcctaattaagtcaactttctgggaattactgcatcaatcaaccttcaaaacaaaaaaacatatgcagtaaaacttgatccaactaaatttttttgatggaaaaagaccatgtttcagacagaagaagggtgacaccaagtacttgaaacaagacagagattagaagagaaatttaccatttcaatgcgatattaataggtgttgtgaggcaagaagtaaaaacgtcagctggaaattcaacactctgaggaagtgtctcatgtacatcacaagcagccagtagaatacagtccttcgggggtccagaagatccccctcgtgaagctatagtaaggagtgaaacaatttgatcatcatacgaaacaccaattgtaaaactcagcaggtatccacacaataagagtaatttgttacctcggcgaaggcattgaggatcccctagcagcagagcagtcaaaaacgtaaatggtgggtgttttcaaccaggaatcaagctcgctgactggcaagggaatgtactgcgtaaaattctgcacacacaagatgaataggtggctgataacagacttctaagaacatggacaatgtagagagaaaggaaagaaaactgaccttattgtaaacccagatttcaccattaggtgtaggtttagggacaccatgcccgttatagtgaaacaaaactctctcagtctttgcatatttccggcaagacaagcagagcttcctgacatcgtcctttgtagnnnnnnnnnnnnnnnnnnnnnnnnnnnnnnnnnnnaacatagaatacaaatgaagaggaagccaaacattcaacaaaggaaggagctggaaatgaagtaatcacccgaggcagccatctctcgtactgaatgctcaagttttggccaatagcctcaagagctcttcttgggggaaacatagaaaaaggatctgcgagatcaaaaacaaaagaagggaaaaatgattgcgggaaacattgaaataaaaaaagaagaagatgagagttaagtgaaagttgggacctatccagcattcgagtcttgcgcagggagaaatcttaataacatcagggggatcaacagtaatgtgcaaacacataactagagcaacacatcctgttttcatctgccattgaaaaagagtgagcaagaagagtacacaatctagtggcaacaaaatagattgggaggagaaactaactcgctctttaaggcgccatcttgggggttggacgatgtcggatgcgtcgtcgtgtctaaggtcacagagcacaagagtctgaggcaagtatgccatgcttgtggcggcggagaggttctcatagctgctacttgcgactctgggagaggcgatgatggacacacgggaatcatcgtgagcggaggaggcgcagtagtcgtcgtcgtcgtagaggtgattggtgacaacagtaacggaagattgagagagcctaaagacaatcaagtcccctaatgccatccaaattgaacaatgagaaagcgaattcaatcagcaaagcc

SEQ ID NO: 31651 - DNA, 443 bp, Arabidopsis thaliana landsberg
  unsure (1)..(443): unsure at all n locations
cgctgacggccgcagccattacaatgggcggcttgttccttcagctttgaatttccatgccactgtctgcgttgaccgcgctgtcgcccctggacgggcgctatgccgccaaggtcgagcccttgcgccccatcttcagcgaattcgggctgatgcataggcgcgtacacgtggaaatcgcctggctgatcgcgctgggcaacgagccgggcgtggtcgaattgcccgcgttcgatgaannnnnnnnnnnnnnnnnnnnnnnnnnnnnnnnnnnnnnnnnnnnnnnnnncggcgagcgcatcaagaccatcgaggcgaccaccaaccacgacgtcaaggcggtcgaatatttcatcaaggaacgcatcggcgcggacgacgcgttcgccaaggcgctggaattcgtgcactttgcctgcaccagcgaggacatcaacaacctg

SEQ ID NO: 31652 - DNA, 950 bp, Arabidopsis thaliana landsberg
cgttacttcaagaataacatcaccccttttaatgtcttaataaaatcagacaatacaatcgaatgtaacttgactaatactctccaataacatcaactatatactccatagaacacaatagagaaagaaaaaaatagaggttactttttcctattgttcctgttggtgacattgcaaaaggttcaacctctcctttctcacttgactgatccccaagagatcgtttcttacgacttcttttagcactatccgaactttttagttttattatcaccagcttgggttaccggagcttccttaatagtcagatcatttgtctctcaagtaaattaggatttgacaaagcagtttctccagtcagcatcttacaattctcctcaactctcagcacatccacaaatagaaacgattcgttcctccggaaagccgtgttcaaagccagcgaaccaactaattaaaaaaattgaccaccacatttaacctataaaacaaaaaacaaatcttccttgagttgttgtttcttaaacaaaaacaattgtcggtgtatatgaagaaaacattgttaccttcaaagcggagatagtgatgtttcgaaaacttgggaaacactattcatactctttgcaaattttcgctgtaaataaacaaccaaaaagaaacattggttttgttagaaaagaaatgaaaaactaaaaaatatagaactgagattataaagagtcacctttgaaatacatacactatcatactcatccggacgttctcgtggacaaagatgatagtgtatctactttcaaaggcgactcttgataaatttgatgagagtaaagaacacaaaagtgtttagaaagaattataaagactctcataaaaataatagaataatttacattatcttatataaagattaggataaacataaatgtaaataatatatttagagagtaatg

SEQ ID NO: 31653 - DNA, 2862 bp, Arabidopsis thaliana landsberg
attggtaatcgtctgggccttctcatggacaaggatgattctgtatctacatttaattgtgactcttcataatctctgtttttttttttttttgagttttgcatcttttgtaacgaaactaatgtttctttttgcttgttcatatacagagaaaatctgcaaagagcatgaacagtgtttccctagttctggaaacatcactatcttcgatatgaaggttacaatgttttcttcatacacactgacagttttcttgtttaagaaacaacaactcaaggaaggtttgttgtttgttttataggttaactgttgtggtcaactttatcatttagttgattctctgattttgaacacggctttccaaagcaacgaatcgtttctttttgttgatgtgctgagggttgaggagaagggtaagatgctgactggagaaactcctttgtcaaaccctaatttacttgagagagagaccaatgatctgactattaaggaagctccggtaacccaagctggtgatgataaaactaaaaagaggaaactgaaaagtttggatagtaccaaaagaagtcataagaaacgatctcttggggatcagtcaagtggaaaaggagaggttgagtcttttgcaatgtcaccaacaggaaaaggtaacatctgtttttttctttctctattgtggtctatatatggagtatatagctgatgttattggagagtattaaaagggtgatgtttttcttgaagtaacgttcgaaactgaattagctgtgaggtgtgagagtgcccttaatctgtataatctttctatgttcaatagatcttgaaaagggagaaaaaagtgctgctactattgaccaagagaatgatcttgcacttgtggatgatgagaacgagagtcataaagaagatgttcgtttaggagcaatagtagaaggtaaacattttttgattagctccaagtgctttaagtaatctcttaactgctgaatttttagacattaatcaatctgctgatgttgagaacgaagggctcaacaaagatggtgttgatggaaaagatgctgatgaggctactacatctgtgaaggctgctaagaaaggaaggacaaagaaagacaaggcagccccgactaaagaagatactgaagttgcttctagctcaaggaacgttgatcacgatgttgttatcagagagccgcaggagaatgtaagttagaagtcaaagaagaaacagtcttcgagcattgtggtagaggaggcttaagtatttgtcatctgatgcatcattgttctcgtttcttcctttattttttcctctacgttgctgaactttagtgctttttctagtttaagaaacttgtttcttctttctcgtgaggtttttggtattacctatgaggattttctcaacgtcaatgtatctaatgcttatttgtcatgtgttgaagttgtaaagttgatcccatgaagcatattttaacgaactaacgatgccattggcttttactagcttcttacttcttgaccaatctcctgagcctccaagatagataggctcagcctcgcaacctcctctgatatgtgagctctctcagacgcgagttccatggcgtcgagaagccaccgcagcgacggtcatgagttctccgccgatgatgactagtttggttaaacgtatactgtacttcgatcttatatgaaagtaaggcccatgggcctggcccaaagtatttgcgacgcataagtccaacatataagggagtaagaccgatgggcctggcccagattatttgcatctgccatttagtgcattgtaaaatttagggaatagacttatacgtacaaccaaacagattcgtcttcttctggtgcggcaagaaatcgccggagaaacttccgaccaacgtgtcggagctgataagaaatagtgtcatgtcacaaattcagagaatcttctcgatcgaattgccttcactggttcctctgcaacttccatctcggatgtaagtcgctccactgttatcacaggttgcagagttgtggaaatgaattgtgttgttattcatttcatgtagggagactcatctatggtatgttgttccagatgaagtgaaaagtatatctcttttaaaacactactctcaaattctgtcaccatctgagaatgataaagttcttcagatgcgaggtaataagcttcagaagaatgctttgcttgctcgcacattggttcgcaccaccattgctagatgtatgttattagccattggagtttcctagttaagttttgtttgcagagcattgactgtaatgtttatatttttattttctagatcagacaaacaatgtggtcgatcctaggaccttgatattcaagaagaacatgtatgggaagcctgaggtgagactgggacagttatttgggattacactagactcatcgtctcggcttatatgtgtttaactttcaattacaggtagattggcagagttataagaactgtgatagcccaccattgcattttaacatctcccacacagattcattgatttcctgtggagtgactgtacatgttcctgtaagtcttttgttaaggcaaatacatacagttttgtcaatgttttcttgttttataaatttgaacacttgcagtttactacgattgtaggttggtattgatcttgaagaaatggaaaggaagataaaacatgatgtcttagcattagcagaaagattttactctgctgatgaagtgaagtttttgtcagctataccagacccggaagttcagcgaaaggagtttattaagttatggactcttaagtagtttctactaacaacagattatactatatttaaga

SEQ ID NO: 31654 - DNA, 1286 bp, Arabidopsis thaliana landsberg
taacactaacctttctcatttcaaatgatcaaaacacactgccgggaaaaggcattccacaagtggccaaccaaaaaatattgtatatcaaaacaattttgtatttgttcgaaaaactgaacacatctttttcataaaacactgaccaactgcgtttgccaccacagtatacaactttatattacgatataaaagtcacactcacatgtaacataagagacaaaaagatacgtaacaatttagaaaatagatttaagaaagggaagcaacaacaataattacaaatcaccaccaaatcccttcacgcccaacacaaacaactgcaaatgccagcagagtcacccactaataataaaaccccttctcctttttgacaagttgtgtcaaaaattagaaattaaaattataaacctgatttctccccaaccatttcattcaaattaaataaattaacaattaagaatctttgacttaatcagcttcgttcacttggtctgaaccagaataaggtcgcaaattctccatcttcctaaccacttccgacatctccggcctctggtccggatgctgtgacgtacactcaagccctagctgcaccatctccgccatcatctcttcttcatccgtcgccaaactaagcaactccgagtcgaaaacttctctcctccactcatctctcgccaccgatttaacccatctcggcaaatcaactccttcctcgttcatcaccgagttcgaaggagctttacccgtgatcagctcaagcaacaccactccgaaactgtacacgtcacccttctgcgacacgcgtttcggatcggttacttctggagcacggtaacccgtagcgcggtttggatttgttgctgatgatcccacgagctgggctaagccaaagtctgagactttagcgtcgtgggatttcgttaagaggatgtttgaggatttgatgttgccgtgagatgttgaagtgccttgtgagtgaaggtagtctagaccacgagctgcaccaatagcaattcttgatctaacatcccagtttagtggactccttcccgctcctctgtttcctgttaacagacaaaagacaattatagaaactaaagagaacaaaccaaagtcttagagtagtaatcattgttcatagatcaaagcatccaatgttaaacacattgtccctaccaattcacagaaactatacaaagtattatggaaatcatatcaatgttaagaatcaatgatcaaagagattaagcactaaacttaaccataatctaaatgtatca

SEQ ID NO: 31655 - DNA, 1203 bp, Arabidopsis thaliana landsberg
  unsure (1)..(1203): unsure at all n locations
tgcgcgcgtaggcatttacggacgatttcgccttcgagagcgcgacgttcctcgagagtgagccattcgtagtactgagcaagactagtctggccttgcttgttcaccatcaatatgaaccttattcccatctccaactagctccaatctctctctctcttccgattcgttttttatttctttcagatcttttgggttttttttttacttcttcttcttcttctacttgggagttaggacacgtcatcgctactctgttcaattttactttcagataaaatttaaaaaataagaaaaaacttgcacggtaatattgggcttatatgggccgaaaaaaacatgcatggtaatatgaaaaaaactaattttattttcagttaatattgggcttatatgggccgaaacatacaacgagtcaacgacccgcaggttcctctctctcttctcttcaaatttcattatattgatataagcccactaatattaaacattgaaaagcccatgttatcaaaactagttttgggggaaaagtggtatgttttctgcctatataagcccactaatattaaggcaccgaaaagcccatggtatttatgtgtactgacgttattggtntgcagttttaagaaattataggaattcattactaaaatatatcgttgaaccattgactacgcacaaaagaaacatgattttggcatcgacaacgacgacaagtaacaacaataaaacgaacagattagccgtcatgccagctacaaattattaggttagacaaatgttatatggttctgttctgtttcaaaatttcaaatgtttgttggttttgatatactgtaattattaatgtttaacacgtgtagagtcaaaagcttcgtaagcttttaaagtgtatgaccctaaaacaatataccgtgagtttaattcaaaactatnnnnnnnnnnnnnnnnnnnntggttaatataatccattaccaccatttcatttcctcttcaaaaattgatacaatagaacatggaataaagataaaactcgatatgtttcgtatgaatgctatagatggcgcatgcggcatgcgatatagataaaagaaaaatgtgtttctttatgaatgctataatgtctatataatcgaaagtcaaaatggggaggaaaaaaagatcataatgtttattcttttataatcgttacatttttgaccc

SEQ ID NO: 31656 - DNA, 1209 bp, Arabidopsis thaliana landsberg
tccagtgatattcaaatgtcattggtttgaccctcaagtgacgagacggacacattctaatcttgggatagtcgaaattcgacaagattccaccttagcaggagacgatgtctatatcgtggcccaacaggccacacaagtgtattatctcccatatgcgtgtcaaacgaaagaacatcttaagggttgggatgttgtgtataaggtatcgccgcatgggaggttacctgttcctaacgatgaagattacaacttagacccggacacatatgatggagagttcttccaagaagatgggctagaagggcgatttgagatagacttaacagaagctatcggaatggacgtagatattgaaatggttgttgatgaggaggatgatgaggtgcaaaatgataatgacttagtaatccttgaaggcaatgacattaatgacgaacttgtgccttcagatggtgttgagattgaaatggttgatagtgatgatgacacttatgatccggctaaccccaacacatatgaagattatttttattcgttgtaatgaaatattttttatttcgtacctatttctaaatacatattttttatatgtgcttatttgcttactcttaattgcaagttgttggacaaagatggtgggcggtgggatgaggacatggaggggaggagaagcactcgtaggatggtgtaggaggcacaacaggacgaagaagcccagcagcaagtggagcagcatgccgctatcgatgcggtgtagcaggacgacgacgaccagcagcaggacgcctcgggttctggcgcctcaggttcgaggagcatctacctgcgaggtcccgcgagtctccctcagcgtcccatatttcgggacaggcgaccgctgattcggccggatggggagaggtatgtaactttatgttcttcattcttgttcatattatgtgttcaaaatcataatataaactaatactttttatttatcacttggacaggtcttggacggttgtggattatgctggggggtcatcattgcctccccaattgcattcctctgtgcagggaacacttccctggagtggttgagtacgccagagtgacgggcccagcctacaccttcaaccactacgccatcgcccccgatgcagtagaccgggacagccggaaattcaataacaaggcggagcgggtgaagcaagagttgtgggtaag

SEQ ID NO: 31657 - DNA, 5396 bp, Arabidopsis thaliana landsberg
  unsure (1)..(5396): unsure at all n locations
tagcttgctatttaacacccccataattctctagatccctcatctaattctcgtttatatttttccatcagtaagaatatacattgtctatagccatttgagcaattaaggcaagtagtgatcatcctatatgcaaaaaaattagatggcccaatttcaaaaagacatcagtgaaaggagtttccgaagagagcaagcaatgaagcagagatagaacctggattcaaaaatttcataaatagatcggagagtgcgaaaacgtaatggcataaatagatcagagattccacaatttgatgatgatgaagaagcatagctcttgtggtatgacacgttggcatgacatgccaaagctacccgcgcaagatggaggtgaagcagggactcactctgtttgctaggaaccaggacatgaaggttcttgacgctgaaagcggacacgactttttgtggatctacttttcattttccttgctatccctttggagtctgtatgggaaatcactggaagcaatatcgacctagtatgcattggcaacttttgtagaagcttgaaggacttgagctctaggggaggcacagatgcatctactaacacatgtatgcttccttggcaatatagtttgcagaaaccgttgcttggggtcagttatttaaacagtgacggtagttctcagtcgacacctcatggtagcaatgggttagttaagagaggggcaacatacattgtctcagatgatcttactatttgcggaaagaagaagtttgatgtgaacttggacgatatttttgagcatgaaatcaacattggcaaaacacatgtatatctatattactattctttcctgatatttttttttgaatctgacactaatccaggccataggtttactaagagcctcattcgtgacatccactgccttgactacggctttcgggagctttctttcagagaaacgactctaaagcatcaatcacatgccctctgtggagcagattgatttgaagtttaggttttgttgtctacagtgctagttgaacaagttaccttctcttttacactactgttaagtacaaccttttgttcttgaattttaatgtcttttgattcaaaaaatgtttatccttttcagaaaatagaatctaaatacatgatcaggttggtgaataatgtttgagccggtaatgggattggggttacataatgatgatcccatagctcatttcatacagccagcaacatacataaagtgttattataatacaaaagaaatactttcattcatcaaaggacaaagaacaagaatctgacaataaactattgcttctgcgtcttagtccaaggttgtgtatcttagatcatatgttgaagatcttggactatttctgatatcggcggtctaaatcctggttccatctacagacaaagataagcatgcacagaagtcaaaagggttagttaatattctgatgtcacgtgtttgacattgctttctcatctagttaagtgatgaatgaagttaagtttacctgcagtgaacgtgatatgatatctgcaaaacgtgacaatgatttcattggatacgctccgtgtaatgacggatcaaccattcttgtcaacgcatcgatgtcatgaagccgaggaatcgcccactgagctagtgtttgatgtcccctcggccttgtcctgcaaaaaaaaacagggttttgtcttgagatagtgtagtacagtgattttgcataagaaacataagtgaacatgttgacttttgagttcagactcttttatggcttctattagttgtctctttagagtagctaacctgtcaaatggtctgcgtccagtgagcagttctaacattacaaccccaaggctaaatacgtcgctctgacaagtgtagcttccataatcaacctcaggagcggcataacccgccatctacaattttataagcaaacatcatatcctttacaacactcactcttatgtttgggatcttcaaaataagatgacaaatttacctgactcgttgggcgtggtggtaacatataagccaaaccgctgtctgcaacacgtactgagagctttccatcaagaagaaccttggaagacttgaaattctggtgaacaaccggcggttgacatacctcatgaagaaacctgaaaccaaactctaagatcctatatgttccaaatatagattggcgtaacatgttgaggttctttaacttactgcaatgcctttgaagctcctaatgcaatatttatacgtacattccaagtgagcttcttgtgcaacttgcgatccaaatgtagtgcatcttgaagtgatccattaggacagtactcatacacaagtagcctttgaccaaactcgttacagtaaccaagaagctccaatatatgaccgcgtttaagcttcaacacattggagactagattgaggaattcgccgtcactctgtgttctgttgatggtattgctcagcttcttcaccgcaagaaactatagatcacaacgtgtcaagacgtaaataagaatgcacagcataaaatactgtaagaccaaatgacaaataagaggaaagtgtcacacctttccatgacgaagctcagctctgtagacattaccaatcgacccttccccgattatattctcttctgagaaattatttgtgtattgctgaagtgaagcaatggtgaaaacagtagcagaagatgaggaattcaagcccggggggaaatgagccgctctctttgaagcagtatcattggactggaactgcctcggtggttgttgcagcggcttttgaggtgtattaacatccttattataatatgaagtaggaggcattgctctccggctctcttcagcccgctgtggcattggatacccatatttcctgtctccagctccatatccatcgaaaggcttaaccataggctcccgagaaactgcaacaaaagaaaacaccacagcagtttgccgttaggtaatgagccaaagcacaagtttcttttcttttcttggaaggaaaagaatcagtgtaccttttcccatagtgggggttggttgagatggaggcttattgaagtatggtcgttgtaaatctttacgagctccactgtaatatcggttatatattttacttctgcaacatctccaaagtgtaacacacaaaccggatacaagaacaattatggccactgaagaaactactagaatgattctttgagtggaccagaattttcctgatcctgaacctgaaggaggtgatatttgcaaggtaggttgccctgacacagagttccagggatctcctcctccattatcagaagaaggtggtgaccagaccagaggtggtgatggtggtggatgttgttgtggttgcagtggagcaaaaggagcaaaaggtgctgggggaacaccagaaacaggagggatacggggaacaggaggagcacggtgagtagcgggaggaggatcaaccacaggcggaggcggtggtgttataatcgatgtattgaacggagttccatcttttctgcggttataatgacaatgtaacatgaatggctaaagaaaaggaaaaaaaaaacattcaagttttcttttagtaatacttacttgaagtttggaattttcaatagatttggcggtataggtcccgagaataagttgttttctacattcctgaatcaaaaatatgaaaagccatagtgagatactgaagttggcttaatggttggagagtcaagaacaaagagtatgcaaggtgaaaaacgattacaaatcggttaagaaaagatcctctataacatcaagtgttcctgtgagcttgttgtcctgcaaatacctacagtccgaccacatcacatataaaagcaatgataacaatgtttgtatacggtttcatatatgtgcacttacaatatcttaagagaagctaagtctcccatggaagaaggtaaatgcccctccagtatgttagacgataagtccctgcattagaaacttaatgtataaatgaaagacgctgatgggaggatacaaaatgagacttagtgaggaggaaatatacagttttgtcagttttgatagctgctgaaagtaatctggtatctctcctgatagaagattgcttcccaatgacctgaagggaaaagaaagagtctgcttcaaacagaggaaaaaccgcagatgcaagaaacggtatctacattaataaagacttacagttcagacaaatcggatagaaaggacaatgtaaagggaatgttcccagtgaagcgattgcttgagagagatctgaaacaagaaaatgaaaccaaacatgaagtgtcttttaactgttggaaacataagtattgccatacacatagtcaattctcaaacgcacaggtttcggatggaagaaggcaaagcctgcggaattgtccctgaaatatgattgctactgaagtccctgtccactcaaacaaagaagagagaaaaagtatcacaaagcaatttaagattataaccaaaccttatagtcaatggtaacaacatcttgcatgttcttcacatagcaagaagcctcatacaaaagatgaagatgaaagaaaacaagacangaagctttgcttacatgacttggatagatgaaaaatcagccagagtatcacttaagcctccacctaccttcatgccaggtatctttctgcagccaacaacaataattcacgtggttagaacctgaattggtgactcaaagcaaaccataacaaagagttacaagagcagaagaggaagtatacatttctgtgatgtttgaggagtcacacaccacaccttgccacttttctccacaagggtctcctccaaaagcaagccaatgatgtagagatggtgctcccaaagtgatatacaagttattaatcgccgaaactgcagaagttattaaacaacagacaaacacatcaaaaagtaaaatttctagagattaaagaatctttcttatgataaccatttaatgaagaacaataagaacaaatttcttggtcttgaactaaaaccctaacaagagcttatgtgtcaaaaacctaaactttttagggtttttgaggtagcctcaaaatcatagaactttgccaatctggagcttcccaaacagctatattgcttacctagtttaccctaaaactgatgtaagtcattttcactagacacaagtctaaaaaaaatctagagtgttcactaaaccaaaagaaggagagtcaaagcaaaatccaaataaaaaaaactttgcagagaaagattattaccatctcgtagattagtaactccagctgagaaaggcattgtcaaggctaaaacagagagaccaaagaacacttcccatcttgtaaaggtc

SEQ ID NO: 31658 - DNA, 1194 bp, Arabidopsis thaliana landsberg
gccaagaaggttgactgtgcctgcagttcatttgagaaacaagtcccagttgatgccatcttccagaaagatgtaatgattgatatcattggtgccaaaggaaaaggttatgaaggtgtggttacaagatggggagtgacccgtcttccaagaaagactcatcgtggtcttcgcaaggttgcttgtatcggtgcttggcatccagctagagtctcctacacggtggctagagctggacaaaacggttaccaccaccgtactgaaatgaacaagaaggtttaccggcttgggaaagttggccaggagactcactcagccatgaccgagtatgacaggtaataatactaacgatcttgaggtgtttcagtcatctgtgtagtaagcggacttgtcttggtgttcatatgctgttttctgttttcttttcaatagaaccgagaagcatatcacaccaatgggaggatttccccactatgggatagtgaaggaagattatttgatgatcaagggatgttgcgtggggcctaaagaaacgtgtggtgactttaagacagactttgcttaagcagacgtctaggcttgctatggaggagatcaagcttaagttcattgacgctgcttccacatgggggacacggtcgtttccagacttctcaagagaaggccaagttctatggtagaaccatcaaagcttagatttcaagtattttgcagatttggaagttttttccatggtgtctgtaggatctctcttgacagttgagatcaatcatcttcttttcagttctcaatatgcgtattatcaaaagtttctttggtttaagaatagattggcttatccatatatgtcgttatgttatggccgcaagtcccattactattaaattatagtgagcctaaggcatccagccccttggatttagtatccgagaggcttaatatataggtatgatttgatttgttcacaattataagcttttatttttatggtctcaggacgctagctacagtaaccattgaatcatccatttgacctaacaagaattgtatgttgcaaacatagggttcatgattcatgaccatttcattcacgagttcttcaagtccttgaccagcttgtgaaagcctcttaattgcggtttcctgcccttgtaaattttcctaaaatcagtattaccaatgaatcaggtagtt

SEQ ID NO: 31659 - DNA, 1316 bp, Arabidopsis thaliana landsberg
atatcccattatgctaatttagaaaagattatatcaaaaccaaaaatgttatgtggtatgtataatgttactatattttaaatattaatgtgttagagaatgatataatttgcaaaacttttatctataaaaaataattcttaaattttaaaaattactactttaaaaaaagaaatcacgggaggggtaaagaaattatagaacgggttttattttggaattgggttatatggtggatgtatttgaatcaatatttataaaattttaaaatattattaatatgctgttttaatagaggttacaacttcgttttttaacaattgtctcatagattcgtggtatagccttacttaataacaattataaagtgtaaaatataaatattttataaaaataaaatttgcaaattttaatatatattacttttaaaaaataaatcgtcccgcggtataccgcgggttaaaatctagttttaattgatataaagattaacatcacttattataattgttgcaaatattaacatcactagttgacctattcgtttgacaaataaaaaaatgacctctttaagtgaatcttataacaaaagagactcttaatcaaacgtgcattgaatactacaacttaggatgacttattcaaactgaaacagaccaagcttaagctaaacgacttggttatattctttatgttttgctttcttagtgatcaactgaaatacaactttgataaatataacgtggtcttacctagatattcctctgggtattcttgtgattcaattatgttcacgtctgatcggcgaagacgtttaataaggggtttgttctcggtgaggaaccttttccgaacataagcatctacggatcggatgtagaacccacgttgagccatagtttgtttcatattgtcaagaaccgttttcaagctcaatttcttagggatgtgaacatattttacatcccacaattccttaagaaaaaagaagaaaaagtatactgatccgaaaacaattaacaaaaaacgaacaatatactactacattaccttcataggctgcaatccacctctattagtgaggccacgttggtgcttagatcttgcattggaggaaatccttttggatgaggagtttctgattttgataaaaactcatctctaccacgttcaacttctttctcttcatgtttcttcacactgcgtcttccctttcctccaggttttcctcttcctccaaccattgttgacagaatcggcgcaaaatgagggttcagacgaaatgatggaggtttgtacgtattctcaccctcggt

SEQ ID NO: 31660 - DNA, 3796 bp, Arabidopsis thaliana landsberg
  unsure (1)..(3796): unsure at all n locations
gagaatattttttttttttttttgaaaacgggtcgggttgttttaattagtatatataaagggtttagaaaccttctttggaaatccaaagttgatgaatcttcatcctttaacaaatagagaatagagaagagaagaagagaaaagataaacaaacatagtaagatggacgacggcttgagagcttgattcgatgaggtagaattccaatggagctgagagtctcgacaaaagaggcggcaagggaggcgcaggaggctgccaaatttcgtgggtctctttagggtttcccctaaacttagtattttaggccttcattgggttaaagggtagaaggagggattgaagtccgcggcaagaaaaggggaaggagtggttgtgcgccctagtggtcggtggaaaactcgaggagacgcccaggttcaagtctccatggtcggcggttttagattgattatttccaaaccgcgattctggaacatgtcttcactcttcgggccatcacttctaaacggcttgatggattgtttcaataagacttcgacgttaatcttgactcttctagctttccaatgacaccgggataccttgatgccgtgatcggaaagaccttggcttgatgccaaacaccttaagcacagaaactgttctcaaacggaatttgatcaactactactcatttttgcttgaaaactcataattcttccttgaaccttaaatatttgaaatatgtctcataacactgtattctacttattttatgcatgtatttatcatcatttagctttgcatttgctcattgtttcatatcattttgcatcacatttagcttattttgcacacttagacatttaggatcgtcttgcatacatattgcatgttttggtgtgttttcaagtgtagaaggagcttacaaggattctactcaaccctctactctatccaaccaggagggaagtagtagagcattctactcgaccatttcactcgatccaggcagccacagaagagccagcaattcactcgacccacttactcgatcaaggcagcaacagaagaagcagaagatcgatctactcgccctcctactcgctcctctactcgacccatttactcgaccaagggcgacccactctaccagacttgttgatctatcaaagcgtcttcggatcctcctcattcctcactcaactagacaccttagcatacaaataagagaggaagaagcatctactcgaccaattgatcactcggagcatagacacaaaggcgcagactttgcagcaccctctttactcaatctccatgatcaagcactcgcccaaaccgcctcaagtctcttgtattctagtgaatctagggttttcaacattttactatcaatagatcactttgggatttgtccaaaggatctagctttaatactttagttttaatttttgttcttgaatcttcaaaacttaactactcttaatctatttcgtttttgtatttagttctttaagtaaagttgtttagcttgtttagatctacattttgttatgatttcagtagttacagggtttttgttattagttatgttgcttgagtagtgattagtgttcttgaggatggattagattagggtaatctctaggttagtcaggtggttaagattaggttagatcctttctggattcgcttggcccctatgcggctatcgctcgctaatgtgggaattcgaccatatgtatccagcgtccaaaagaagctgaaatgaatgccttatctaggaattataaaaatttgtagactatagaccaagagattggctagactacttattggctttggtagattgttgcttaaaccctgctgtactatgtttcatcaacgagagttgaaattaggaagtggtagagttatgggggtctctatcagaagagagtggattgacctggtttttgaatctatcctctagggtatctacctttcccctgttagccacctgatgaaccctagagttgcccttattaatgaatccatccttaggacttctattcttcttagatttatttgtattcaccccttgattgcacttttatttacctgttatttgtgtcacatgttgattgcattttagttcttaaatttgttgcatgttggttctactcgacccaatgatcgagtagggcttttaagttcttatttttgcttgtttgaatcctgacctaggattgttactagaaaccaactatctctataatctgggttgacttagttgcttctgtacacatcttgattcctagcaataacagtggactgaattgacaccccctatagctgtattgacatgctagtgtttaaggggaattgaactgaacctcacattctgcacataagtaggcataaaaatctacttatcatatcttcttcagaggagttgaatggcattatcagatggctttggatgcagctagtaacggaaatttcatgtcaagatatccataggatgcaacaatgttgatataaagcttatcttccagcattagtaccaacatcgttgacattgcaaggaaaacgcaagttcagtatgtttcacaggttaacagtttagccacttcagagaagatggatcaaaagggatacatgagctacaatcaacaatctacacattagaaaccggttcagcaaactacaagcacaccctccacccgagaccactaggatgattgaatcaatgttcaaacagattctcaaaagtcaagagatccagacaacagattttgatcacaaactggttgcattatcagaagatatgaatgggatgattcaattattaaacagtcggaccgagcatttgactacaaatatagcagatattagtgttatccagttaaggagtggaaaacaactaaatccagtacttcaaagggaacttcctacagccaaaatcgtcaatttggaagaaaatgatgatgcagtttttgcaaaccagacaccagtgtcgaccgtcactgctgggtgtcgatcgacaccagccaacgcagacactacagaacccgacagtgnnnnnnnnnnnnnnnnnnnnnnnnntcgacaccaaccaagtccaaacatgcaaattctccagaacccaatttcagctgtagaaaaggcaaccaaacacaaggttcttttccccaagagtcctaggaagtccaaacataagctagatgatgctagatgcaaagttatgatggataagctgattgtacagatgccacttatagatgttgtgaagtcttctcctatggtcacacaatatgtgaagagtatggtgactaaggattggcttactaagaaagctgtgatgaagatatctacagaggttagcgacattattcagaacaagattccaaagaaacttccagatctaggtagctttgttctcaattgtggtatccttaacgagagttttgagcgatgcttgtgcgatcttggttctagtgtcaacttgatgccacgttcagttgcgcttcggcttggtttgacaaatttagagcctacgcaaatcactcttgttcttgctgatcgactgtccgtagacccgatggtatcctatatgatgtccctatacaagtcggttctagctacattcctacagattatgtggttttatcttatgagaaagaacctaaagatcctctaatcttgggaaggcctttcttagccacaaccggtgccctaattgatgtaaggaagggcagaataggcttgaatgtaggtgatcttacaatacaatttgacatgaattaggtggttaagaagcctacca

SEQ ID NO: 31661 - DNA, 3317 bp, Arabidopsis thaliana landsberg
aattgttgttggcactcccgggagaattgcagagataagcaaaggtgaaaaattgcacactcatgggtgtagattcttggtgctagacgaagtcgatgagcttttatcgtttaatttccgagaagatatccatcgaatactagaacatgtaggaaagagatctggggctggtcctaaaggagaagtcgatgaacgggctaaccggcagaccattctagtctctgcaactgtgccattctcggttatccgagcagctaaaagctggagtcacgagccggttcttgtccaagccaacaaagtcactcctcttgataccgttcaaccatctgcaccggtaatgagcttgactcccacaacttctgaagctgatggccagattcagactactattcagagcttacctccagctttaaaacactattactgcatctcaaagcatcaacacaaagtcgacacgttaaggagatgcgttcacgccctcgatgcccaatcggttatagctttcatgaaccactcaaggcagctcaaagatgtggtctacaaactcgaagctcgtggtatgaattcagctgagatgcacggagatctcgggaagctagggagatcaacagttctaaagaagttcaagaacggggaaatcaaggtacttgtgacaaacgagctctctgctcggggtcttgatgttgcggaatgtgatctggtggtgaatcttgagcttccaactgatgcggttcactatgctcatcgagctgggagaacagggaggctgggaaggaaagggacggtggtaacagtgtgcgaggaatcacaagtgtttatagtgaagaagatggagaagcagcttggtttgcctttcttgtattgtgagtttgttgatggagagcttgttgtcactgaggaagataaagctattattataaggtgaaaatctaaagatgtaattttcagatactattattactattgaaaattcagagtcttgtccctttttcttatatattgtaaacatatttttaccagacgaagaacatctaaaaccagtgtcgaatttactccagttttgaccgactctgactattacgaaaacccataggctccatgaaacagcaggcccctgaggcatttcaccgaacaacttgtgggctatatcattgaaccggtttcgaccgtataactcagctaaaccaattccagtatagctttgactgaaccggtttaatcgataagtttaaggtattcttttgtcacacagagtgagtttgaagaagaagaacgattcagcttgagatggcgaggatgatgatacggagattgagttctcaagcttcgagatttgttcagcctcgtctcctggagataggtactctgagaattgctttgattaattgcccaaatgagctacttttttgctgcgaacgcggcttctctactttcagcgatagaaatctctcttatagagacaaattgagcagtgggcttgtcggtattaaggcagatgatgctgttgatctgttccgagacatgattcagtctcgtcctcttcccactgttatagatttcaatagattgtttagtgccattgccaaaacgaaacagtatgagctagtgttagctctctgcaagcaaatggaatcgaagggaattgcacatagcatctacactttgagtattatgatcaattgtttctgtcgctgtcgtaaactttcttacgctttttctactatggggaagatcatgaaacttgggtatgagcctgatacagtcatctttaacactctactcaatggcttatgtctcgagtgtagagtttctgaagctctggaattagttgatcgaatggtagaaatgggacataaacccactctcataacgcttaacactctggtcaatggcctttgtctcaacggtaaagtctctgatgctgtggttttgattgatcgaatggttgagactggctttcaacccaatgaagtaacttatggaccggttttaaatgtaatgtgtaagtccggccaaactgcccttgccatggagttgctcagaaagatggaagaaagaaatatcaagctcgatgcagtcaaatacagtatcatcattgatggtctttgcaaagatgggagcctcgacaatgcattcaaccttttcaatgaaatggaaatcaaagggttcaaagctgatattattacctacaacactctcattggaggcttttgtaatgctggtagatgggatgatggtgccaagttattgagggatatgatcaagaggaaaatcagccccaacgttgtcacattcagtgttttgattgatagttttgtgaaagagggaaaactacgagaggccgatcaactgctcacggagatgatgcaacgaggtatatctcctattactattacatataattccttgatagatgggttttgcaaggagaaccgcctagaggaggccatccagatggtggatctgatgattagcaagggatgcgatcctgatatcatgacgtttaatatcctcataaatggatattgcaaggctaatcggattgacgatggtttggaactcttccgcgaaatgtctctgagaggagtgattgctaatacagttacttataacactcttgtccaagggttttgtcaatcgggaaaacttgaggttgccaaaaaactcttccaagagatggtttctcggcgtgttcgtcctgatattgtgtcctacaaaatattgctggatgggttgtgtgacaatggagaactagagaaagcattggaaatatttggaaaaatagagaagagtaagatggagcttgatattggtatatatatgatcattatccatgggatgtgcaatgctagtaaggtggatgatgcttgggatttattctgtagcctccctctcaaaggagtgaagcttgatgctagggcatacaacataatgatttcagaattatgtaggaaagactcactgtctaaagcagacatactgttcagaaaaatgacagaggaaggacatgctccagatgagttgacatacaacatacttatcagggcacatcttggtgatgatgatgcaaccacagcagctgaacttattgaagaaatgaagagtagtgggttcccagcagatgtttccactgttaagatggttattaatatgctttctagtggtgaattggacaaaagctttctagatatgctttctacaactcgggcttcattgaaatgaatatttcttgtgtagctatgatttgttgcttttcaggcatcaacaaggtcaaatgggctcaatttttgtcctaaacacattgaatccattgaaca

SEQ ID NO: 31662 - DNA, 1174 bp, Arabidopsis thaliana landsberg
gcatctgactaatagagataaagagattcacagagtaacaacacaccataagctaatttgtgttatttaaatcattagaatagagaaccagatcttgaatcattagaacaaaaaataacaaatttgattaaagtttcagtcttttcttcactaaaccctatcaagtttcgacaacacacacaatcgatcaaaaagaaggttaactttaatccgaaattaagctattgaatagccaaatgagaagaaaaaacccaatggaagtacctctgcgagaagaatctatgtaatggtccgttgtccgtttgtcgagctcagctcagacatgatcttccacgcggtgccgccatctctttgggcccataaagaaaaagggcctgtcagagaacccatttcaacagatagcccatttcttcttcacaaaagaatatagcccatatagcacattttggcatattctctcactccaaataaaattgcactttgcgtttgcggtctagcaataacaacaaatattcaggcatttaagaaaactactagaagagatagaaaaacagaacaatatgtatattgggttcatgggggctcctcaacacagactacgtcaacaggttagatgcgaacaaagactcgaataatgggaccaaatacatcatacactagacgagaaatagtttttttttgctaaactgcaaatatcgtataaatgaaaagatagatttacatgggtttgaaccttgaaaattgatttggcaaaaagttttaaaacaagcaagcaatatagatcagtctgggttgagcccattttagtgcaaccaaagagtcataagccgcctgaaacgcttcttcagtcttcttgcagtaatggagtttttaatctctctgtcaatggtcttgaatatcaccgatggaagaatatactcatgattgtgatgcaaattatttctctgtttccaaatggcatagataacagattgagcaatgagcttacgtagagttgttggccgtgaacgcttgttcttttgaagagtccatgccatgaggtcgttccacacaacaaagttgatgggagggagctccaatctcacactaacagtataccagatataacacgcatattcgcaagtcaaaaacaagtggtctctgtcctcaatgtccaagaagcaagcctagcttt

SEQ ID NO: 31663 - DNA, 1251 bp, Arabidopsis thaliana landsberg
tttaaaaaaaccgaaaagaaagattttaagaaaaaataaaccaattcaagtggggcgagattagatactatattttgaaaatatattaatgggaaaatctcaacaaaaatctccaagttaaaatattttcccaattaaaacttctaactattgaccaagggttcattaatgtttttacaccaaaaagtataaggttcgagttccagctattgcgatttattagcagatttgcagattaatagaggcaagtgtgcagaaaatctacaacgaaatacaattatagccgtttgccaagattttacgcagagaagatcttgaagatgtccatcaaacgcatcgagaaagagaagaatgtgttgtctgtcgtggatctaataaaggtcggaaggaattgtccatgatagaatcgtttatgtaacagttctcataatttgtaagggagtaatttatctataccgaaaaaagtacacctgtgtcaactatttaatttaatgatgcttaattaccacttgattataagttccaaatcgtgtaatccacttactaaaaaattaagaattttaagtttaattccttcatttacgctacaaatcaatcaaaaaaatgataaaacatagatgaactattaatctatttgtgattaaaacaactcatcgttttatgtcactaatcgggtgatcaaaagacgaatatacacaaccaagttaaaaagtagaaatgatattatattgcttaagttgaagtgtttatttgtataacattttcacagccaaccagaaaacaatttctagtcaccggaatcttttactggaaacaacaaccataacatatatatcttacaaacaacttttcatctttgatattaaaccgatgcaacatttccatctttgatcttaaaccgatgcaaccggaagatcattcgaaccggtatcaaccctaaacacatttttgcttgaaggcaaaccagctactggttcatcttcaattccacattcattagttcctctccttatcatgaaataaccatcctgcaaatttcatacatgtcaacaacattcatatgaaaacaaaactaaatctagaactattcgtaatttagtactaataaaaacttacatcaccccagcctctggtccattgatttgcccttaacttaacacaagagaaaataccaaccaagaacggtattaatttccggtaatttcgaattttcgattaaaaatctcacgaaaatgtataacattacccaat

SEQ ID NO: 31664 - DNA, 1704 bp, Arabidopsis thaliana landsberg
tgtggatgaataaaacggaagcttaacatgctttccaatttgacatgcattacaagtcaatgtgagagtctttttatttggatgaaaataagaataagaaattaacgtcttcaaaacatcgttgctagggtgtggtagtcttcgatgccatatgtcagacgattgagctagaaaggtagaggctggagctgaagttttattgaaagctggaaaaaccggatatagatccccactgctatcattgcgaagaagagtcctcttggtgcgaagatcctttatagaaaagccaaatgggtcaaattctattgagcatttgttatccttagtaaatcgacgaaccgaaacaagatttttgattatgtcacgtgtgacaagaacattatgaagagttaagggacgagatttattagcaataaataaggatccagtggcagtaacaggaatgcaaccaccattcccaaaaatgacttattttccgatgctaggataaagagaaagttggagattattacctgcaccagaagtcaagtaggctgttgcaccagagtccatgtaccactgagaatcagggggatcttgaagagaaaaggtgttgaatgcttctgcaagatcagccgtgctctcaggtttaggagtcctgaagtgagcgtttgactgctgagaatggtaaggaggtaaaagaccaaaaaagccttgtccattggcattcagctgcagtgggtatccccactgatgattccacatctgatacgggtttggatagaatggtggcctgttccaggagttgaagccttgacgattgtaaccatatgaggatcgtcctccgccccgaaacctgttgttgcctccgccacgtcctctgtaagtcatctgagtaggacctgagcgttggtagttcacatgaggcgcctctgagataaaaagcacagtagaggaggatgagtggtccacatgtgttgggttcggtcttcatgatgagccgttcaggtgatcctcttcatcttgtaacatggttgtggcgtcgtcgaagcgcggaagtggctggcgatgtttgataacattgatgatgttgtcaaacttagcattcagaccattcaacacgtacatcatgagtgtccgatcttgaactggagcatcaacatttgagagagagtcaggaagctttttcatctcacgacagtaatcggcgatcttcatgtcaccaatctctttcgtacggagctcattgtccaaacgaagagcacgagcatccttgttgttgcggaattgattttcaattctcagccagatctcccttgaggttgaaccaaagacgaacgaaccttggaactgctttggtgtgagagttccgtagagccagagcttcacaattccatcacgtttctgccagttaacatcagcggcgttggcaggttgaagggttccatcgatgtgaccaagaacatcaaaggagaggcagtgggtgagaaagagttctctccacgcatcgtagttactctcttcaatgtcaagaatcacaggaatgtgagatttgatgttagagacaccatagatcttttctgggttcatgatagcggccatttttgagtaaggaaaagagaatagagaagagatataagagagaagaagcaatcaaagagagatgtgctctgataccatgtaagattgtgtaagtctccttgaggagatagctttgcactagag

SEQ ID NO: 31665 - DNA, 2146 bp, Arabidopsis thaliana landsberg
  unsure (1)..(2146): unsure at all n locations
atcggatatttttactggagatttaagaagtctgaaattgttagatcgcagctatgtcgtactctgactccgattcgtcgtctcatggtggcgagtacaagaatttccgacagattacgcgtgaacgtgagtgttctctatctgtatcgattctcatctgttttgactctcgttgatttggattgacttgtcgattttctggattctcgtgatcgatttctgattccggtttttgcggagcagccattttagttttgttgtttctgtttgattctgggtactacgttcgtgagaacgataatgtgtatttctctgcggtttattcgaaattgaatttgtgaggagttcaatggctaagacttgtcgcggaattgcattgggacagttgtttgatgtaatattggggaaatccgttgcttgttacactggtttggtttctaaggttggaataaagttttaagatgaggtttatgaataggtagtagagctaaaatgttgatacgttttaccaaatgttgccaggcacttaggaacagaaactgatacatgtttgaaatgctcacaatgaaagcatgtactgtgtatacatgtaaatgcagacatggttgtttaatgtttgagaagaggtttgtggattatgatcgtagtcagattgtagagagttatatgcagtttcgctcttgtcatgcatctttgggtctaaaattaaacgagggctttcgctgctataattgcttattttctcttaagtctcattagttacatttcggtagtctatctgatctattggtatttggtagtctatctgatctgttacatttctttaattcccaggactcttgtatgagatgcttagatctgcaaagacagggagctcaaaatccacctggaaggtatgttttccttgtacttcactgtggactggccagataatgtttttccgctttaaggttgatacccatttttcggctaaatatttcctttttcgtattttaggtactaatcatggacaaacttactgtcaagataatgtcgtacgcctgcaaaatggctgatatcacacaagaaggagtttcatgtgagaatgaagtatttttgtacaaattctagttccatatgatactttatttgggaataacttaattgtcgtaagatattatttctctgtagtggttgaacacatattcagacgaagacaaccacttccttcatgaatgcaatatacttcatccagccannnnnnnnnnnnnnnnnnnnnnnnnnnnnnnnnnnnnnnnnnnnaatgtgacatttgttcctctcatataatgtttgattctgtttcatcagtgtcatcatgttcttgtcagacatgtctgggaaatcacccttgtacaagaagtaaggacatgaccccctcttagttatcaactctatcctaacgacaatctctttatgaaactgattttcttctttattcctctgcatctgtgaagggcattcgttttcttcagttcaccggtttccaaggaactggttggtcacatcaagaaagattcgagtgtattacctcggattggagcattgagagaggtgtatattgccaaaaaacttactttctagtgtatactgtgttgctatttaattttaacttattatttgattttcgttctacagatgaatttggagttttttgccattgatagccaggtatgatcgttctgaatatcctgtgtttgtgcattttagtcccgtttatattggtccacattatatggtttgaaatggagtgtagcctgcatatcatgttgttagtcgatgtttcatgatgtgaaagaggggcaagagataatttatttatgacaacttgtacagggtttcataaccgatcatgagcgagctttagaggatctttttggtgatgaggaaacttctcgaaaaggcgatgcgtgcttgaatgtgatggcttctcgaattgctacagtctttgcttcgttgcgggtaccaatcattattctcacgattaacatgactatattatgcggatgactcttctgaatcattttggacgttacaggaattcccagcagtaagataccgagctgcaaagtcacttgatgcatcgacaatgacaactttgcgcgatttaattccaacaaagcgtgca

SEQ ID NO: 31666 - DNA, 3300 bp, Arabidopsis thaliana landsberg
  unsure (1)..(3300): unsure at all n locations
ggcaaacgacgacgtatgcgactattcatacggaagatgggttcgtcgacgccgtgatgtggacgaaacctcttattatggagaagagtgtcggtttctggatcctggttttcgttgtctgaataatggaagaaaagattctggttttcgacaatggcgatggcaaccacatggctgcgatcttccacggtaattcttatgtaattttgcttggacctgaaggtatggttctgagtaaaacaaacatcagggttagggttacaggcaattacattgatccattagagcttatagagttattacaatcactggttctaaaaactaactttaatcttgtttgattaaaaagaaacaaagatttgcccacttgaattttgaattgcttttgtgacgtaagggttgaaactttaaacctttatttatgaactttgcgccaatgccaatgccaatcaaattcaattttcttttactctatgtgttaaatatgtttacttgttgtgaaaacgattacagatttaacgcaagtgattttctggagaggagtcggaatgggaggattgtgttcgtcggagattctatcggaagaaaccaatgggaatctcttctgtgtatgctttcacaagcagtgtctaataaatctgagatatatgaagttaatggaaaccctataagcaagcataagggtttcctttcgatgcgatttccggaacaaaacctaaccgttgaatatcatagaacaccgtttctggttgtggttggtcggcctcctgagaactcaccggtagatgtcaaaatgactgttagagtcgatgagtttaactggcagtccaaaaaatgggtcggctctgatgttctagtcttcaatacagggcattggtggaacgaagacaagacctttatcgcgtaagatcttcatgttgaatgcaacattctggtaacaagagaaaggtgtttgatgagtcttaccgggtttcttcctgttgttgttgttgtggttgcaggggttgctattttcaggagggagggaaattgaacaagacgatgggagtaatggagggatttgagaagtctttaaagacatggaagtcatgggttttagagagactagattctgagaggagtcatgtcttcttcagaagcttctctcctgtacactacaggtctgtttcagaaacaattaaaagaggacgaatcagacgacatagtctttagaactttgacccaggtttgacctttatgggtgttgtaggaatgggacatggaacttgggtggtttgtgtgatgcagatacagagccagagactgatatgaagaaaatggaacctgaccctatccacaacaattatatttctcaagcaatccaagaaatgagatatgaacatagtaaggttaagtttctgaacattacatatctgaccgagttcaggaaagatgctcatccttcgcggtatcgagagcaaggcacttctgttgatgttcctcaagactgtagccactggtgcctacccggtgtaccagatacatggaatgagatcctctatgcgcaactcttgtcaatgaactatagaacaaagtgattccttgaggtaaatactgattttatgtttcttgatctagtcatgattctggttcatcaatgccttcttcaggctcagtttcatttgtttgcatttgcttgaccttctcgagctgtctcaacaggttcaacctttcggctccgtaggtcgaaggtatctgaacaaaaaaggaaaaaagtgttctttatcaacttgattgaagaaatgtacagaagagaagaagcaagtaaaaaagaaagcattaccaagcctggcacatatctctgaattgcagcaagcatagccgcatgaccaactgctgtgacctgttagacataagtgcccattagattagttcatagactcagacatattgtaaatgttaaggtagatgtaatgatacagtgattggtattacgggattttgtacaaagagcaaccatcaatagatcagcataaagttgtagaaaacagaaacggtgtatgaagatgaacaaccaacgagaatggaaatatgatattggtaaatttgataaggttagtatttactcacaggaagaagcataagaacaccaatgggaacaactgatgctaagtcggtcatggttctgcgtagtgctttcttttctttctctgttaattcatctcctaccacagacctccgaaggagctccatagcagcagctgaatcaaacgcaagaagctgagtaccctgccacacgtcctgtcagaatatcccgtaaagtgcaatgttagtaactatgtagtgaagtagaaaaatagtgaaggaacaaagctgattagaaaacgctgattagaaaatgctgattcgatcaatgaaaccgaagatgtatatgccatgaggcgtggaatgacattcataccgtagtggcatctttaagttggtcaagagttttctcaatgacgttttctttctttgagctctgaaaccaactgcacacctttcgtactgctgcttgatttaggcagatcttcagaggttcgtccctgcagaacatagagatatttagaatatttactatatagaaacaaatcaaacatctagcagcagcgtctgactgctacttactaaccgactcatctgtacttccttggacacgcttctccagctctatcagttcgttccttagaagttcgaaccgatagatctcattggggttggaatccacattatctacattttctctggatttctcaaaatatttatctgtctgcataatgtaaaaaaatgttaaaacctctcaccatacaacaaactgaaaatggttggatcaaacatagcatggagaccaaattagagataccaagaatggactgagaaaacgaagagtactaagcagaaatagccccaagtataagatctgaatatgctttagtatagaacataagataagacaatgaagcataccaatgactcggggccaggcttcccttttggagtacgaacaaagaacccccagaatccactatccctactaatgtagatgaaaacaataaattagtttccacaaccagaggaatacaaaaaggaacctacgtttataactcaaaaacaaagaaagaattattaactaaaagaacaagcaacataccttgtgccttgatctacagaatttattgaattctttgggtcttttcctcttagatactggctttgttcctcagagtactcctgagagtcactgtcaccacctncctgtatgaaccatataaaggttttagt

SEQ ID NO: 31667 - DNA, 3292 bp, Arabidopsis thaliana landsberg
tttgagcattgccctaggcgaaatgtttttcttgttataaccttgaacaatctctgtagcaaggaggatattctctaatagcaggcggcctggcatgaaagctgattgacagtggctgatgattggagggaggatagctttgagtctagcagccaatagcttggatacaaccttatagaccgtattcaggcacgtgataggtctaaagtcagacatgctggaggcattaggaatctttggaatgagcaccaggttcgtcgcattccactgcttaaggagctgccctgagctgaagaattccaacactgcttcagtaacttcagcaccaataatagaccagcagtcacagaagaattcagaagagaagccatcagggccactagccttgttgcgaggaagagagaagaaggcttccttgatatccagcgcagaaaagggggcagagagagctgcttgctcaactagagagcacctgtggttgaggatagcagtgatgtcctcttggagaaaatttgcaggaggctgctctcctcccaaagtccgctgaaagtaatccacgcaatgatcttgtataccccgttgagaatcaaacctgttgccatctgaatcaacaagaaagtggatgtgattaagcgattgcctaacagaggccatcttgtgaaagtaggcagtattcctgtcaccatccctcatccaagtaactcgcgacctctgataaaagaaactctcttccgcagaagatagcacttgccatttcctgtgaagatttaactcaatttcagcattagaaacactagggcttctcagcgttaagttctgcgcagcaagcaggttgtcatgcgcttcctttgtacgcttttccaaatcagagtaattagacttgctaaactctctaatgatctgcttcaaagccttcagcttctttgagactctaaacattgcagaaccagagaaacttagggaataccacttcacgcaaatcaaaggcaggaaatcctgattcttcaataagtaattataaaatctgaaaggcttcttctctctcggggcagaggaatcaagactgatctcgcaacaagaatggtctgagaagtctggctcaccgaatttccccatggagtaaggaaagacagtggaccaaatgtcattaaccaggatacgatcaagcttctttgcaattggaaaacttcttcttttgttccaccaggtaaagctgttacctctgaagttaagatcaacaagagaagagttaagcagcacatctctaaagactctggtaggtctatcaacattggaactaacagccgcagagtgctcatgagggtggagaatttggttgaagtctcctaaaaccacccaaggcttggaagagaccctgctatccgacgccagagacagtaactcgttccacaacaactgtctagtagattcatctgtagaagcatagactgaggaaaccacaatagccacaggacaatttggaagctgcacttcacaggttatcatttgaagagactttgagatcaccaaaacggttacactaggatgccaaaaaatctaaatcttacccaactcagagaaactatagttattatcaaaagaccaactaggcagcaaggcattgataaatttttgctgctttggttgcttcacatgcgtctcaacgagactcccaaaaagaggtagacgcctcctataccatttcttaaatccgcttcagtgtgaggaagaattgaagccacggacattccaacaaaagatgtctatacacatatagactagtgagatttggggcctttgcccctcgcacttcgctgctgcctctgggtcagcacctctgtgaatcgaacctcatcttcaagatcagcgtagtcatcttcagactgagatgaaggtaaatccgaagagtcatcatcctcctcagagactgaagtactctttgcagcctggactgctttaccctttccacgcaaaaccaggtccttgccttgggtacgcaaagggccactttcgccattttcgccattaggcttgctagaactagcctcggcaccaacagtagcctgtttgggacctgggggcacagactttcccacactcacagcctgtttacttgagccaacaaccacccactcaccttctttcgctgagggcttaggtgttttagaacgcctacgacgctgcttggcagcagattgttgctttggttttcccctgggacactcctcagctgaatgaacagtggagttgcaacccttacacttgataggggcaacacgacatctcctcaagctgtgtcccacttctttacagtgagcacaaaccggcggcatccacggacttgaaacctctatacgacgcacatcacccgaatcaaattggacattcactgcttcaggcagcggcttcctagggtcaatgatagtaaaaacctttgcaacttcaaggttagttttgtttgctgtgttggggtggaggaattttgggttacccaccagactggcaatatgttcaagcccatcatcattgaagaattggaacggaacaccacacagctctaaccaaattggagcagaagtcagctccggcttgataggtgtcactccaggctcccatttggcaacaaacatagtttgcccatcaatttgccacagacgctgatttagaacccgagagcgcgtttggacattaggaattcggaagaggaaagcgtttccttccatcttagagactgtgacatcccggtactgcttactccagatgccgttaacaatcgtatggattgtcccttgagccggcggttcggaataaaattggcccaagatgaaagattcccaggatttcttgtgcttctcaatgacagaatttggaatcttcacacatgattcacctgagggaagagtgaaggcagtgcctttcctttctagcctttttgatgtacccttaaagacatcacaccagctatcctctacaggagctggggtttttactaaaccttctgggttagccgcaacaaccggaacgggtgcaggtaacgctggggtttttggtaaactttctgggttagccgcaacaaccggaacgggtgcaggtaacgcagtgggtgtggagagatctgacgccagcggagtcatctcatccatcaacggaggaacggcagcagataccgaggtaatcgctggagacacaacaaccggatatagggtttcaacagccagaggcgaaaccaaaaccacaggaggagacggaggaggggcggaggagggagctaaggcgacgacagcatcagaaa

SEQ ID NO: 31668 - DNA, 9474 bp, Arabidopsis thaliana landsberg
ctatacgtacacgttggtgtatagttatgggtgtaacgacaatcttatgtttataaaataataagaagaagagatttctattagcacttactttatttttcaatttttttcctttttatctaaagcgtaccaaaaaattgctttcaataaatgcatattgggttgcatatagatttgacgcttgaagttttggtttgtattctaattctgctaccattcatatcccaacatacattagcttataatagtcgcaaccgcaaaaaaccagcttatagtggaaacgacagaaaattatttcaataatcaaaattgtgatacctaatattttgcgtcaaatttggcaatgatgacctataaagggattttgatttttaaaatgagatcacatacatttgaaatgtgataattttgttaggatagagttctggttggtatgagtaaagaaaacagtacataattgattaatttagagagtaaatatgtttgcgacagtaaataagatttaaaaaatgaaaaaaaaaacaattacttataccagtttttcatgacttttcaactgataattttttattttccattaaaattcatcgttttcttaccatactaatttaacagcttttgcgatttttactctgccgtaagttgtacaaattttcatcacttttacgattgtcatccttgtatgattgttttcataaatacacacaataaagatatgcagttccagaattcatgagagctcgtgagtaacgtagtaaaacgtagacatcaaatcgctaaaaatgagatatatgaacttttgtatttattatttgttgcttagtaataaatatccagtagggggaattgtcacattaaattttgagaagagcagcaacaaatgcaaatccagctacctcatttatgatattggttgacccacattaccaaacaaaaacatcttttggcctatggacttgttagattggtgtgccttattcattgggtctgtcttctctttcagctccccaacttgaattctcattctataattcatgtgattgtggttttgaaatgaattcataagcatgagaattgagaaaggaaggtggaaaaggcatcttgattaatgtagtgttcagcattctaaggtgatagtgtataactataactattcgataaaaaaaagtttttttaccaaagattcatgcgagataaaagtagttaaagaaatttacattgccataactatgtagtggcaaaaatgaaggtactaaaaacatgaatttataacactgagccactgacaacaaagcacaaacataatgctaccacaacataattggactttcattaaatacaagacatttgaacaatttgctctcatttcttttaaaaaagttttcaactcatagtttaccgagaatgatgatcaaaattaaagattcaacaatggatatatccattacatgatctgagtttaattatcttttgaattttaattaggaaaaaaaagccatctacacacacaaaaagtgagaaaacaaggggcatgtgatagtaataaaatgggataacgagagggtaagatcgtcctaaagctcatgaatatttgaatgggtttttggttttgggctctgaaaaatggctgactttgcgtgacatgtctctgttcaccggttggatcatgtgcacgtgacgccttctcacctcctttctcatttatttctcctatttttcttcaatttttatcaatattttggccatttttattattattttcttaaaattgagataatgttaatgatcgcataatggtcagaccgctcagaaaccggacagcccaacaccgcagggaacttcggttcacgacaaaacgcaagcgtcatctgtttttcatagcccatgtttgtatttttctaaacgtacttctcacttttttcagtcatcaaccaaaattttgtttcttcacttttgtgttgtttattaactttttgtgtttacatttgaataacaccaaaaaccatccagtagtaattttatgtagttgggcttttgggttgattgactagtgtttagaacatagaagctgaacccacgaaataggactaaacgaaagcaatgtttatctcttaaccggaaatcaaaatctagacaaatgaaaccgggaaacaaaccactatgttaccctaaccggatattaaccaagaatgttgagcttgtttttctatctcttatccctttgatttctcgtgacattatcgatatcgaaaacctcaagttggaaaatggcagaaaatccatgattcgacgtgtgtttctcggtaacatgtagatagaattttcttcattatgattttgttggaaggtctgttttcgaaatcaatctgaaattctggttggggtatgttttacgttacactatctcacattatatgtagggggtggtgaaatcagcatattatataaacaacataaataatcttgtaactgctaatcaaatttgaagttagaagcatatgattttagattcatgattgatctgatagattattcccactttgtagtggtatttttgcatgatgatgtgatgtttccgttctcctatttgaagtggaaatggatctaacatgatgtataaagaagataagctaatccacttattataaattggcccgagttggaaattttttctcctcgattgttatgataacctcgtcggcaacgaacatacccaccaaatcactttaggtcattttcttaagcatttatgtgggaaccccaattactttgcttgtagataaagtcaaggatatgattacaagtcacggagagcactaatgtaatgggctcaagaactcataaacaactgtttttaagcccatcactctgtagtgttcttcatgcttcccaacatggtagacaaatagaagcaagtgaattgcaatgagagacgagcagagatagtagttttgcaacacaaagatcacatttataagacaagcatgttttcttcaataacaattgcatctgatggaatcatcttatgtacaaacacaacaaatacaagatccaataaacacttatgactatttgtctctgactttctagatactaaacacatgttcctctcctgatctctgatcaacatgtgtgatccatcttctcttattgttaccactcttccctgagttcctagccgcaacatgagctatctcaatacctccggtgaccggaagagtcaccgttctaacaactttccggtctcttaaaacccttctcaagctcgaatacccgtttctacaaaccacaacagctcctctgtttccaaacgcagcgtttttcaacgcagccgctgcaaattctttgttccgccaatccacgaccaagaagtcgactccttgtagcttcttcatcgcttttccgggttcttcagcgacgatagtctctggaaagttcaagggagatgaagattcttgaatagcttggagataagcagattctgatcttgagttttgtactatacatatgtgtttagcgtttgcgtgtttgcttgctacgtttaaaccaatacttgaagctattgcgtctccttctgaccaagtttccacgatcagcttcacgttccatcccgccgccatcgccgctattagctccgccgcgtccggcgtttcaagattctcacactgaacaaaaaagaaaagaaaaaaatcgttacaagaacaaaccatgaatctttaacaaaattaagatctgagttttcgagaactggagagaagaagcgtgtgttattattccttcacaactcaccggaaaataaaaaaaaaacttaccgatttaacggtgtctatataagcctttgatgctgtttccggagaccaaaccaatttcattttcttcttcttctgcttcttcttcttggtcttctcaaagtttctcacgtttcttgtgttctgcttcttgtttgggttttagcttaaagtttgcttttatagagaacgtagacattaagaaaagtctcgtttcgttttgtatcgatatggcccttgtatatttgtctagtttttaggtttagccccaatactatcaactttaatcaagtaccccccgatctagctcctttgtttagaaattgttgctttaaaatcagaaaatggacatagagaatgcacttgttatgaattaacggaggtaattagagtactattatcctaaatttttgtggtgtaaaggttagattttgaaaatgtgtaatatgtgagagtgataggtaaattttctaaaagatttactatgttttgttctttctttctgttttctaaagataaggtttctagatagtcgactttgacactattccagacgaatttgacgtgtgtaggctaacgagatttaaactataattagtctaaaacgatttatcaactgtttattcgttaatagtagttaagtttagaaaattttcatttagttggtacaataaaaaacactattcagacccaatttcaatgactttagtatcatgtgataactaaaaccaagtggatataatagataatgtctcattgatcgttgataaggagtgtctggatacttttttttccatctagggataatggagatagtcatagataatggcataaatttcaaacaagtgaatcatatttcaaagcaaacccaaaagaaagatataaagtatagaagaactcaaacatgtgaaaaatcatccaagtggaaggttaccttttaaatcacatgatgatatcatatgctatatacattgatagtgaccaatgcatttaaacaattgtctttgtaccccatagatccaattatgtgggacaaatcaaacctttttataattcctatgtcactttgaaaacgactctatcggttgtggcttaaagaaatattaggtcatgtttattctttttatcccactttctcaaacttaatgatttgttgtatagtggaagcattttaagcaatttcatttgccaatacaaatattaaaatgcaaacccactcaaattatcctactaatatttgattctttttttttaatttgtaactagcaaacatatcaaaactttataggcgaaagacattcatttcaaaaataagatcctaaactttaaatttccactaatatgattggttagactttgttcatcttttaagatttcaagagataaatgggccagaaatagttgggccttgaatattagataaaacgacgccatatcaacacctctctcgttaaaagttacaaacgcgactctctgatcctaaatttcgttgtacagagaagaagcaaaagagagaaacatccgacccggaatctgacctgaaaacccggaagaatcgaaaaatggggaaagatggtctgagcgacgatcaggtctcgtcgatgaaggaagccttcatgctcttcgacaccgatggcgacggcaaaatcgcaccgtcagagctcgggatcctcatgcgatctctcggcggaaacccgacccaagcccagctgaaatccataatcgcatccgagaatctctcttcaccgtttgatttcaacagattcctcgatctcatggcgaaacatctgaagacggaacctttcgatcgccagctccgtgacgcattcaaagtgctcgataaggaaggtaccgggttcgttgctgtggcggatctgaggcatattctgaccagtatcggagagaagctggagcctaatgagttcgatgagtggatcaaggaggtggatgttggatccgatggaaagatccggtatgaagatttcatagcaaggatggttgctaagtgagatctaatcttttatgttttgaaagttgaaatttttaagaagagattctttgtgtttttttcacttgtttgtttgatttcgagcgaatcctagctagggtttgttttatcattgtggaatttgcttactaactttgtcttcttcatgtttgttttcatttttaatggaaatgttgtctgtgtgattcctcttatcttatctaatctctaagaatgtcaaggtttgtcttttatgcctttgtaattcgttggattggggtcaaggaatgggattgagtcccaatgtggtaacttttcgctctttcgatcttgaaatgtttgatttcgatatctagcattgaattcttttaataagcctttttgtttgtttaagacttggtttaatgttcttcatgttatagtagtcttcttgaatgagatactatcttcttgtttcataaccttatcctggcacgatctgtgacaaggactgtgttttgttggtatgtgaagtggaaagtaaaaagattgcgaaatgatttaaagatcttttgttgctctcaagcttgtgctgttcaatatcgtgttgttatgttgctgttggatgttgttatgttgtttgtctttcagggcggcatgttgtacctagataacatggtttaaggtaataaagcttatgatggctcatcagaacaaagttttgaaacagcttatggcactgacattgtagttcatgttctcgaaacggtagtttttgactcggttttggttcttgttatggtatagttttcttgtgtagatggttatgcgaaaatgaaatttcaatctgatgcaaagtttcaaagtttgattagatacatgcattctctatatgttcctgttacttcttactaatacatgatttgtgtgacgatcaaagctctcaaaataatatttccgttaatgagtaccacatgtaaatgataagaagtattgtagtggtgaaaagaaaagagcatatatagttatatacgcattagaatgagaccaaaatgttcagttcactacactatgaatctgttaacatacaatgtccggtttagaccgattaaacaaaaacacgagtgaatcaaaacaagctctctctaatcccgagttactggactctccccatttgcaagtaaattgagacgtggcagtatctggatcgctagatcaaaacgtaggagggtgccaaaggccattgatgcattccgccgagcaacttaaaagataaaaatctttccgtattttatagtaagatacaaaaaaaaccaattccggcataatttgaactgaaccggtttatttggtacgtttcgggtgttgtttcttttgtataagctccgtccgtcgtctgccatggctgttttgtagggtttgcactttgcaatttacacacagagtgagagtgagagtttgaaaaggaacgattcagcttgagatggtgaagttgatgatacggagattgagttctcaagtttcgaaatttgttcagcctcgtctcctggagacaggtactctgagaattgctttgattaattgcccaaatgagctatctttttgctgcgaacgcggcttctctggtaccagcgatagaaatctctcttatagagacaaattgagaagtgggcttgtcgatattaaggcagatgatgctgttgatctatttcaagacatgcttcactctcgtcctcgtcctagtcttgttgatttcagtaaattgtttggtgccgttgcccgaacaaagcagtacaatctagtgttagatctctgcaagcaaatggaattaaagggaatcgcgcataacctctacactctgagtattatgattaattgcttttgtcgatgtcgtaaactctgtttggctttttctgctatggggaagatcattaaacttgggtatgagcctaacactatcacattttcaactttaatcaacggattatgtctcgagggtagagtttccgaagctctggaattagttgatcgaatggttgaaatgggacataaacccgatctcataactattaacactctggtcaatggactttgtctcaacggtaaagaggctgaagcaatgcttttgatagataaaatggtggaatatggctgtcaacccaatgcagttacctacggaccggttttaaatgtaatgtgtaagtccggccaaactgcccttgccatggagttgctcagaaagatggaagaaagaaatatcaagctcgatgcagtcaaatacagtatcatcattgatggtctttgcaaacacgggagcctcgacaatgcattcaaccttttcaatgaaatggaaatgaaagggatcacaacaaatattattacctacaacattctcattggcggcttttgtaatgctggtagatgggatgatggtgccaagttattgagggatatgatcaagaggaaaatcaaccccaacgttgtcacattcagtgttttgattgatagttttgtgaaagagggaaagcttcgagaggccgaagaactgcacaaggagatgatacaacgaggcatagctcctgatactatcacatacacttctttgatagatgggttttgcaaggagaaccacctagataaggccaaccagatggtggatctgatggttagcaaaggatgcgatcctaatatcaggacgtttaatatcctcataaatggatattgtaaggctaatcgaattgacgatggtttggaactcttccgcaaaatgtctttgagaggagtggttgcagatacagttacttataacactcttatccaaggattttgtgaattgggaaaacttaatgttgccaaagaactcttccaagagatggtttctcgtaaagttcctcctaatattgtgacctacaaaattttgctggatgggttgtgtgacaatggggaatcagaaaaagcgttggaaatatttgaaaaaatagagaagagtaagatggagcttgatattggtatctataacatcatcattcacgggatgtgcaatgctagtaaggtggatgatgcttgggatttattctgtagcctccctctcaaaggagtgaagcccggtgtcaaaacatacaatataatgattgggggactgtgtaagaaaggcccattgtctgaagcggaactgttgtttagaaaaatggaagaggatgggcatgcgccagatggttggacatacaacatactcatcagggcacatcttggagatggtgatgcaaccaaatcagctaaacttattgaagaactgaagaggtgcgggttctcagttgatgcgtccactataaagatggttatcgatatgttatcggatggtagattgaagaaaagctttttggatatgctttcttagaatgtttgatcttaatcaaccagagataaagctaactatttctctaagtatcacaactgtagcaaatctactagcttttggaaccaacctgaaaaaccttcagactcttggaactggaagtgtctcttaaggttgcgttgtttagcagaaaactttgtcaggtgtaagattggagatggaaagactgctagtttctggtttgataactggactccttttggtcccctaatcaagttcattggaacagatggcccctgtagttgagagcccctttgaatgctaaggtagctgatttatataactcagttggttggactctagcg

SEQ ID NO: 31669 - DNA, 1870 bp, Arabidopsis thaliana landsberg
ccttggttaaaatctatttactatggaggtcctggaggatgcatagggtaattattgatctacaaaataaagagtagaaatatcttaaaacttttaaataggctataggaaaaaaaccacagatttgtaatatatgtaagcattacccgcgctctaatgaataatcaagaatttgaaattcacaacattcagcacaaaaactaatatgtttactgagcatagattgagtgcaaaatcacctcaaagtacaagaaaaaaacatctccttcttaactgcaaaatagtgtaattataagattaaggaacattgctatattattacgacatatatattattaactagaagctctaagttaataacacgattaaagaactgcgaactgtggtatgatgctatcttctacggaggacaaggaaatgatgcacattctagttaacatgttcttaaatctctatgcattaactattctctgttttttcacttttatacatgtgttcataatattttcatttattttttattttcttcttaattacattaaaaaaacaaaatctctcaaaagttgttaattttgttgataaattaagaaaaataaatctgttggtaaagagattggacgagataaagagagaaggagaaagaaagaagagattcgatgttgaatctggtgatgagttctggcaaagacagaagagaaattcaatgagaaatagctttttatggctaaattttggtgacgaagaaggtaaaaagaaacacaaaaagaagaagaaaacaaaatggtaatatagactaaaaactcacagaagatctgtaacaaatggaaactattttggtcaaatgttattttgttaattattcataagtcaaggtcatttagtccatattctttttgtttgaatgaaagataataaatgatacaaaaatgcatgaactaattgtgtcaataaacttaagttttcatgtgattttcaacattataaataaatcattttgattcatttcttgtttgtagaagaaagaataaagataagagcctctttcatagtatcaatggcttccttcaaccactttgtgttactgattctgttaacagtcactcttgttttatccgctgaagcaactaaggaacgccgaccaataccatcaaaggcacaaaagaatgaaatgaagagacaactcaaagctatcaacaagcctgcaatcaagagttttaaggttggcttagccttccttaatcttacatgcttattgtttcatatctaacttctttttcttatgaacagactgaacatggtgatatatttgattgtatcgatattcacaaacaactagcattggatcatcatctactaaaaaaccactctgttcaggttttgttttatacataactaattctctctttatctactgtcttttgtattaaatgatgactctccttagagaatgacgaccaactttgtatatgtagctaaagccaacaacagtacctgaatggatcactgaaaacaacatttcagggagtattaatcttgtacaagaaggtataagctgtccaaatggaacagtaattgtaaaaaggactacaatgcaagatctgatgcatgcacaacgtttgaaatccatgggctacgacggcccgagaccttttctcacagagacaaacaacactaattcaaatggaaaattctatgtaagaacccttataagttgataccatatataccaaccactattttcttttcttgtctactttcgttttctgagtttctttgttctttatggatattaggttgcaaaaggtacctttggaccagatctttttgctggagtaagaggacacattaatgtatggaaaccgaatatctt

SEQ ID NO: 31670 - DNA, 1561 bp, Arabidopsis thaliana landsberg
ttgttacctctgcttggattttcccgtagcgccaacccagctattgagccgttatcttggccggcgttgttagccttgattgcggtctggttcatggccaagcaaacttatgatctcgtcagttactttcataggttggtcttcgatgatcggtatgtagtcggttaaagagtggacaatctgactgaggatatctcgctagagagaaataactaatccatatatgacaaacaacgacttttcattggaaaggaaaaaatgtataaacacaaacgtagattcaaaattcaaaaagttatatagtaaccaaggtctatatacgttaatattaagataatcgcagtccacttgtaagtcatgaaaacaaaaggatcttcaaattgttgagatataaagaagaatacattagcttgcctcaaagaacacaatagtaagggctaattatgtaaataacctaattgtggacacctgtttgcataaataaatagtggcaaaactgtaaataagtgaatattttagcaattacagtataaattaagaacaaagattaaaaataaataaaaaagtgctttcattctttggatgcgctgttgtcaacttgtccctcgctgcctctgcttcttaactctttctttatcacttttccactcccaaatcaatttttaggttttttttttataattataatttatttgctctcggcaggatctatataatacacagaccagtctttgcgtgtgcttgtgtgcattcattgatcgggtttatatcttttcatcggattttctttgtcgagcaaaagccatgtcactgatacccaacgctaaaacggaggttcgccggaaccgatacaaagttgcagtggatgcggatgaaggaccacagatgagagaagacaacatggttgagatccgtaaaagcaagcgtgaggagagtttgatgaagaagagacgtgaaggtatgcaagctcttcagggtttcccttcagcttccgccgcctccgtcgataagaaggtacaattctggtttttagatgattcgattgtactccttgttgtcggttttctaggtttttgtttgtgattttcatgtcggcttactgaggttttagggtttcgtttttgggttctggttacggtagttgtcttgtgattgattggctttaaaaaaacatttgtagttggatagtctgaaggatatggtcgctggggtttggtccgatgaccctgccttgcagcttgagtccactactcagttcaggaagcttctctctattggtaattccttttcttaattctcttttatttcccgttttgatataatttggagtgtcccctttaacttttgtctctctgtctctattataattgcatagagagaagtcctccaatcgaggaagtgataagtgctggtgttgttcctaggtttgttgagtttcttaagaaagaagattaccccgccattcaggtgagataattaatgtctcttattgattcattcttcactgaaatcttctcttctcatcttttatgatatttatatatagtttgaggcagcttgg

SEQ ID NO: 31671 - DNA, 3605 bp, Arabidopsis thaliana landsberg
caaactctttgcggatgctggtttaatctgtattgccagcctcatatccccgtatagaaaagaccgtgacgcctgcagggaaatgatgcagaattcatcttttattgaggcaagctattcaaaaccaggctttacagtttgtaacccccattcggttggatcttaaaaacatcttgtttgatattgtggctaaatttgttaggttttcatgaacatgtctctgcaattgtgtgaagcaagggaccctaaaggcctatacaagcttgcacgtgcaggaaagatcaaaggtgagataacatagcttcaaggttccatataaacagaagatagcaagttgcttcaatatcatttgagttgttctataaaagtttttttttcttcatacccttttgtgtaggtttcacaggaatagatgatccgtatgagtctcccttgaactgtgaggtatgtgatccatgtgaacataagattcttcttcaagaatattgcaaacaacgcgtatgtgaatacgtttctctgtttcttttgtatgttttgaaacataacagatagagttgaaagagaaagagggagagtgtccttcccctgtagctatggctgaggaagtgatctcttatctagaagacaaaggtttccttcaaaacgagtaacgtccatcataatctaacgaccgagatttgtttttccttttactttttatgggtgttctctgtttgttactttcctgaaacactgcaaattcttaagaagtttcaactaatgaagacatatatatagcttcttctccttcttctgaaacttgtcttctacactgaaactctagtcagtcaataccagaattcgatcctatacaaacaacaagagccatgccattgttttcattgttaatttatactacgatacaacgattatactaagacaaccattaatttacatagtgtcattgtatttagaaatttagtttttttgggggtcaaaaacaatagttttagttatgttagtgaataaatagattcagaaaaaactgtcgatcttatttgaatagttcgtaaaagagagggttctgtttgtaattttcctaacttttagatcctgagttctgcaatataaataaagaacaaaacaaaacacgatcacgaggcaattttgagacaagaatggtgttgaatagtcgattggtggagacaacagttaatctgtcggcggatctctggcaatatgttgcgtgtaaccccgagatacttcctcgcgccaccgtcatccatttcatcttctgcatccctctcctccaactccgccgtctcgcttcctctctaggatcatacctatgcttcgattccggcgccggagttgatcaccgtactcattccgattaagttaccggcgcgtttccatgaatcgtctgttaaatttcgacttttgattgtgtaatttttgttctgattgtaatgtaattttgtttgtttgtaaaccgaaagggacatacaaatttaataccagaataaaccggaaacatttaaatacacacagaaccaaaccgggttgtgtggaattgttgtcgtcacaggagagaaataagcagagacgtgtaaaccaaagaacaacgaaggtttcgtttcgtggggaagaagatgaagtcgcttgtggctcatttctcaacgcctttaatcaccgctagattagttcctcgatgtatcatccatcgagcttcaatctccgccgtctctttttccaccgtccgccgtcgattttctcctctcaccatggcctcagcagctcagtcttcttctcaggtacctatctggaggattcaatgtttggagttttattgatgaatctgtgttctggttttggattgtagacttgtagtgggtgagttttattggtcaggaaaatcagtgaatctgtatcttgattgatgtggctcgttgatctgtaatttttgcgccgattatatatatgaattttattttatatgatcagagaaagaaaaggtcgaatctttttcaaaatgccagacttgtgcatataaagctctacgagtatgctatgttaacttgaaaggggaaagttatattcgtcaactgttgaaaacttctaactttgtgtcatgtacttctactaatcaggctgtgtcttacgggagtggcaacagtgatacagatgtttttaaattgattcaagctcacgaggtaactaatttgccaattttgtaaccatgctagctgaatatatctatgttctcaatgcgatgtgaaatgagttttaaagtattgatatgtggtcgtctaattttcaggagaaggctgctcgtctttccccagtcaaagaaatccgaactgtgcttaatggtagcatatgcggtatgctttccactttttctcaggtgagcaattagttatgaatatgatttctcatagagaaataagggtgtgtactgaagtcctaggattctgattattggtcaccatgtcatatgatgtaatttcaaaagccactgtgactttctctcatttaccgaaattttgatctggtgcagaagtatgagggttatccttcagggtcaatggttgattttgcatgtgatgctaatggttctccgattctggcagttagtagcttggcagttcatacaaaggtttgtttcttgttcaaggacttatgataatgcctttctgttttgctgcaatttagagctgcttgcttatgcgatagtttacaaagtgaaaatgagtggattagcgaagtgatgccggaagtaaagcaaaagagccattgtctattttctctgatttagatgtcttggccatataatccatatggataatttctgccgtttgcaggatctgttagctaatccaaaatgctcattactaattgctagagacccagaggataggactggtttgaggatcaccttacatggtgatgcagtgttggtatgtatttcgctgtgctgttttatatgcacttacattcaaatacaatgcttgaatgtttttctatgtattattcaggtttctgaaaaagatcaagcagctgttcgatctgcctatttagccaagcatcccaaagctttctgggtaaataccctttcttgtaatcactagaaagtgaagaacttcccaatgacaatgtatcatgacatctcaattaagttaactgaaccttttcttcttgaaactccgaaggttgattttggggacttcagctttatgcgaattgaaccgaaagtggtcagatatgtttcaggggttggaactgcttttcttggatctggaggtatcttactgcttcttcttgttaactcttatgcgatccagtttacttactcactgaaatctccatttgcagaatttagcaaagaggagtaccaagcagccaaagtcgatcctatagctcagtatgcaaaacctgtaacggtataacaatgatatccccagtacaactttttttcaacatatagtagtggatgtttactaattccttttcattttggcagtctcacatgaataaagaccatgaagaggataccaaagccattgtacataatataacatccatacctgtaagtaatacgattcagttctataaatcggttagcc

SEQ ID NO: 31672 - DNA, 1183 bp, Arabidopsis thaliana landsberg
ttcacgaaagtattctaaaaccaaaaaaaaaaagataaaaaagttttcgttggtctgtcgaatttggctcttgctctgggttgagttcttattttcttttcttggtcataattgttaaggttagtctcataaatgctttgaaattttgcttctgaaaatcttgtaaaatctgcagtagaagaaagaacaaactggtttgatgataagttcggtttgggcaaataaaatattttgtatattatatggtctgttctacaaattaactcacatttcactctttttttttctaattaattttcatatacaaacagagcttaaaaattacaatttacaacatttttatacttgtgaaattgaattctcgtgtaatactattttgtcatgttataatttttcaaaattttatcgttgctgtttttaaaatatggatttaaaaccgatttatggaattattttcctttgaaattcaaaatatatttgtttttgatgtctgtcagtgtgagggagagagagtgaacctttttaactatcccgccatacggaaatcgcagaaagctgtaattggagacgcgctctttcttctctctcgcctcgtgatcttaccggaaaagtttcgtcgccggagtttcactatttcgccgcagaagcactagagtttcatctgtttgaaaatgtaatctcgatcttctcgtttcccagtcatttctaggggtttttgttcgctttttctcacaccgattcatttgcgaataatccttgagtgtatggggcggtgttcgattgcgtgtccagaggaatccccgctagctatagcagaatcgcttcatctactagttggagaacttattagcttctggatttggttagttcttcgttttcctatgcatagattttgaaattaatcgccaaattcggtgtggggcattgcaattttcatttggctagcgatcatgattacagctcaaattcggcacaattgtatcttccagctggtgatagtatgcaatttctgcagtttctgttacaatttcatcagattcaactaatcgcaatgccacttgttttgtttttgtacagcaaatgcgtggtgacaagaggagataaatccggtggaagctctttggcatgtaaatctatgatcggagctaataaaatgaggcaaaattgatcatatccctgtcca

SEQ ID NO: 31673 - DNA, 9000 bp, Arabidopsis thaliana landsberg
  unsure (1)..(9000): unsure at all n locations
tgtcatatgaatgtacttaaacaatgtatccatgcatctgaataaaatgtaatttctctattattgatttcaatttcataaaactaaactgatttctcaattcgtgcaattacacaagagctctttgaattagatgattttctgccggaggagctgcatcggtcaacacaagatataatttctaaccatgtgcttatgcgattagaaaggcaatcattttcgtctctcgaaggtttcaaacaagaagcaaatgagatggcaaatgcattgctcgataaatagtcaatgtcaaaacatcactacaatgccgctagactttataactaaaccggtcactgaaaccctaaacctgattttaggacaaacgatctgaaactagagaactgcatttacacattgttttgcacttcacatcagagtcttttaatgataaaaaccgccattctctccactctttatgtacatcaaaacaaaacagtggagactgaatggtttacctaaacgaaccaaatcttctttggttctcaagagtttatgtctgcgtctgggacggagactgagatgatggagactgagcctgagcctgagcctgagtctgagacggagactgagtctgagtctgggatggagactgagactgagactgagactgagactgagactgagactgagactgagactgagactgagactgagactgagactgcgtctgagatggagactgagcctgagcctgagatggagactgagcccgagtctgagatggagactgagactgagtctgtgtctgaaagtcgtcacctccattacctatagactgattcggaggctgagactgttcttccccaggtggtgtggcatcttggttgttcctgtctctgtttccgctaggccgaggtttcgtaaagtacttgtcaatgaattcttcagcacggtcagggtatttcttcatcaaatagttgttgagggattttcggtatgaaaagtcctgtttggccccatcagttgagacaacaaagaagcacctgctgtctgagaagatggtgtgcttatcaacctacatcgttgttcaaccaagaatttcacatcaggcataaggctaagtaagctttagaagagaagctaagtttgttaaggagaaatgttgtttaccgtgatgaagtcaacgccagaaccgagctttgtctctttttggggatggaagttcaaaatcttctccaggacaaacgtcttgtcatcatcagaaattgggtctccatcagggtaccttcatcgaaagaagatagttttcgatagatgaagcataacaagtatatggaatgtgaaacagcataattaattatacatagaactggaaattttataaacagagcgtaagaactagaaaggcatacgcagacggatgcataattttcctgagagtcctcatgactggctcaacatctgagagcagctcttgctcctcagaggtgaatgagtccaagcgctgtctcgttgctgtaaacatgggagccaaattatcctcagatctaggtggcctaggagtatggttcctatttcctttccagtctgcaccaccaccattggaccagccaccactagatggaaatttcttggctggatttccccactggcttctctctttatcatccttctctctacttttggtctccttcaaggaaacccacggatttctatcatcctcattggtatccttgtcttctgcagtgggacttggctgtccccacgaaccccaagcgccagcacctgattcaatttcagaagtctttttgttcctagaaccccaagcagcagcatctgattcagtttccgagttgtttttgtcactagaaccccaagcagcagcatctgtagatccccaagcagctggacctgatttcgtatccgatttctttttgtcccaattacccatagcagcagggcctaattcagtttcagaattctttttgtcccccataccccaaccagcaggacctggttcagtttccgatttctttttgtcccaagcaccccaagcagcaggacctgactcagtttcagaattcttttttccctgagaaccccaagcagcaggttctgagtcagtttctatgttctttttgtcccaagaattccatgcagcagcacctgatttggttttgtcactagaaccccaagtagcaccatttgactcagtttccgagctcttcttgttccagggacctaaaacaccagcacctgacccaacgtcagaattatttttgtccctggaaccccaagcagcagcatctgattctgtttccgagttctttttatcactagaaccccaaacagcagcatctgtagaaccccatgcagcaggagctgattcagttccccagttctttttgtcccacgatttgtctgaaacagatttgtgtccccaaacgtcagaagtcggctcattattttctgggacaatggaatccttcggagctggacttgtttcccagtttggtgttgtatctgcatcagcatcctttgtctttataccccaagcaccccctgaatctgacttggaagattcttgagcatcttttctagtgttccaactagaccaagcatcttccttctcaacatttgtagtcttttcccaattagactccgggtttgcctcaccacctgtactttttgagactccccactctgaaccaccactgcaaccattgtcccacgaagagcttttctcccagttggctcctgatggcttgccttcgtcatgtaaattttggaagtcggcactgtcctcaaacttgggctctccaagagcagagtctcgctcgggcgattcagcccattcagccatttcttcctctgtaacatcaaaaccaggggaagaacacaaatgcatctgcgtttgtcgtggatacgaccatttgaaggaagctgtacacatctgtttcttctttatcatctagaccagtctgcaaataggttgacaacaaatgacataaaattacataacaaacttatatgagaaaacctcagtcaattggtatgatttccagtgagaatgtctacctctttttggttccataggagctcaaactgtgagcctgtaccaacatccacgcgttttccccaagaacaagacccaacgactgttgatagtgaatctgtatgacatttctcagccgctttctcaaaacattttcttggtgcctaaaggcacaaaaagtaattcctgttaacatgacggccagtatatagtctaagaaaataatttgtattagactaaaggattgaactactaacaatcaaagttgcttctgtgaatggagccttgatgtttaaggatcgggtcaaagctttgtaacctccagaattgaaacccaacatagtccctgaacaagtcatgttgtttgctaggagaatgatgtgttctttcaaaactcccttggagaccattctcactgaagctgatagacgctgcaaatcaaatcaacatcttacgtttaaaatccttacacaaacaatgagcaaatgtgataccaaacatgaaatatgtaagaagtatcatgacttaagtgtaagatccaggcacggatcacgttttaagttagtaagtacctgtactgcttgctcaaaagcacaggataacccaagcaattcttgcacttgttttacagaataagggattgaccgttttgtgtctattagatgaagcactggaagacatgagtctatcacaaccctccatgcatcaccactttgcttgannnnnnnnnnnnnnnnnnngacatccaaaacccattcccctcggcgggatgcatgatgattccggatccacgttgtcatgtctgaactattccagattatatttgctgagcaaatccgtgaatcacctgctcagtttagatacaggagtatcatcaaaaacatgtatctagaaatcttactaaaacataggctttcttttatagtagcacagaatatcgatcacaacttggaggaaaattcaatcagactagttgagaaaatattttggttcattaaacttctggcaaaaaacaaaatttcgtaagccatgtaactacaaaattttgaaaggaagactctatcagatacactgctcccccatcaaagaagaaatcgaagtgtagggaaacaagcgaaatatacaaaaatgaaaagttttattcaaatacctttgatcactatttccagcagaactgggtaaactgtattgcaaagaacatcaagagttcgttctagatcgggatcggtggcattgtaggagaacgtcaaacaaggcatatccgaacctttgctcccacaaggatctcggaaagagcagcactcactgttcattggagaataaatcaatcataatcaggtagaaaccaaagctagacattatgctatgaagaacaaaaatgatggaaagaagataactggaaaactagaaatcaacatcagacttgctttctggacaaattatgcataacattcaaccagagacgacatccagaggaaaagcaaatcattgtacaaacctgacagacaaacttgttctcttgaaatcatcagtagctttcttctttttcttttgtcctagtgagttaattacatcctcacacttttgatgtatatcctgcatactgatgttccaatcttgcagcaatgtctagtaaaccaaaaacaccaattacacagcaagaaaaggataataggaaagtgtttctatgacaggtagaggcttccagaaagattcaacagtaaaggaaccagattcaaaccttattaagatgaatatggccatgtaggcatgaatcaattccaaaaatttctgatatagttggttgctttctatatcttcatgcaagtaaagagaaagcagattgcaaagaggtttagtaaaaccataaaaaaaaataacacaaacactaaaaagagcgactgaagttactaaaacccaattcttactcgactaggaattccactgcagtatctttaagactaactttattcagcttgttcctgactgtgcaagcagcattttcctggcaaaacctttttccacaatggcattcatttaaataaaggattacgcgccgatcattagtagtgttttggaaattgactttgcagagcagaacttcctgggaaaagaacaaatacagaaaacaattacacaacaatacagatgaacaaagctgtattcagaaggcagatttgatattgctataccttcattagctcccatgatgaattactatttggagaggaatcaagcactgccttatatgcaggatttgacatggcagtagctgccaatactccaacaggttctccagcttcaaacagaccttgatgtccacgttcagaatcaactccatatttgaactggatgactgagttactacaggtgtttcttacagttccatcgtttgtaatcacgatatcccgaagaacagccatcaggttcttaaagagggttccaggctcagctaatccccttgaagagcgaacaattacctccctagctgcaattgaatgagccatctcttcatacggatccagcccatgaaagaagcagcccttcactattccaaaatcaccagatgaagaaatcctgccatactttctcttacaaaagatagccatgtcctctaccagagtcttcgtgtaaaacttcttcttgtcagaaagctgaagacccaagaagcctgtctgctgcaccagcttggtgattgctgagttactcttgatatcaatcaagttccgaatggaatatgacttcagcataaagttagcagccacttccttcactttgtggatgctgttctctagctgcaattcatctctatatgataatctcaagcgagacaccataggtgaaatctctcggattattaggttgtgaattacatccatgtctgccctagacatggataagtcttccaaacttagactaaatccctcagcaaacagactttccatcaatagaggctgcagcgaatcaaagaatccaagtgtctcctttggacccttctccaggaagattgaagttacaatttcattgatgatggaccccatcgcgtcaaccccgaaatcaaacttcagcaaatcacttccatcaaccaggaatctgtctcctttgcaactcagacgttctggaaaggcaagctgtagaatctggaaaactgtccaagctgggccagatttactggacttccttagtgctggtggtggcagggacagagagccatacatagctaactgttgagcagttgccttgtccagaaatacccgctccagcattaccctcaaagacagtaaagaatcactacccatctgcaaaatcagctgtccagtatgtgagctaagcagttgcttctccacagagaagagctccataacctctgccttagcactaagagactgagggtagaacaaatggacacaatcaccatcaaaatcagcactgagggggctacacatcagagggttaatcttcacggtgttgtcttcatgaacatacacccgaagcgcttgaagagaatgtttatgtgttgtcgggggtctgttgataaacacaacatccccatccatgaccctgcgatgaacaacctgcccgggtttaagctcagtgtgccccttggatccatcccttaaagaataggtcgtagaaccttgagtataactcaaacacaacttgtcgtctaccaacttttgtagataacctctattgtggacactaaccctttcctcaaatgtgattctctgcgcaatttctattgggatccctacctcattcacatgtcggtaagcatctccagtgatgacgctacgggaagagaaacctgaacccttacggatgaaaagtgttctcattttttctgtccaagcttttgaagatgaactatccgagatcttagacaccccgtatctcatatcaatgtttcttgccgcttttgcagtacccctcacctggagataggtatccaccactctaaacatctcactggcttcagccttatgcgactcaaagtttgtctcgccagacctagagctttttatggctatgactttcttcagaacgtcctttagctcaattctggaaggatcctgaaaataagaatgacacaaatccaggggttacaacacaagccaaagcattcaactcaacatagtaatttagtttcaacttaccactgacatggtgctgaaaccatcagaagcctctggcactgacaaacagttaggcgggacaggaagatactctagtatgtatccttcttgaggaatatgtccctttgccgtgagtttctttcttgattcttcggggatccgtcttagaatttccttaacctatttgttttcccaccatatggaaaaggacacggaaagtacataatcatcagtttccagaaagaaaagatcttaaagatagagaatgattccaaatgaacaaaaagaacgtcaccataaaatcctacataaacagaaacataaacacacagaagaaagtaaaaacctctcttgccagcaggggacgcgtgtaatcgcttccatagcgataaccatatctttccaggaaattccagcaaccaggctgcagtcttgacctagatgggagcttcagttctagatatgaggcaccatctgatgctctatctttgattgagatttgcgaagcttcctaataaagtaatatagtagttaaaaatccaagacgttcagcaataataacatccaaaataacataaagcagtgaatgtttcatgatgccacgaaaataccaatagctactgcttcacaagcattgattaatgttactttcactgaatggatcaaaagaagcacaaatactatttagatttgaattagcaagttttctaacatgcaactagttgaaggaaaacttagaaaaactaactaaatgctgaaccaggttcacataagaaacatctatcaacttgctttcaggtaaaacttaaaaggaaacaatcagaatgtatatgccattactcacctcacaacagacacccaacaagcgatccgccagaccaccacttgtgccctgtactcagaaaggtgaaaaagattagtcgagattttatatggtttatttatgtgtggatcacatggaatttaagaaaactcaatgaggtaatacctttgccttctttatcttcagacatttcaagcacagaaggctcagcatttgtttcaactcattaacatgagcaggatggtatattggcactggaagctgaatataaccaaaatgacctgaaaatgtagaaacaaatatcgatatctgaagaagtattccaacaaatgatgtaagaacaaaaatatagcaactacggaactggattaccttcacatttatctggttctgtcgcaccgcaagattcacatttaccaaattcaagaggtaaccccaagaatgcgttagtgagttgactgggatgattaattgcggattcactaatcgattgaatacactgcaagaaagaattacagtccagtgagaaatggaatagtgacagaggatatatcgcagaacaacatttatatgcaaaagtgtagcacttagcatcacacagagcttgagtacaattatagtgaatttagtgccaaagataaccaaaacatagaggttttagctattcgaaatccttcagttatgtaaaacccatgataaacattgatgcagaacaagatggatcaactccagagagtataactcttataacttactatttcatggtgactagcaagagcaaatgtgattccaacaatctctccttcaagaatctctgatgtagattcttcctccatgaaaaaaccctaacgagcgaaaatcacacaccagcgagaccgagttagctcttatcagatgtaaacaaacagagaaacaaagacatttgagctcactaacttgatacaaagaacaataaagtctttgaagaacaagttctcaaatctgtaaaagatacggtttttata

SEQ ID NO: 31674 - DNA, 3049 bp, Arabidopsis thaliana landsberg
  unsure (1)..(3049): unsure at all n locations
tccaaaacactggccttactgtataattcatcagcatctccagttttcccttgacgcttgaaggcaagtgcctttctttttaagtcaagaagttctctttggatttgtcccttgcttttggctgctatccgtggaccgcttgactgcacagagccgaaagaagcttcatctttctttggttcttcatcctcccatcccaaattcttaagagtcgacaataacgctgggtccttcatatcattttctgtaacgctatcatctcctccattgagccgactgtcggtggcaagatcattggatcgttttttcggctgatcactgtcagcatatagattcttgcctgaatcaatctccattatctgagcttccaatatttgtgtctggttcagaacttcctcagcttcatcaacattaccctgtcgtcgcaaagttaaagcctttcttttcagccctaagagttctcgttgtatttctgctttagttctccttggtttagtaacacgtacttcatatgcaccttgagcttctgctgttttccctggtcgagaatttagtgggtcagatttttctgatgaaggacctgcaggattattatcttcatcattccaacctaagctctttagcatcgacaagtaattcggatcatttaactcctcatcttttacatccacctctccatcatcatccagagaactaatatcaggcagatcatttcctttttcacgagtggccttccctgtggcagctaactttgacgaattgtccagctcatcaagctgattttggagaaccgctcctttcttcaattcttcttctgcttcgttaaactttccttcccttctcaaagtaagtgctttctttttcactgcaagaagttctttctgaatcgctagcctgcttctgggaggaggattaagactcgtatccctctctgccctagttgtgtcaacagtttcagaggaagtatcagcagcctctagttccttctgaagtaatcttgccttctttagtgtagccatggcctcaacgacatttccattccgttttagattaagggcctctcttttcaatgtctgaatttcagctaaactttcatctctgtttttaggagatggtcgagagtggacattctcatggtgtccaggatcctcactccaacccaaagnnnnnnnnnnnnnnnnnnnnnnnnngtcctccatatcttcatctgtgacatcatattcaccatgaactccaatatcatctaaatttcccataaggttactaatgtcgaaatcatggcttccctcgtattgagctaacagatcatcttctttgtcatcatccatactattaataagtgcagatagctcatcatctgatccatcagctccacccaaaagttcctgctcttccagttccctttccaaaattttagcctttttcagttcatctttagcttccgcaagcttcccttcacgtttcagcgtaagggcttttctcttaagggcaattacctgactcttgtcaatacccccagtcttctgaggattagcacttcgcggaatttcacggagaagagacgaaaattcgccctccaaacttatagttgctggtttcttatcttcatcgtcagaccacccaagctccctcaggtcagctgccaaatcatcatttcctttacccccttgacgtagaggcttttgtgatttgctagattctttggtagcagccttgttctgcgtctcagcaacatttcgcatagacagttcccttttccggttccttcttaaagatatctctaatgcgtcggcctctctctcaagttccctccctctcttaaatgcttttagagcttcatcagatttcccttctccgttaagaattctgtacttattcttcgcttatactgcgtgatagcgcatttcttcaggactagcatccaactccatacctttattactactgctacttgccatttctttagaagcattcctgtctgtgctagacacagattcagatgaagaagatacatcaacatcagagcctagaatctcactgagaacatcatcctcattctttacagtccttttcgagctacctcctgaacaaattcacaatctctttacatcaaaaactagcagataacacaaaagtgtcataaataagatcactataggtacataaatacctttagcagctctatttttgtaaccatgacgcaactcaaaccgtgcagcttcttcaattttcttacatggttcacatatacgcacaggtgagtcaccttgtccacgtagtgacaacctttgctgagtgcaggttccacagaacaatcccccacatctccggcaatgatgctgctcgctcaaaaaaacaaagccaacagaaactaagaaaaattaagcaaattcaaaggtttttgggagacatagaagaatccagcaagtcacaagtctagtaatacacaaaccacaaaacatccagattcaccaaatttactcaaaaatatggaatctatcaaataggcacatcaccagaaaccgatcattcagtgaagttttccgataaacagattctgaattagatctcgaagaagaatcgactaagacgaaactaaatttcgatcgaagaaactaagaatctaaagatcgcgatagcaataagcaagtaccaattgatagagagagtaaggaaattaagagagaggaagaccttgcgattgatgaaagtgaattgagaagaacatccttgacaatgagaagcatcaacgacccaactatttcctcttagagatggcttcggcggtaatccgatcttctccaacattttcccgtctgattcttcttctcctccgccgcgaaacgaacttggttttgattttgatcttaccggaaatgtaaaagatcgagcagatgaagaagaagaagaagaagaatacttttcctcctctattgtcagatataaaataaataattttaactaatacggtatcgttttagctaaaacacataataggactcaatatataaagcaataataattagacatgaaactaatttttgctttg

SEQ ID NO: 31675 - DNA, 2348 bp, Arabidopsis thaliana landsberg
aagttttattttgataacatgtagatctagaagaatatagttgatttaaatttgaattaaaatacccctatttttgtatatattaaggtgatattttgaaagatacaattttttctaaaattttttagaaaacgatttctagtgatatacttattttagaatttctattctaattttttgtacatattctacgatatttagactattttcgctctatcaatcttagaaaataggaaattcaatatctaaaaattttagaacatgtcttctaagatttccttcatgttctaaattatgtgcgaaattgttttctacgaatttctatagtttctgaaaacagtagaaaacgttttctctcttttagaattaatatttaaaacatatttaaaattttgtttctaaattacttagaattcctaaatatagaaagcgaatctttgaaaaaggaaagtaaatatttattaaatattattttttaatattatattttctgtgaagattacgatctttactggatttagaaaacaaattctaatttttttagaatacaaaaaaaaaacgcccaaaaaaataaattgtaaacaagcgtgccctagtcgatttgcgccctatcattgatctcttcttcttcacgttcttcctttttcatctcgtgttctgtttttcattatgcatatctatgtgaggagtggtatttggagattgtatgataacaaggagtggagatttattgttgatgaaaaaaatcgtgggagattgttgttttggaattgaatacaacttttgaagagcttaagctgatggtcagagaagactatggaatagaacagattacaatcgatgtgaagttaagctacttacccacggatcgtagcgttgattgtcctcctgttgttatgatgaataacagacaggttagtaattttctttcctattgcaaaaagaaaaatacggtaaagttatgtgtgacgttcaatggtggagtacctgaaaaaaatattgtagagaaatttgatatttttggagagacaaggatatttgggaaaaacaaactttgagaaactaaaacaaaatattttttttagatgttttctttttcctgtttttttttttctaaattaaatagaaaaatatattatttcagtgattagtttactcgtgtattctcaaagaattggattagtgttaaataaccggttgacaaaaacatacaaaatagtttaaactggacaaaaacgacctgtcacatcgtcactgaccacagttcgagtggaaaaacttaagagtgagaattcaccatcgccgggaagaaactatctgaccaaacaacaaattcttgagtgagaaaaaacaaacttactatacctcgtcaccttagtttcaccacccctagtggatgccgtctttgttggaggaataggatcgccaaatatttgaaaacgtttttgccaataaatcaaagaactgtagttagtggaggaagttagagacactgtcccttagcgtctctaatatcccaccgatcttgaccacctactctttagcgtaaattctctaccttcaagtcgcctcgccgcaacaactaccacacgtgttgtgctgcagatataaggtagtagcttccatcaaattgccatcttgagaagccccatgtttgtgtctaatccttacaaatatgaaaccggaaagccttacaaatgtcccagatccgcctgaagacaccatgaccatgcaatatcacaagcggagatgaaccctaaccacggttgaaacaccatagttttttttttagttaagagagttttgcctctcaaaggcattattttcatgttataatcttcttttaacacaaatacacagtcatctatttttattagatttaattatatcattatatttaaaatatatatgaaagataaagagataaataaccattttggtaaattttcttttttcaacgcctatatgagataataaatatcaaattgttttgttctaataaacattttgatatttcttttctgtctttaaaagatggtaatatattattggtttgagggacttattgttgtgtgagttttccattcgagacaaaatttcatgcttaacaacaaacatgccagaaccgaaaaaacaaaatttggggaggtaaagtgtatcaggacgggctatctgacgctcaaatccgaaaacaaaacaaaaaataaggaggaaaaaaaaaacatggttgtacatggaagaaaaaatcaaatgaaaaagggttaagtttacaccttaccaatataatgagtaagggaatgacctagaaacggtcttcaacatgactagaaaatggttagaattatgaa

SEQ ID NO: 31676 - DNA, 708 bp, Arabidopsis thaliana landsberg
aaggcaaagtgttttggtaattcagcattaagctgttcttgctaaatcattcggtcttgttatatataagatacaagtaaattcacatctctgatatgattatcggagtaacatatataaaaaagaggaaatgttatttaaggagaggaactagccgacatagttcctgagttgtaataatattaatagagaggagtatgtgggaaaagtttccataaaaagatgatggaaacgtaaatgttgttcaacattttggtgtggaggtgacttgactcttgttttgtttagataataaataataatctgagaagaacaatttgtgttcttcttttcttctgttggttttgaattattggctaaaagaaaagccacgtaagagcatataatgacaacgcctacgtacgctttttagcgttcaatttagaccttaagttttgaaagattccatgtcttcgttttaaaagtcgctttcaattgtttgagcatatgtttcgtagggagcactaagttggtatacataaaggtattgatcaatctaaaaaactcaatggtttaattatattaatgactttagcctaaaaaaacttaagtcagtgtaaaacaatatcgatgtgtgattaagaagagatccaatttaacattacccacacaatcaatttgattatttcctcctctccggatctgagtctcttttctcttgatctttta

SEQ ID NO: 31677 - DNA, 2051 bp, Arabidopsis thaliana landsberg
  unsure (1)..(2051): unsure at all n locations
atggcttgggttttataactcattttaggcccgttaactccaattcgtattaagtgagcccaattatttgttttccgatagtttcattacgttttttatccaaataacttctgagcccgtgtttattctgagattgagttactttactcttcttggtttttcacgaaccctagccacagtcggtgtacaacaaatcgagggtgaacgagttcgagaagagagacgtttgagagaaacccagtacaccaaatgggtacactataatagtacaccaagtgagaacactagaacagtacaccactagtacactagactagtacactagccaagatagaatataatagtagactagaatagtacaccaaatgggtacaccaattagtaaccaagtgaattaaaaacagtacaccactttggtgcactagactagtctactattatactaaaaacatttaggaaatgcaatggaattaaaaactataccctaaaactatacactaaaagacattattgaaatgcaatgaaattcaaaactatacactaaaagccaaagatagaagactaaacccaagggaaaccatttaacatatgcaataaagtttaaaactagaccctaaagtcttagattactcatagaaatttcaagacaacgagtaaatttatatttcaaaatcataaccctcaactggttttgatggttcataacactttaattgaaatgtattttaatcgaattttcattgatactatgactttataatagtagactagaatagtacaccacattcgtacactagaatagtacatcacataagtacagattactaaacccaattaagaaatgcaatgaaattaaaaactataccctaaaagccaagaaagattactaatcccaagggaaaaacaattttagcaatgaagtgaatttcaaaactataccctaaaagctaagatacatggctaaactcattgaaattccaagtcaatgagtaagtttctatatcaacatcataaccgttgattggtttttatggttcataacacttgaattgaaatggattgtgttcgaattttcatgtgatactatgactttataatgggttgagtacaccacattcgtgtctgtatactttccaggtagacagtatgtacaccataatactttttgtacaccttttctatgtaagatacatatatctatacttgtagaaaaagttaagttgtaaattcatgagagagaaacgcctatatatttgacttccttattggcaataaacaagacaaatctaagaaaaaatcatgttatggtcatgctggagctacctaatgagatatttgtagatatcgtgagaagagtgggcaaagcgtcgtatttacacatgggggcaattctaagagcgggaagtagaggtctggcgcaagtacacagtaaggaaatgttgatggaagctaaactggatgagttgtgcgttgagcctcctcaaattttcagcaaatcgataaacccaatcaatgggtttatcttcaaagcgggaccgggtagatgtttcttcgagaagtgtttacattacaaaaaccctacggcagtctactttgaatcgcttagattagttacaagagaacaagatctagatggggctttggcaatggtcgcttctcttgtgccttattattcagtcccaacatttgcatatgcaatgttctnnnnnnnnnnnnnnnnnnnnnnnnnnnnagatgagattttcaagaccttctttgctgtacatgctcgtgaactactgaggaaattcgagaaattggggagaaattatttgaagacctcaaaggattcttccctccttcacaagacacgttcggagataagtgggtttatctaaacaccgacacactcagcttccctgagtgcgctcagtggcattattatcgaattaattgtgacgactgctacctattctggtgtttacttcgcataagagaattgttgtagttgtgtacacctaagttgtatacacctaatttttcttgtttatgttagttgaacgagaaccctt

SEQ ID NO: 31678 - DNA, 1203 bp, Arabidopsis thaliana landsberg
tgtcggctaactaatttgagatatgacatcaatcggaacctctgtggcagcttcaagtcccattttcagaagcatgcgtgcaacaactttccgtgacaccagagctgcttgatcgtcactaaaacccattttttcagcttttctacggcgtaaaactcctctttcttccattctatggtactcaggcatcagcccaagcctctcgatcataatatgactcctggtagtaacttgcggtaaagtatcaagtaccccatagaattctgtttttaagttgtcttgtgttctggtaatcggcgaaagggcagtctcaggtacacagttcattctaaacattgtctccggaagaaaaagtatatcatcttctgaagtacttccatcaaagccagaactaggatgtgtactagatctactcatatgagctaaacttcgatcttctaaaaaaggtgcacgctttctcttatgagtatctacaactctaaggtaagtagacatcccttcaggtgtgcgtttatcagattcttgtcctccaacagacattccatacttaaaaccataccttgaaataaactgagtgtaccaagtgtctggtaactcctcaaacctcgacctttgagaaagattactaaaatcagactcactacctcttgtcccagaggtaaaacttggcttcgataggctctgaataaacatcacaatagagaaattaactgatgcacgaaagataaataaacaaacaaacataaaactagcatttagtgattcggatttatccgaaggtgaaaccttttgaataaaatttaaattttagacattttatataacgagagctccttgaaatgaatcaccttggttaagctcggattgtggcgaatccctccctctcgctgaaacccactttcaagagaagcattctccaacgtgtagtacacatcatctccgtgtagctgtaaatctgagagcgaagcaaaaccaaaacctcacattcaacacaccgaaattgccatatagaacaaagctccaaaaaatgaaacaaacattacaattaggattgagcttagacaccgcgacggaagagacatcagaaatggaagcagaggatgatgaagaagcggcgattgtattggatcgaaggaaaagagagacggtggctttatcgaataagagagcacgaacgcggagctggagctgaatctgagccct

SEQ ID NO: 31679 - DNA, 381 bp, Arabidopsis thaliana landsberg
ctcagtaagacaatagaatcttgcaaatttgtgttagcactcttgagaaccaaatctggctcatttgatgtaggccagcctgctgttaccacagaaccttccttcttcaaaagtttcctccatacatattctgcaaactggggacagattggttcaatgaggcgtgtttgcacatccatgaagttaagtatcaagtcatggttcatattttcgtcactgccacaagagtttctatactcatctcgagcagcttgtaagtcgtaaaccccattcttaagtgcctccctaaacaaacattctttgtacgctttttcagtcaatctgatagcaatgttaatgtcattctcaaacactttatcagcatatgtagatggaggcccc

SEQ ID NO: 31680 - DNA, 2768 bp, Arabidopsis thaliana landsberg
  unsure (1)..(2768): unsure at all n locations
cggatcccttgaggttacaagcaccaaaggatatttatatagtaaaacacatatcgttttattacaaaccgccgccttctcaaagggttatcaacaatctctcatctttagcattgttttgttatcttcttcttcatcacaatttttctacggtcagagattcaaaagagttctttctctctatcttattctccgatcatcatgatgcagcagccaccacccggaggtatccttccacatcacgctcctcctccttctgcgcaacaacagtacggttaccaacaaccttacgggattgctggagctgctccaccaccaccacagatgtggaatcctcaagcggcggcgccgccatcagttcagcctacgaccgctgacgagatccggactctttggatcggggacttacagtattggatggatgagaatttcctctacggttgctttgctcataccggagaggtaatattctcagatctctctgttttcgctttatcgttcgcgcttaattgtttgttcgaaggagattaaggttaatttgataagtacttgttagtgttaattgtttcctcgcttttatatttgaaagatttgattttgatgtgtacaaagattgactttagatgtttgaattgtttttaatatgtaatctctttccgacaatgagttaatgagtgttctgtctagttatataatgactagttggtttaacactatcagtatttattttgcagatggtttctgctaaagtgattcgtaacaagcaaaccggtcaagttgaaggatacggtttcattgaattcgcatctcatgctgctgctgaaagagttctacaaacattcaacaacgctcctatcccgagctttcctgatcagctctttagactgaactgggcatcattgagttcaggagataaacgagacgattcaccggactacacgatatttgtcggtgatctggctgctgatgttacggattatatcttacttgagacgttcagagcctcttatccgtcagtgaagggtgcaaaggttgttattgacagagtcactggacgtacaaaaggatatgggtttgttaggttttctgatgaaagtgaacagatccgtgctatgacggagatgaatggcgttccttgttctactagacctatgagaattggtcccgctgctagcaagaaaggtgtaactggtcaaagaggtaaagtaaagtatatgtcacattagaactgatttgatcttgcattctcttgatttgtgtgttgtagtatctatgtgattaggttgccttaagtaagaactagttaactnnnnnnnnnnnnnnnnnnnnnnnnnactttttctaaagccgcatcctacatttaccgctgaggccgcagtcaattctgttaaaaaacttaaaaagatagaaatcttatagcacacttgttgtatcctgtttgtttcaaagcaggggagtcaagaggctctctatcatcttgaggcctggaactgatattcagctgaaatggttatctccttattgagtgcccatgcttaggtcagttttaaagttcatgtgttgtcctttattagccctttccttcgattcagccctactttaatttccatttatcttttctatacaaaccttatcccagttcttggtcagttacttacttttataagtcgattcttatgtaattacttttctatttcattccgctctacttaaagttcttatctttcacttgatttacttatatctttagtacatcaagctcttttttactgtttttgtgagtctagatgatagaagttctatccttaagttatgagatttggtcagatgtgacagtttctggagtggccagagaaatagtctatacattgtttctaattttttcagtattgacctttataatcctctatattcctctctataggcatttcatttagtttaccacctttatctacccttgagtagtcaaaaaccttgggtgaaatgtgatgcaaatgtaattgttgctctctacttgctcgttttcttgcggttgcagctcctcagatcctttctcaatgcttgttgatggaatgatcctatacgtatagtttatgattgatgttaacatcactgatgccttctttgaatactattctccttttggagtttgggcggtgtgttgtatatgtgtgaatgccttctttgcataagctttcattttgatgtgaatatctagatgaggctgcaaaaggctccctcatagttttccagtcactttgttgcatgtgtaatttacagttacttactacttccattatacctgtgttttttcgtgtaaatgcagattcataccagagctctgctgcaggggtaacaactgataatgatccaaataacacaactgtgggtcttgagctcctattatatatttgtccctctcggttatcttccaaagcggttatatctgacgcattttaatttactgtacaggtttttgttggtggattagatgcatctgtcacggatgatcatctgaagaatgtctttagccaatatggtgagattgtgcatgtgaaaatacccgctggaaagcgctgtggattcgttcagttttccgagaagtaagtctgctgctactactggaagctctgtctttcatttaaccctaaaatagtttttggaatagaattctaatagttttttttatcatgtgttttgtgaccaaccctcacttttcaagagctgtgcagaggaagctcttagaatgctgaatggagtgcaattac

SEQ ID NO: 31681 - DNA, 2081 bp, Arabidopsis thaliana landsberg
acaccgttcggttttggttttgtatttggatttcgttgacaatggatgacacatccaacctaccaacaaggattctttagcagagcattgaaatgcagagacgatataggaagattgttccaaagtacttactcgaggtaccgcttgcaactcgggctcttggatcttttgttcataggagagtggtctatcgacaaatgccttacgaaatgtaactgaaatagagtgaaagggatgttaagactttcaaaggaatgagattgcgtgcatacgattcttatatagaagtgagaaggagtttaacgaacttggtctccatcattgagaccgagataacggatgctagtcttgtcattgactaatctctggtctcgataacacaagcaaaaatgaccccagacgtgagacctgtaggcaaagatcaaagtgaacgactgtaccagaaagcttaagctgtgagaattttcatatgaaatgatgatataccatgaaatcatgccgtgaccttccagaggagaaatggtgaatacttgttccacagctcttttgagctctgccactgagcaatcctttgcaacttccacatctattgattcgttggaaaccatttaacttcttgagaggccaaatcagaaacagtaaccaaaaaactagttgatacttcatccaaaattatgtctattaaggctcttaaacaatgatttctaacagcaacaaaaaattccggattagagatcgattagggtatcaccaactgagggaaccgttgagcttgattgtaaactaaactcttaaaattgctatttcggaaactggataagcaaaatcgtaccgaaaagggagccgttgagcttaacgacggaaagcttgatacgaccctgaggaggaagtttcaggtaggaagatctccgtccagaaatcgaaccaccgtcgtttaaagcaaacgatgacaagaagcgtggatctatcaacgacctcagtcctccacttcgacgaccgtccctaaccggactatgctcttctcgcattgccgattctcccggattttcaccgacaagattctgctctctttgctcttcttcttcagccttcaggtgactgttgaggagctgagcgagcgagcgagagaatcgggagagtttgttttccggggaaaaaccgcaattactgctatatagctccccaataaatgccaaaacaaaaaatcaaattaaagtttgtcaatgggcatcacggcccaaatctaataatcaaaggcccaataacttgattcgacaatacttagcgggtttggataaccgcctaagcatctgttcgacaccgcctattttttttttttacttactcctcctgatctgctgatataaggccgaacgggaataaaaaaaaaaaaaaggaagaagcgactcacccgaaaatgttttagggtttttctttactcgattaagctcactagttcttcgcaacgtagttagagatcgacactggcgcggtggatttagggtttttttcctccgcgactacgctcggcgtttcgatttggaaccctaagctatgtggaacaacaacgatggtatgcccttagctcctcctggtactggcgggtccatgatgccgccacctcccgctgctcatccttcttacacggcgcttccgccgccttctaatccgactcctccggtcgagcctactcctgaggaagcggaggctaagcttgaggagaaggcccgaaaatggatgcagctaaattccaaacggtacggcgacaagaggaagtttggattcgttgaaactcagaaggaggacatgccacctgagcacgtcaggaagatcatcaggctagttttcttctcttctttctctaccatttcgaaatacagtttacttgataattattttctggctaggtttctaagatttggttaggatttacttattttgagactgaagctgcgatttctttcttacttcagggatcatggtgatatgtcatccaagaaattccgtcacgacaaacgtgtataccttggagcccttaaattcgtccctcacgcagttttcaagctcttggagaacatgcc

SEQ ID NO: 31682 - DNA, 5775 bp, Arabidopsis thaliana landsberg
  unsure (1)..(5775): unsure at all n locations
tccagatcctccaggtcagacgtctattttgggcctgagcttcctgcctcttcaaagcatactctgcccacaccngtgtgaatcaataaattcgctttcccatggttgtatgtaacggtaaagattaggaatcagttgatcctcctcgtggctcattccactcctgaaatggcttacaccaacatctgtctggttgctgtaccgaaggtcactttgtgggatcaaaatatgacccatagacaacatcccaagcccgccaatttctttcggagtgtagaagataacaggaggaaatctaccaaggaaaagatgaacaatcaggtttaaaaaacataacatacaactatgatacgtcaaacacaatatagtaagatagcatttgctcaccgactaggcatctttgagtttagcccaatcttaaccctcgtttggattttattttcacatttaacaagcagatccaagagctcttgcgtatgcacagtggcttcacggaagtaagtcatgaggcctgtataaaacaaataaacgtgctcagcttcatgctagccaaacattattaaacgtaatcagtactgccaaaagaaaggcgtactacaggatatacctatcagagctgtattccatttattgacgattttggtaaatgtagttgaccctgacgacataagaatctgcctcacacgattctcaaacaccttcatgtgttcatcatcagcccgtagaaaagcaactgcagtcctctctttagtttgttcattctgcagattccagacaccatcccttgtgctgctaaaagcttcttgacccatcctgatttttggaagcacgcggacttcaaatccacacctgcaggcaagaatgcaaaccccagtcactatttaagctgcactatcaaacaatgacaaaaacaaaggcctagcactaatgtacaagagccactagaaaactgagacaaaacgcatacatgctgaaaagcaagtttggattatccttgctgtacacggagacgaagccattctcccactccaaggttgtgatgctccgtggaagacgattcttcatatcccagaagacacttctaccaagattgactgcaagataaataaataatgagacaacatctggtgcataatgatagtctatctaaatataaaaaggagcataccatcatgtttcattaacctcatccttgcatctcttggccagcattttttattgttatatcccaccatgttttcattgttgggatcaggacgctcggtgagatgacgttgaataagatccctagcctcttcatgggtaaatttaaacattatatgcactttgtctatataccgagaatacagtcttatgggatggcgtgtctcaacttttgtattccagtaggtcataaactcattaggcctctgcggtggcccggcaatttcacttgctcgagtcaaaccaaggagcaaaagatctaacactagtccataaaactgaacaacaaacgatgcgaactgcagtcccctaatgagtccatacgtattagtatagctcatatccttgtaagacagcaccacgttattcttgccagtcacatagtttgcaagcttgggatcaagaaccaaacgaagaaggctgaaagaaacaacaaaaaagacgtgttactacagaaagtctaagttctatgtctgtaatcacataagcatttcacagagagatacctgttcaacactgtcaaatcaatcttctcaaagagtttttcaaacttcgtctggagcatcactacacactgaccatcactagtgtcccatatgccttgcaaattattgataccttgacaccatttgtaaaccaggagcggtggcggctctgagtctgcaggcttaatccaattgggaaacaagtggcgcttgtcaccctcataccacaaatactgatcaagataagcatcagtaattttctccaggggatcaatttgatagactggaatcaaatggctatatagatccataaactctatgccaacctgcagaaaaaaataatgtattcaccatcagaataacatagtaaccttgagatctatatgttcagaaaactgctccagaataggtgcattatcaacttacttctttgaagctatgctgagtgagaagatgacgctttattcgcatcagagcttcatgaggattgtcataagcttgttcaattaaaccaagctcttctctctgctgttgattcaacttcacagctgcactatatgattctttcagtctctcaagggccaagataagcaactttgtgtcatgtttatatgataatggagggaatgggattgctgaaaattttctagattccagccaatttacagtggtgctataaattgcaattccttcatccgctgtgacatatggaccatctttctgaaaattatgttgtcgttcctgcaacaattttacaaggaaaatgtattacagaactgggcaatcgagaataaaaggaactaaattcaatcagacaaaaaaatgaagcctcttcgtaaccatctttgtcaaacaacaatgattttgattttacgagttgtgacaaggtacagacctgttctgccttgagccaaagacgggtcaaccgtccaagattctttctacaaactgtcttatcaacagtagcccctcttctgatacgttcacgattgtagtgagcaacatttgtccaccaatcagctttagacttgacatatcggaggatcatattctcaattgccacaggtaatccagggaccttccatggtatattagctttccaacaccgccatgcctcactaaggtgctgcaatatcgtccgcgccttattttgcttaataccctctgcacattagaagacagtataaaccaacttggatagataaaattaaaggaaatcgaccttgagaaaaacaaatcagttatagacgcaagaagcgaacctggcattgcatcaacaacatcatgcatgacagcagctcgaagctccaaatcaaaatggctttcaactctctgttttgtgactgttttggccactccctttgagtgacgcccctcaaattgacgtgcaagcagattccctaaccatcgttctagaagaggaactattccgcgaaggaaaaacaaccataccctccacattggagcccaaaatccacaccctggtcctttacccacaggaccagtattgaaacggtaatagatcaagtgtttcaaatccttgcacatcctgatttgtctcataagcctgtacttataacgatacatacctgtcaattgcccaacatgggagaaaatatattgcaggccatcagccaattgaaaggcatcaacattaccaagtcggaactggacatttgcatcaactacaagttttgtcagccggaggatctcacggcagagatggaaagcatttccaaaacgcgacttctttcgttccttggttgtcagagttttcacaggcttgaggttgaagttataatcaaggtgcaggtagttcaaattcttcctgtgaatcaacaggttcagcatattatacccctgccggcagacttgcagacccacttcaacccaatccagttcggtgctctgaaaaaactttgtagctgcaagagatcgaaacaaatgcttcttcttctgagccttagggggtctatggtgcagctcattcagtagataacatttcaaaagcttctggtaactaacccgaactttgacaggatatgctggaggactgcagaaaatgagataactaagaagttaatacaatgtctagtaaatttcaaaaggggaaagagaaccacagtagcatcagaaaaattagcttaccagtgctccttaaaccactctgcaacaaggggtatatcttcagcccgccgagtcctcccagacctcatattgaaaggccgaggggcaaacaacaatgaaatgccaggagctgtagtgtcagtgtagagtggcgagttatttagcaaaggttccagtccttctggtaacacaaagtcatccccatcatcatcataaccattacttttgcgctgttctttattagtgttattagagttacttatggggtgaattaatggatcataataaaaggcaggaaggtcaggatcctcagtctttatgtacataaccataggagtgtgatagacacagagttttactttcctgggcctattattgtacagatgtgggaaagctactttgtactcagttcgcagaggggatcgaattataagcttgttgatgtcattaaattcattccagtcttcatctcctttctccatatcacgatgcaaaggctcaaacttaggaccgcctgaaaaagagtaccaaattgaatcagggaaagagaacagaaggacaacaactgtgaaaacgaagatatcagaacaggagaacatagagtatagcgttacctggtatgcacatgttcagtgcctttgcagtaaagaatgatggcatgtcaaacaagtagaagtagttgcgatcaaccaaatcagacaacaactgtgctgcaagcctgtgaagggttgacataattggaagtgagagattccacgtctggtaacttggaccattgatcatttttgtttttacaagtggcttgtggtcgtaaaaccaagagtacacagcagaatcttcttcttcatctagctccaactgaattgcctctagaggatcaacgtccaacaggttatcagcatagtctagagggggctcctcatcatcaaatggtggaaaccgcattctcttgaaatgacgacgatccctcttctcccttctcatcattatccacatagaaccccactgcaaacgaaagaatcatcactagaaaacatgtctcacaaattcacaaatgcacagacacaaaagaagagagagggagattattcacccacctgagccatgtaaataggttccacaacccatcgtacttcgttcacaaatgtaatagctccagtgatgtggtacaagaccttcacgtcccggacctggaaaatatctgagttcaaaattttgagcagagcaggagaacaactaaagcgagatatagatcactaagtgaataattacctgttcccagggcataggcatattctccaggagcttgaaaactgcgtgaggaacgaacttaagtgctccaagatatacacgtttatcaagtcgatgtttctttgatgacatatcaccatgatccctgaatcaaaacgcagagtcagtttcaatctaacttaacccaaacctaataatacaaagaaattggaccagattcgtttcccagtcaactggatttcgaaatcgaaattgaaaaattagaaactcgcctgatgattttcctaacgtgctcaggtggcatgtcctccttctgagtttccacgaacccaaacttcctcttgtcgccgtaccgtttggaatttagctgcatccatgttctcgccttcttctcaagcttcgcctctgcatcctcgggagtaggaaccgtcggagtattccgattagaaggcgccgtgtaagaaggatgatcagcgggatgtgaaggcgtctgcatcctcgaaccgtcggtaccaggaggagctaaggacgtaccatcaatgttccacatagcttcagatttcaaatccaaaggcccagcaaaatcgccgaggagcaaaaccctaaaacctcagtgcgagccttgacgaacacgaaaatccctaaaatcaccgtcgtcgggtgaggttggtaagaaagacgattaaccgaacgaagatatatatacgaa

SEQ ID NO: 31683 - DNA, 2769 bp, Arabidopsis thaliana landsberg
aaaggtgttccaacggctactcgcttaacacgaggaggaaagctctgtgtttggacgtgatgacactcccgaggttgggggggtatctacctacccttatgcaatttcgatttgtccttttagtcatgctaacacaaacttctgcttggatgttaaattcaggaagcttccctgataaaaaaatacgctctttatgggccgtatccctcaccgagccccattatcacatatcgtcgctttcttcaaagatgttggagaagttgttcatgttcgacttgctataaaacgagatggtgggcgtactggctctggttttgttgagtttgcttctccctatgaaacaaaaaaagtgagaccagttttttttttctttgaaaacttgtgtatagttagttatatgtttaaacgtatccaaggttcttttctgacgtttttttcactctaggcactggaaaagaaggatggagaatgtttgctcgatcgcaagatttatcttaaactgcctaagctaagctcttcattgactcttcctacgtaagtaaacatgatttttccacgttttgtaactgattgctagactttttgatacaatatcacagaagactaaggcttttcattttttgattaattaggtattgcatagatcaccaggtttggtaagggaacaagacttttttttgaagtttttttgtatacatgtagagatcagtagcgttttccatttttctaggtaccaagacttccttccacgacaagaagatgagacacctcccgccgattttgctgaggtaccaccctactgccctcattatcttcaaaacgctcgaaatgtttacttattttctggggctgaatcttgctagctactttttccttgtttcctgctaacacacttgttcctgtataatgcacaggaagttctctttgttgccaatctctccccccaaactaagatattagatatgtaagtagcactcccacttttcttctctgagcaaagaaaaagtaactctcccatcactcatattttaccctccacttttgcagcttcggtttctgtcaagatgttggagaagttgttagtgttcgacttattgcaaaccatgagggcaagcctgtgggctgtgcctttgttgagtttctttctgcacacgaagcaaagaaggtgagactggttttgtagtcatgatggacgattttagtattttactagtcattttgaaaattagtgtttacaaacttatgatggaaaacatactactagttttttgaaagctgattaaatctttttaatactgtaggtgctggaaaacaagaatggtgattatttgcatggtcataagatcattttgatgagaggacatggtgaaactcccaatttcgctgaggtacctcttcttgttgtcttcacaatatgtcaggctcagcagaaacctttaataataataacagaattcttatgttgggggtgaatctttagatgaggctaattgtgtttttttttcttttccttttcttctttgcgtcgtgctaactcacttggctgttaaactcaggctgttgccacaagtaaaaaaaagacgctctttgttgcccatcttactccccagactataatatcagatatgtaagtaacaccttaagatttcctctttcgttcttggagcaagtttctcatgactaatattttatcctccacttttttacagcatcaatttcttcaaagatgttggacaagttgttcatgttcgactaattgttaaccacactggcaagcatgtgggcaagggatttgttgagtttgcttctgctaaggaagcagagaatgtgagagttgtttttctagtaattgatgaaaagtaatgtatacaagtcgcagtcatttgattagttaaaccgtttatttatactctaggcgctggaaaagaagaagggtgatatttgcaggatggcgagatttttcttaaggcggctaacatagctccattccctccacccaagtaaattaattttccatgttatggagatttgttgctgtcaacttattgccaccacagaagactaacactaatattatatttcttaactaggtggtgcgtagatcacaaggtttggtaaggaattttcaactatttgcatcttgagggtttgttatcaagagcacattgggtgaagtttttggtatacatgtagagatcacaagggttgtttaatgttccaggtacgaagactaccttggacaagaaagagatgaggcagcagtggaaggacttgctgaaactccctattttgttgaggtacgtgttgttatcatcttcaaaatatgtcaggctcagaggggaaatgctcaagtgtttgataacaaaactgttacctccttagagccatgctaacacacttggctgctaaatacaggaagcaagaaaaaagacgctttttgttaccaatctccctcctagaactagtatacaaaggatgtaagtagcacctttagtttactctttcgttcttggagcaagtttttcatgactgatgttttatcctcttcatgtttacaggttgtatttcttccaagactttgaagttgttcgtgttcgacttattgttgaccaatcgggtaagcatatgggctgtggctattttgagtttgcttctgctaatgaagcagagaaggtgagtagtttttatagcaatgatgaaaactagtgtatacttacttatatgatgaaattgttttgatgaaatatttttatactgtaggcgctggaa

SEQ ID NO: 31684 - DNA, 4365 bp, Arabidopsis thaliana landsberg
gggcatatggattgggttgtgattggagacgctcgtttgtgaccactgatgttaatccctttttcgatgcctttgtgaggtggcagatgaggaagttgaaatctatgggaaagattgttaaagaccgcaggtacactatattctcacctttagatggccagccttgtgctgatcacgaccgtgctactggggaaggtgttcagcctcaagagtatacactcataaagatggaagtagtcaagccattccctctgaaactgggtcctttggaaggcaagagagtgtttttggctgcagctactttgaggcctgagaccatgtatggacaaacaaacgcatgggtactacctgatgggaaatatggagcttatgaaatcagcgaaactgaggtcttcatccttactgagagagctgcgctcaaccttgcgtaccagaacttttcgaagaccctcaggagccttcctgcttggttgagttgaccgggtatgatctgattggactcctttgaggtccctctgtcagtcacgagatcatctatgctctgcccatgttgaccattctgaccaacaaaggtactggcattgtcaccagtgtgcctagtgatgctcctgatgattacatggcttacaagatttaatcaaaaagcctgctcttcaagataagtatggtgtgaaaacggaatggttgcccactgaaatcataccgatcatcaacattccggaatttggggataaagctgctgaaaaggtctgcttggatctgaaaattaaaagccaaaacgataaggaaaagcttgcagaggctaagaggttgacttacctgaaaggatttaccgaaggaaccatgcttattggagagttttttggtaggaaagttcaagaaattaagcccattatcaagacaaagctcatagagactggcgaggcaatcatatacagtgaacccgagaagccggtgatgtcaagatcgggtgatgaatgtgttgtggctcttacagatcagtggtacataacatacggcgaatcagaatggcggaaaattgctgaggaatgcctatcaaagatgaatctctactctgatgaaacaaggcatggctttgagcacactttgagctggctcaatcagtgggcttgctcacgatcttttggtttaggaactcggattccctgggatgaacagttcctagtggaatccttatctgattcatctctttatatggcctattacacagaagcccatatctttcacgatggagacatgtataaaggtagcaagcttctgatccgccctcagcagatgaatgatgaagtttgggagtatctcttctgtgatggcccgaaccctaaatcatctgatattccatcagctgtcttaagtgagatgaagcaggaatttgactactggtacccgctagatcttcgagtttcaggaaaggatcttattcagaatcatttgacatttttcatctacaaccacactgcactaatggcgaatcgtaactggccacgtgggatcagatgtaatggtcatatcatgctgaattctgaaaagatgtcaaagtctactggaaatttcagaaccctgcgccagtctattgaagaattctctgccactggtacaaggttttgtttggctgatgctggtgatggtgttgatgatgcaaattttgcatttgaaactgcaaatgctgcaattttgcggttgacaaaagagctcacatggatggaagaagttctggatgtcgaatcctctttaagaacgggacctccatctacatatgctgataaagtgtttgaaaatgacatgaacattgctctcagattgactgaaagagcgtacaaagattgtctgtttagggaggcacttaaaaatgggttttacgacttacaagctgctcgggatgagtatagactctcttgtggaactggaggcatgcaccatgacttgctactgaaatttatggatgtgcaaacacgcctcattgtaccaatctgtccccattttgcagattatgtttggaggaaagttttgaataagaaaggttgtgtgctcacagcaggctggccaccatcaaatgagccagatttggtgctcaagagtgcaaacaaatatttgcaagattctattgtgttaatgagaaagcttcttcaaaaacaactaacaggttccaagaagggtgctaagaaaggtgctcaagtaacagctgtgccagaggggaagctaaaaggcctagtatatgtgaatgagcaatttgatggatggagagctcactgcctgcggattctgcaaagtagatttgaccagcaaacctgtagtttccccccggatacagagatgcttgcagaactaagtgcaacattgttgcaggagggaaaaaacttgaaagccattcaaaaggtttgcatgcctttccttaaattcaagaaggacgaggcaatatctattggcactcaggctctgaacttgaggttaccttttggagagatcgaagtccttcagagtaacaaggacttgatcaggcggcaacttggtcttgaagaggttgaaatatattctgcaagtgaccctgatgatgtttcaatagctggtccacatgcttcgctgctgacgcagaatcctccatctccaggcagcccaactgccatctttgtgaccaggtaaaagctatttatttcattacaattgcttcttaatagaagcagcatggaaactctttttgtttctggtcaactaaactgaacgaatttttcgatgctccagcacaagtgtctgccctccatcctaaaagcgttgttcaaaagaaaagcgtgggacaagtttcaactactagtcaagaagtttgcaggatttttggtattttatacaagttggactattttgacttctttgctgagtttttctcttttatttctggtattgtgtagtaatatcatctgttctctcttattgattcaacaatatccttgtttcaactttcaagtttgcttatatgttctgctcttttctcctgatcagctttctagatttctttactgggctgaaacaaagttaaatggtcttttttacaaaacacttggtttaacgtaataagaaagtctagtttcttgctatagctttatgtctaggctctccaatactggttgtggacaagtaggtgaacaacaaggacgataaagagttccatatttggagaaacagaggagatctctaggtaacatgtgtcactatggacaaaagggtctatttgattctgattctgatccatctctatagctagggataataaaatgccttagtctcccttcctgtttcttcatgtacccttcacacaagaaagccttagaaaacttgtcttctatttccctgttaacatcatgcacaaacacatcagtctctcctccctgtttcctgttccttgccatcattcccgcagtgtaaattgctgtcattctcccaggagcctcatcgtagtagccagtcggtgcatcaaccatgattagatcccaaccggtctcataaatttctgcaggcaaacccttgagtgctagttgacacattgagtaccttggatctccaatggctgtgcattcaggtccttttccgacttctatgagattatcggcttgattgactttactgtcatatgttacatggtacgattccagcatcggaaaccgtctcttgatctgttttatccatgcttcatcttcttcaagaaacacagtccggcctccatagttgagagagctccacatgaggctgtcatggcctagaccaaacaccaagaaattgcagggtgacttcttgccgagtactctactgcttaccgctatctctttgagcgtttgttgtggtgtgataactgaggtcgagtaatggatcagggcttgtgcgagggaacgtggtagcttattgcaggcaccagagcaacgcgttgatcttgtctcttgtggagtctggtgttcctgtgaagatgtcagagttgatctcacgatgaagatgagaattaaggtggcaagaagaaaaacaaggagaaccttcagcttgtggttttgatttgctttaggcctcattgtctgcttcgaaatttaagaacttgaattctacagaagttacgacttgttcctaaataactatataaagaaatgctgagataagagaggaagttgggtttatgcgtagacatgaagcaaaagaagctataagggtacttgaagaagacattgcagctaatttcaggttctgcaaaaagacgcaagagagtgaagccttctatttaaggctcttgggaagttggatcgatatttgtctcttgtagaccgtttagtgccattgaaataccaaataaccatattgattgattct

SEQ ID NO: 31685 - DNA, 1076 bp, Arabidopsis thaliana landsberg
tgtgagttttgttatcatgagcacattgggtgtagttcgtggtatgagatcactagaatgtttgatgtttcagttacgaagactaccttcgacgacaaaaccttgtgatagaataagatgagacagcagtggaaggacttgatgaaactcccaattttgttgaggtacctgttcttattatcttcaaaatatgtcaggcttagatatttaataacagaactgttgccacaaagtcgaaagatgacttatttgggggatgaatctacttttgttgttatgcaatttaagttctttctttctccttaaagagtcgagctaacacacttggctgttatattcaggcagttgctgtaagaaaaaagacgctctttgtttcccgtctctctccggaagctcaaatatcagatatgtaagtagcaccgataattttctctttcattttactggagcaaatttttcatgactaatatttatcctttgttttacagcatcaatttcttcaaagacgttggacaagttgtacatgttcgacttatcgtagactacacgggcgagcatgtgggcgatggctttgttgagtttgcttctgctaacgaagcagagaaggtaagagtagtttatagtaatgatggaaggtattaaagtagtaatttaaaaagtatttttattagataagaagagccaagtatcattaaaagaagagcagcaaaaacaaaattcaaaatcaacagccaagtatagaacattagataagagatcaggagccacaccaattaaattacagcgccggtgtttttcccgggaagatttgagagcagcaataaatcgattccctagaaggagaaagaagggattcataaacacaataatctggttttgggcttacgtgctcgagcgtccacgtaaatgggtctttttataaaataccaatttggttctggtaaatgccggttcgatttgggttaacgataccaaaattaatttatcccgtaactgatcggttgagatacgatgatcatcctccggattttctgaaccgtcaccataaacccacttctccaccaccagtccaccac

SEQ ID NO: 31686 - DNA, 108 bp, Arabidopsis thaliana landsberg
ccgatgcattttgacatcccacagccttcggcagatcgcttagccccgttcatcttcggcgcaagagccgctttttcagagagctagtactcactctttcaagggtgg

SEQ ID NO: 31687 - DNA, 1043 bp, Arabidopsis thaliana landsberg
tgcttgctatgcgggttccagcttgcattagtcctgcggatattaacgcggaggaaacacttaatactttgaaatatgcaaaccgtgctcgaaacatccggaataaaccagttgtaagctattcagatatgtcaatcaaagaaactaattattcactgaaattacattactctaattatctctttctattgtttgattcttcaaaacaggttaatagagatcctgtgtccagcgagatgctaaaaatgcgtcaacaggtagaatacttgcaggcagaactctccttacggaccggaggatcctcatgtgcagaagtccaggtatggccagtcttcccagcagttttttcaggagtataaagattaagattttgtgtgattgtgcaggctcttaaagaaaggattgtttggcttgaaactgctaatgaagaactttgccgcgaacttcatgagtaccgtagcagatgtcatggtgtagagcattctgaaaaagactttaaagacataagagctgtaaaattctaactgatacctttttttttattttttctacatccttgtaactgttatgaaatggggagttatttggttgcaggatgatattgttggttctgtcagacccgatgggctgaaaaggagcttgcacagtatagagtcctctaattaccccatggttgaagccacaacaggtataagaaagataactagttaaagggtaaaagacagtaatgttattaaacacaagagttttcattatttgtaggtgattcaagggaaattgatgaagaagcaaaggaatgggagcataagctcttgcaaaatagtatggacaaagagttgtatgaactgaaccgccgtctagaggaaaaagaggtgtgttttatttgttaattatatatagaaatgccttggagttccgttatggcttacagagattatttattcttgattataactgcataatcaatgtatgaaaacagtctgaaatgaagctgtttgacggctatgatccggctgcgttaaagcagcattttggaaagaaaa

SEQ ID NO: 31688 - DNA, 4697 bp, Arabidopsis thaliana landsberg
tcatgggcaatgataatattgtctgtgatcatgcgacctggaatgaaagcagcctgattttctgatatgattcccgaaaggtgtttcttcagccggttgccactaatctttaaaatgattttgtagctgacattacagagggcgattggtcgaaagtcagacatctttgttgggggaaccactttggggataagacagagatttgtatgattatgagctagatcgaattggttagtggtgaaaaacatctgcacttcattgacgattgccggattgatatcattccaaaattgttggtaaaaatctcccgtaaaaccgtcggggcctggggcctttgtaggaccaatagataacacggcttctcttatttcttctattgtgactccttttgttaggtcttcattcatctcatcagttatcttgctttgaaatccttgaaacacagcctcatacgtctcctcagaagttggtgtggccgtaaaaagctctgcaaaatagttggtcgcgacctctgcaatttctttgtcccctttcttaagaataccatcatcgttctggaccgaaagtaatatgttcttattacgccttgcctttgtagtgtggtgaaagtaacacgtgttccggtctcctgtatgtagccagtgatttcgactttttaatttccaataagtctcctcctccaagtacgcttcattcaggtttctccgtaaggttgcgatatcatgggtagatgtatttccggttgcaatagcccagtccagttgagccttgatagatttgattctagtctcggagttggttttgttgcttcgcttccaggctgaaatactcttacgacagtgaacaattttggagagtaaagtcccctcatcatgacatcttgtgcctctccaagctcaagtaaccatctccttgaaaccgtctttgtaaagtaatctactatcatagcggaagcagcctcggcgttcctctatctggtctgaaatatatgtaactagagggcggtgatctgattcgccgaactccaaaaactctgtctctgaggcagggaaccggttgtgccattcagcattcgccattgtgcggtcaagacaacatgtgacatagtgatctcccctttgtccagcccaagagaacctatctccagttgatttcaaatctgtaaagttacagcatcgaacattcttctcatatcctgaaaggaagcttcagttctcactctacgccccccccccccctcttctcactattactcataatctcattgaagtctcccattataatccaagggtagtcttttctcacagtatatgttctttctaatctttcccaaaggtgatttctataattaggattgggattcccatagacaaaagataaatagaaatcaccttcattacttttaacgaaaagatctacaagattaggagaactgaagcaaattgacatatctacatgatcacgccaaaacacaactaaacccccacttaaaccaataggcgggactgttacaaacttactaaaacccatttccaaacccttttcttgaataaaaccatcctgctgttttgtttctgaaagagcaatgatgtccaggagatgcaatctattgatctcctttaggcgtcgaactgtggagtcattgcctaaccccgacagttccagcaggctgtcttcatggtggaagtggtggattcgggcccatcgcgcctccgccttggttgtgttcaccggagcttccactcccctctcccctttcacgcaccgtgaacttggtgtttccctgttccttagaaaaatccagcacgtcctcccgcttgcgcttcccacactcatttgcaacttcagttgaaggattgatgacgattgctgaatccataagcgccagtgggtgaatttgagaataaatgttgtggctaggattaccaggaatatcaccacaagagttctcaaaacacgggatgggatttaagagttcactatcgtttcgttcttcactgaacatatcagtatgttcgtagtcaatcagtgcatcgtgatgtggatcaatatctgagagcctggcctcatctgaatcagcgggtgaacgagtgttaaccgcatcacctccgttctctctatcttctgattcatttaccaccacattgatgtcctgattgtttgccaactccattgcttcctcatcattgatctccctaatgatgacaccatgattctgaacgcgatcctgatcctcctcatcatcattgtcgtgctgctcttctccaccattcctgtatagacacgccccggaatcgtgtgtgagcatccacagacttcacagaaacctcgaagaagctcatatctgaagcggacgagagtattggtcgcaagcgtgaattggaaattcctttggaagcgaagtgggtgagtgatgttccagtgaatgagaatgcgaacaaagtccattctagccacggcttcaacgtcaaaatccacatcgagaacctgaccgagtgaacgaccaatgtgttcgacgacgccacggttgaggaattgataggggatgccacgaacttggatccagaaagggatgaagtcgaggagaggcagttgtggagtccatctttggatgatgagcattctgtcgttgaaggcccaaggaccacgcctcagaaccgtctccatggattcctctgtcgggaaaatgaactgaaactagccctgcttgtccccatattcgcggtaaagaagcaactatggagcggatgttctgacgtctaggtatcaccggtctgccaatcaggatgaaacgattgtcggcaattgcttgattcacaatttcttttgggatcgctatgggctcttcgtctgcacccagattgatgttctgaactgcacgcctgagattgtctgccatttttgagaggtttttatagaatcgaagtgggtaaaaaattgagaatttgatgagaagacaaagtgccatttcccaatcgacaattcgttgcttaaatagatgaaggtgtttgggaaccacagaataaacatcacgattgatcgtgggatcaagcatggagataaccgcctgagggaaaatggggttgggaaccacttcgccggcgaaaacgctgtgaaccgtcaccaaaaaggtgaggataaaccgatgaaataaccgcttagaaatcgctttgagaatctccataactaactcaagtgttgttttgttccctttgttgttcccgaatattctttaattctcggttactaagtttactatccatatggtaaccgaacacatttcggttcaattttggatataaccatttggttatcgaatctttcggttactaagtttactatccatatggtaaccgaatacatttcggaccattacattatacccaaaaagtgaccaaattaaccaaaattaccaaatacaaagttcaaaatacaatagaacaattaaaaagtacaaactagagttaaaactcaaatccaaaagagagtgaaagtacaaacgagaaatcaaactcaaattaaaaaggctttctagagaaaatagagagttaaaactcaacagagagtgaaaagtttgagaacttctttaatctttagttctttaccatgttgagaacttctttaccatacttttttttcttgtctacaaaattgaatgataaagtcagacatgtcacaacaattttaaacttaatcatagttaattagtaaaactcaaatacatgtcacaaaaactgaagaatctgaatcacgtacctgagttcatgagtggatgacttgtcttggttaagtctctagtctcttacacaaattgtcaaactctatacattgaagaaaacataaaattattagcctttcaaaagaaagtaagaaacggacaagtgccaacacttatacctttctccagatcatcagaatcttcaatatcctcaaccatctttgcatagttttccacaactttttcactaatataatagtcagccttcatccattgttctgtacacatcaagacctcaattatataatgtgttaagaaacttctctttggctctacgatccgaccactagtgctaaaacaatactcagaagctgcagaagaaacttgcaaagctagaatttctctagctagtacagataaaatcggaaacttaagactattgagcttccagtatgataacacatcatattttgttcccaatgtattggcccttgtgttttcaacactttctttcaagtacacatcaagcttagtcttggttgcatcaaacccctcttcatttaccatcttgtcgtaaacagaagctaaaccttcaacccccacattcataaagtcatgatcatctacataatcatgttcctgtctctcaaacccatcttgagaacttgatgttgatacaaaatgagggttgactatgtttgtactatatctcaaacaaactagtcaaaacatcaataactgaagcactgaatagtctatagcgaggtattcagtgtcaattaatagctaaaatggaaatgttcacaaaagatattttggggattgaaagatggacacgaggacaaaaggattccttaacttaggcattccacattatcttgctagaaattgactcctgactaaaggcttcatagtggatgctcaaaattaaagctcgacggcttgatggtcacctctctatgctgtgactatatcgtat

SEQ ID NO: 31689 - DNA, 992 bp, Arabidopsis thaliana landsberg
caaaaattaacttctttgaccatcacagcctgccaaggagtgactgacatggggcttgaatctgttggaaagggctgcccgaacatgaaaaaggcgatcatcagtaaatcccctttgttatctgacaacgggttggtctcttttgcaaaaacttctttatcacttgagagtcttcagcttcaagaatgccacagggttacccaatttgggttttttggttcccttttgaactgtggtgaaaagttgaaggctttctctctggtgaactgtttgagcattagagatctcaccacaggattgcctgcttcatctcattgcagcgctctgcgctctttgtctattcgtaactgccctggctttggtgatgcaaatcttgcagccatcgggaagttgtgccctcagctcgaggatattgatctgtgtgggctcaaggggataacagagtctggtttcctacatctgattcagagctctcttgtgaagatcaacttcagtggttgttccaatttgactgatagagtgatctctgccatcactgctcgtaacgggtggactcttgaagtcttaaacatcgatggatgttccaatatcactgacgccagtctggtctccattgcagcaaactgccagattctcagtgatttggatatttcgaaatgcgcaatctcagattcagggattcaagcattggcctcctctgataagctcaaactgcagatcctatcagttgcaggttgctctatggtcacagacaagagcttgccagccatgcgtcgggttgggttccactctattgggtttaaacctccaacagtgtcgatccattggcaattccactgtcgacttcttagtcgagcgcctttacaaatgtgacatcctctcctgatcaacaattccactgtcgacctctccacttataatgtaaggtattttagtccgtccaagttcgtttatcaagtgtcaactctttttcaggctctgtgatctacgcg

SEQ ID NO: 31690 - DNA, 1031 bp, Arabidopsis thaliana landsberg
ggagcttgagcaggaggaggagaagaagaagattgtctaacattatccacaacaggaggattagagataacaccattttgtccctcagccaatttttgcttcgacttctgaaaacatatcaacatgtcaatatatacagactataacattaagtcacatcaatatacaaaaaaaaaaacttcacctttgaatctgggctgaatgctttcttaacacttgaaaaccatttagcttttttccccatctctatgtaatccttcacagagaagaaacaaattattccacaaggaaactgaatctactgatctcagtagctaaattacgacagatctcgaaatctagagctaaaattcaccaattgatactgaatcagggagagaatgaatcgtacctatgagaagacattgacaccagatctgatagacgaaaaagcttgaagataaaacctggaggagtcaactaaaccacaacgcggcttctagagtagtgaccttattggagaagacaaaaaagcttaagaatcgaatcgattggatctttgctgaggtgcgaagataacttttcctcttcttattgctttcacattatcgtaattgcaaatggagaagagagagagaggagaagacagatggattcaaagctgtgtgaagaagagtatttgtgacggtgtgtgtttgtgcgtgatgccacttaattgggcctcttttgtgggccccattctactcttctttttttccttttcttcttcttaatttaccaacttcgtctctcttttactctattcttttcactttttttttttagtgatgagttttataagtttcataaacactgttttgttaatttttctttttatagtatagtatctttagatttattattatttggtgcatttcaaaaatagtatacataattgacatggtatattggtgttttctctaaaaatgtttgaaattttcttaaaatatggataacgtgtaaactggaaaatgtattggattttgtaccttttttgaaactagataatttaa

SEQ ID NO: 31691 - DNA, 912 bp, Arabidopsis thaliana landsberg
tatggttcatgagtactcgagttaaacgcctccattgacaaacttacaacccttttcaaaaacaaaagttacataactaaaaactaatccactaacactattataggtttaattgtataaatctaaaatttctatcagactaaaacgtgaatttgcagtagcgtataaagtcttcctaagtcccgatcatgaccctaatgtgattacattcttaatagacgacgaaaagttagagaatatcctttaattataaatttataacttataaagaaggtgccttatcatttgaaaattaagtccatatggcatatatacaattacacaatttagaacttattcatatatattgaaaaacattctttataatacaattatagaaacaagaaaactttatgagagattaatttatcttagttccaacgagttccaaatatgtgggtggaagtttataaaaatttcgtagtttaacaattcactaatgttttgtaaacttttgttattgtgtgtgatttatatacatttagttatgtacaagtaaatcgcatatatattgcaagttttgaaagcaaaaggcctatacgtcacctctaacaacactagaattaaaatattttaccatatcacggccacagaatcacaagagtcttagtatcacgaatagaaataatatccgcagatctgtcttaaaataaaccaatcacataacctaggagcctaagacacaacgaaatcggctaaaacctttctctgctagcatgctaaaatctaatagcacttcataagtcttgtttttcgggctcctattctagacgggcatcaaaaactattcaatttcagcaaccggatataaaaagtggttgatggagaacaaccaaaaactaaaaatcaaaacacaagaaaaaagatatacca

SEQ ID NO: 31692 - DNA, 709 bp, Arabidopsis thaliana landsberg
ggagctaaactctcagattgacagttttgctctttctagcatcagtggagtctttgctgattttgccctcttgcgggaagggaagcaaatgcaagcacttgctgttaaacttccgtctgggttagaaacatctgttttgaattcagtggtggacatgtatctcaagtgtggattagttgatgaggcttataaattctttgccgaaatgcagttgaaagatgtgatctcctggactgtagtgatcactggttatgggaagcacgggcttggcaaaaaatctgttagaattttttacgaaatgttgagacataacattgagcctgatgaggtatgctatttagctgtactctcagcttgtagccattctggtatgatcaaagaaggtgaagaacttttttcgaagttactagagacacatggaatcaaacctagggtagaacactatgcatgtgtagttgatctattaggaagagctggtcgtttgaaggaagctaaacatctgattgatacaatgccgataaaaccaaatgtcggaatatggcaaacacttcttagcctctgtcgagtacatggggacatcgaattagggaaagaagtgggtaagattcttttaggatcgatgcaaagaatcctgcaaattacgtgatgatggccaacctttatgggcaagccggttattggaacgaacaagggaacgcacgagagcttg

SEQ ID NO: 31693 - DNA, 599 bp, Arabidopsis thaliana landsberg
tacctttgtaatcttgtttttgtcgaatataaatcaacaactataatatttttttataaatcagctcaatctttgcttgttttgaataattcattttttattttactaacatctaatatttgttcctataaatatactattcccatcaagatttatcttcacaaaaaatataatgaactaaacacttttcttctttcataaccaatcgttggcactcaattgagtgaaaggtaatactacttcaatttacttataaacacaatcgtggtcatatttgtttagtttcaataatttgattcacttgtataattttgcttctagctcattcattttacttttgtttattgaatgtctcttttttttttttattagaaacaaacagagcaaaaatggaagcactagtactccatcatcaaattctaagggttaagcaaagggcaaagcaaaagctactgaggaacctaaagtattatctcgttgtttatataaacacatgtcatcatatatttgcttggcttatatgctttaaacatatcagtatatatagagtcctagatataccaaaatttttcttcaacttgtaaacaccaagcttaaat

SEQ ID NO: 31694 - DNA, 2058 bp, Arabidopsis thaliana landsberg
  unsure (1)..(2058): unsure at all n locations
ataaaaaggataagagttcattagttagtggattcctaagtatcattcctagctttgaggacgttataatctctatgcttgagtaaaatgtggtgcggtaagttgcaaccatccactctagaacaagttttttatagggccaatggacctaactaatccggagtttaaccaaaaacatttatttgatttttatatatcccacaagagtgacgatcttagaacaagattcgaatttcaaatagatcatgtttataatgattatatatatatatatacatctatatatcgcgtaaattagaattgataagctaattatattttaaagttatttatagtctacaaatagaataaaaagtgaaattaaatagaaatcaaatccaactgaccaaaatttgattttgaatgggttatcggttctgaaattaaaataaaccaaaaacaattactatgaatcggaagaaaccaaatcaaataatctaatgtacatctctagttaattattacttttgaaggtgatggttataatcttgcaattttgttttataggggtttggttcatgcactgtcacttggatagacatcaaacgtggggtatgaatgttgtgttcattgttaagaatggtagagagccaaatcagcagattctgcctccaccagatgatttgccgccttgctatgaataattgaatgttaccaaatgcttttatctattcaagctggtgatgcaatcgttaccaatttgggtaaatttaaaccattatcatattgcattccatttatgtaataaattattttactaaaataggattcttctgtttattttcttataaaataaaatttatggtggtaatattaaggatacataatgtcttaatcttgtgtcataacaaaaaaaaaaaagaataattaagtttaaaaatttgtaggttataaattttcactctgagatgagaaaaaaaattaaaaaaattcactttcaacaattgtcatatagaaaatgtacgagtcaaaggattaaatttggaatctagttaggacatggacatgaactagagagaaagatttttcaataaattaaatttagctttttgttttgaaaaattcatatgacaaaaatagagaaaaaagctctaagctaatctcataatatttccaaaagctaaagatatggtaatgtttcttctctcgcactcctacaagttaagtcatatattcaggtaggggatatctccatgtcttgtacgatatcagtatcatcatcaccttgagggatctctgtgtggtgactatcaccattgtaggtgaagtgatgcatctgtgttatgtgaccctgttgaactgctgtggtcttgtggcttctactcaaatcccttcggctccaaaggtatagaggtggcggtatattgttccactgctctatcgttttatcattcacatctactgacccaggcaagtagaacgactgcagagcaaaaagtaaagagtttgatcaaaagcttattcgtaaattaaacgagagttggagtcatttgtacatgtacttaccattccagcaagtaaatttctgtcctcccaaatcaactcgtaatcatcaatcgcatcgaccctgaatgtagacaaacccatagttatgaaaagttttgtcattgagactgtctatttgctagttacctttttgtttcacttggtacgatgaggattaagatcttcggtttaaattcgagggccttcttaatgaaagtgttagcaagactggctttgtaagcaaaaggcgggttcaatcccataatctgtttttatccatgacaaaaaggaaactcaatcagtgtagtcaataaatgcatctcaactttaggatttcatttnnnnnnnnnnnnnnnnnnnnnnnnngggtaactcttcttccttcacactcagccaatctctcatctcaaaattgaagttgttctgccatggaaacgtcatgttttagaaacagcttcaaacaaaagagttaaagagtggtagctgtaccttacgtgggatgagatcgaagtttttgtagaagcatgttttccc

SEQ ID NO: 31695 - DNA, 3383 bp, Arabidopsis thaliana landsberg
  unsure (1)..(3383): unsure at all n locations
caccatttttctcacatctcattttcccttttccatgcccacttctttgcactacgggttttccaagtttcattttttttctttcaattatcatgttgtcggtaaatagttttttgacaattaagtttcaaaatcattagacctaaactcgtaagtcgtaaccaaacaagcaatataacccaacttaaaaaatttgtggctatcgtagaaacgtttgactgctgcatcattatattcaaactatccaagttatccattattatggactttttatttttatttttttttatgcaaaaatatatttttggttaaatgcaacaacaaaacaatattttgtgggttttggaaagtaaataatttatgtgacacgaaataaattttgggtggaaaaaatgattggagaacttatttattatttttattttggtaaaaaaatcaattacaagaaagccattttttcacatggcatttgttgaatttgccattttttaaacagtttgtgagtttgccatttttatttcatcggaaaagacaattttacccttgttttgttgcaaaaaaaatttcagaattgttcttccacaaagttaatttctcgatctggtttttcatgacgagatctcatgacaactccagtttaagcaacaccaaaggacgaaagctttgaaactaatctctttatctttgagtttcgatttgtcaggagaaattaaaaaactcaaagatttcatgaatatatgattataattttcaaatttggtttcgatttgaagataatttagaaggtttgattaattcagtgtttataattaaagctcttgggtttattaattcaatgtttatagttgaagcccttgggtttactagacattatccccttagggtttaatgttttttcattcaaaatcattgaatgaaatggtgtttatggtgatgacgtttcatgaatcggagacaaaagtgatgatgttaatagaactaaaactgaaggtggtgatagagttgaagtagatgcgtggatgaagcccgacccgacggtggtggtcggcaaataattgtggtccggcaacaagcaaaaacgaaatggaagacaaaggttgaagacaaggacaaaaacgtaattgcattaggcctaaaatggcaaatccaaaagcccatatcaaaaatagcataaacaaaagatttggccaaaaaatggcaatctgaacaataatcgtggagaacattattttgagatacagcgataaaatgatgtccacttgttgattgctttacatgtaggtacttactcagtgccacagattgttcgagttcattacacatctatggtttaaaatcatcattacaaaattttcctggtatatcttgcaaattgcaataactgtgcaatgttaacgagtgattattcacaacgaataatctatttatatctgcatatttagttaaatgatgatacaaattttcttcttaagaatcctgaatccatacctacacattttcagtttccagaaaatttgtaattctcttcgaggataaccagtgcatatgcatntctttctatcttacatttaattaaagccgcattttgcttggaaaatgtctaatgtttgagtcttaaatacagtgagacggtgcatctaatttgagttgcaataaaaatttgagatacagcgataataagttcttggtcatatcatcatcctcgcatttgctacatgataatatcaaatgtcatttgtcataagtataattatcttttttttttgtaaacaagtataattatctaacacacgaaaaaatggactaagtcaaaatacatcaaacctcattagtcattacaactctatatgtagacatcatatagaattgacagtaagtaggtcgctccgtgagaaattattacacacacaatgaaattgtaaacctatacaaaaatatcttgaattatttcaaaataacatccaataaacacatagaaaaatttatggacgtataaatatttcataaatcaactttctacatccgtggacggtggacctgcgatttcaattttcaatactcgtattaaataagaataaatatttcctacgagtccttttcgtgtactttaaagtctacttattaccttgtttgatcattttaatctcgcaatttcaaactagtttaactagctattgatattctataattcaacggtgcaaagtaagacttggttatgctagctaaaagaatataaagtgattgttatctgatccaaataaacgataacagacaccaaacaaattaaaggtgggctcacattataatgcaagggacgaaaaaagacaacatgcacttacaaaaaaatggtagttcctttcttcgaaggttgggtaagatattgtagattcgtgtctaggttttaagtagtcatagacaaataatgataaaaatgaaatatgtaaatacgcacatacactgatacacacacacacacacacacacaaaaatgagaagaaaacagctcttaaccaatctgacacaaaataggtctctacatagaggtaattttcaatgtcgattaggtaacaaattcataataattaatttaattagtgtagtatatagcttgcaaaacatacagaataaaaacagcgaggattattgtagatatatttatatatacgatgctcttcattgttaacatgtgcaaaatccataacatcttgaatgttcatgaaccaaacaaaccaaactttaactaaaatttgtgttcggtatgaatagtaatgctaatttaaaacagctataataatcacaatttgtatgatgtgttaatccttgcagatttcacgagcgagtgtttatgcacatgtatattacaagtaaagtaagcatacgtaaaaaacgttaaagaggagtcacgatcatcggtagatacatcaatttttcggttaaacagacagatcaggaaatgcgaccaaacatgtgtcgatagtacttatgaattaaattgtgacacagcgaatcatcatcggtctcaaataagagtttttttgtatgaatggttggatctgtcacgtgcactccacagtaataatttacgaaatcacccttacagaaaaagagagtcttgcgttttagggcaacgaagaagaagagacagagattagataaaagagtaagattcctttttttacacgtggaccccaaaccccacgctctctctcattgtgtgcatgtgaacttggcatcttcttttttattttttgtaataaaataacatatactaataaagttatttatttatcctaccaaggaaactgttactgaaaaaggatgagtaactctcgtctcacagtcccaccatgtaattaatttttataatgtagacaaaacaatat

SEQ ID NO: 31696 - DNA, 677 bp, Arabidopsis thaliana landsberg
aagttttaagacaaaacataatcatatgattaattaagcataacctccattaagattgatctatttaattggttaatagatcattctagtgggctatttttggtctctttcatatcttaatggagtcggctagttgggtcctattcgtttaacacttgcttgcgatagcgaatggcgatccacaacaacgattacgataaacgacaattactgtcattaattacacatgatggtttttgatttgaatgtttgtctcatgaatatacatatatatgggtttgtcatatttacaatgttatattatttctgaactatatgtttctaacaatcgcaaatatgaaacccaaaatatattcaatactaaatttagtgttctattttgttagaaaatggtgtttttaattttgtaaacataaatacaaaattttataaattaaaaaaaaaaacttatgactcaaaaatggttacacacttacactaaagattaaaagatgtcgaccgtggaaaccgaatcgtggacgtgaaccaaaaacatttaattatgcctcttatcgtccttgtactcaatggagctgcatgtgactagggtcattttcaataccaatttggcacaaatcattgcgtctgctcccaaatatccatatatatcctcttatatcttgatataaatacacatg

SEQ ID NO: 31697 - DNA, 517 bp, Arabidopsis thaliana landsberg
aagcataactccataaacaaggagaactagtgtatctacaaagattgtaagtgtaatccatatagtaaaaaaaaaaattagcttctcatagtcgagcaagaagttcaaagctcttttttttttttttttttttttttattggcaacaatttagtcccagcccatataagagtatagcccaaagccccaaagtattataagttattatccaattatttatagactaccagtaaaaccatcgtttcttctaaaccgaaacagaccaaatcaactcacccaaaccaataaacgacaccaactcaagtcaagcagcacataagaaaaacatttcacattatctgtgtttgatatcatgcacacgattgcattgtcatgatactggtctttatattcaattttccaatattttgatgatactgatcactatctacaatgttgatttttgtagcattgaatttgtggacattatagatagccttaacatttaagagatacgtatttggagtacatgttgaaga

SEQ ID NO: 31698 - DNA, 977 bp, Arabidopsis thaliana landsberg
tctacgcatattataaaactccaaattttagcctttctctttgtagaaaaaaaccgtttaagatttcaaatcataagaaacccattgtcttctccagcttaattaaagctcaagaaaacccctaaattaatctgagtcctacactaacagcaatcaaacctacggatcttaaaaaggaaataaagtttaaacctttttacaaacctaagattcccagattccactgaagacaaaaggagggagaaagataaaaacccttttggtaattagatccaatcttcaataaactactaaaccataaacagaacactagaacatgtgtgccccttttgtctgagaagtttgttgtcctaaaacacggaatgtgtgagtttaaatctacagaaccaatgaaaagaaagagttgcagaaagcaaagaaaccgccaaatcaagaagaagagagattaaagaaagaaaggaacaaaggaatctcctacagatccaagaagagactaaatgttcctctgttttgtactctctctctctctcactgctataactgctcagagaacaaaccggaaattcagccacatatggggactggggttccttattggaaatggcaggattctttttttttttcctaaataaaatgtgagcaaagaagccactttatttagattatcatattaaataggtaataaaagaaatatagagtaaaagagagagtcattggagaagggggtgtgtgtggagatacagaggctctacatctcacaaaaagcatgtgagagagtggatctgttttttacttctcctagatgcatgtgacctctgtgtcaggtcatcaacatatccagagaatgattcattttttttggttttctgacaccaaatttatgtttattgaagatcatggatttaaagcttgtaatacgaataatcacaagtatcttctttcataatcacacctagtactacttttcacaaatgagt

SEQ ID NO: 31699 - DNA, 1006 bp, Arabidopsis thaliana landsberg
atccctgtacaacagcctcataacctgattcccccaattcaagaaccgagattgctcgaatagaaggacctcgtctctctaactccacaagcttctgctttcttagagttagctctccaacttcattctgtagcttgggaatgtaagtgattatattatcgattatagatggtgcagaccatttcttctgccaatcagcaagaaaagttatatatagctcaacaacaagcagaacatacctaacttgtaataataacagtgaaaacaaaacctttgaagaagaagaagaatggtcaggaagaagagtgccaagagtgaggtaagaggcatgaagtctcatcctccttaaacgctccttagcgttatggtcttgtttctttgctgcaccactacttgagccatcaacctcatgcaaaactggttctttcctttttctttgtgattgacaagtgtccttctctgcagactctttctcaacgattgtttctgcaggagggatatgcaagcgatcatggagtaaacttgatattgaagtctgatgattcggttgagaagacatatatatacgacggcgagaggaacaaaaaagaggcttgtgctctttcctaccaccgatggtcctaagttaaacttagaactgcaattaatgtctaaaaccctaattaagttaacaagatgatcatgacaatgatatatataggaaaaggtagccttagcctaaagtcaacccctgacgcagtaatatataacaaattaagaatggcacaatgcaatgaagctgcagaattaaacattaatattgaatattaaaatgcttgaagattaaaaaataaagaggttcagggaatcacaggtcacagcaagttattagaagagaaatggtcgtatatctgcagtacataagaatttgtaaatgataagacctagagcgagcgagcgagccagagaagagaaaaacaattttatttgttttagagaagaggaaaacttgtggaagggaatttac

SEQ ID NO: 31700 - DNA, 591 bp, Arabidopsis thaliana landsberg
aggcaaacccccatgatataaacatagaaatgtagtcaatttttggtttgcttttattaagaaacaataaacgaaacataatctgagtaattgcgaaaacaatacttagaaaaagagtcaaaagggaccagaaaaaaagagagagaggtgttgagaaaaatgtcagacggtggcgaaggaagtgacgtgtcaagaggaaggaggtaggaccttaaccaaatggtcaaaaaacgaagttactgtcacgagtaccagtggggaccaatcaacgacaaaactcccccccaatcggttttgtcatttattgtgccctctttcacagtcctgtcactgtatcacttttctccctttctccctttctttctttctttttttccccattatatttacagagacgaaaattcctaaattcatacataagaattgtcaatttgttggaaacaaacaaaacgaattgtcaattcaagttagtcatgttctttgtattctgttagttgttttttcgaatatttatatgtgatgaaattgtctatagctaactaaacataataaaaccatttattattttccagcccattgcagggccaatac

SEQ ID NO: 31701 - DNA, 1019 bp, Arabidopsis thaliana landsberg
ggtcaagctctagtttttagcatttcctagtaagtgaaaccgtgtcaatgggcaatatttttagaagttttgtgaaagattgattagtagggaacttgagttagtattaacattacgtctatgttaagagtcatattctccacgatctttgtgttacttgttaaatagaaatgtgcccacatgaaggaatatgctgtaatttgtttaactggccactcatcgcagatgctttctttatacttttttcttataaataacttgaggtttatgcctttattcttattcgctaaatgtgtagaattgtgttctattggtttacaggattggcaaagattctcaaaaagtatgacaaaagaaccggtgctttaatccgtttaccatttatccaaaaggttttgcaagaacctttcttcacaactgacctactcaacacatttgtgaaagagtgcgaggctatgctggaccgcctatttccgtctaacaaaagtcggaatctggatgaagaaggagagccgacaacttctggaatggtcaagacaggaacggacgattctgaacttttagagtaccaaaagaactgtctgagattgagtacatggagagcttgtatatgaagagcactgtgtcggcattaaaagtattaaaggaaatccgcagtggtagctcaacagttagcgtcttctcgttgccaccgttaccggcaagtggattagaagatgattcatggaagaagaaagttggtgtccttgaacaagtagcgaaatgaattatgagtattattatttttaaatctctctttttttttgtactttctttaaatagtacaagtaattgtatacgcttacagctgtaaaagatgaatcaaataaaacatagaagtgtgatcatctttcaacatttaaacttggttgcgtgtactttttcttttgctgcatatcatgtatgaaaaatattctgtaagactgtaaaaccactttcaagcagagagaacaatgaaagacatacgccattacgaaatc

SEQ ID NO: 31702 - DNA, 1328 bp, Arabidopsis thaliana landsberg
  unsure (1)..(1328): unsure at all n locations
aaccatcgtatggatatataggtgccgttaatgactaaccctagctagctaccctagagtgaaaaataatatctacggaaaagaattaaaaaatttatcttattatattcctcaattcataatctatattgttttttttatctagaattataacatcataaatttggagttattcgagatgcaaattatagaactgaatttgaggcgagtttaattacgtaattgaccataaaaccaatactaccgtaccaatctgtaggaggaatttagatagttccatacttcaatctatatatcgtcgttattatacagaaataaactgattacaaagttgcaagagaaccttaactttaaaaaatctgatgttcaaatctcaagagaagaaaagtatatcatataagattcaaactcttttttttttttttgtagtttcccttaatgcgaattaatgagagacagtattaatcgatcgttatatataaaaataaattacagaaccattgaatagttgaaaacaataaagaagaagttcttaaaaagcgttacactggaaaggcacaattgtatataaaagggacacgaggagacataaacgcaacgtttcagacccactcgtctccttccttctcatctctctctttctctcacaatggagacaagaccatcatcatcatcttctctttcaccggcgacgaatcttaacctcgacagactcaaagttctcaaactcctcggaaaaggcgccaccggaacagtcttcctcgtccacgactctgtttccgactcctctgtttcttctccctttgctttaaaactcgtcgacaaatcctccgcatcttctctccgccgtgcaaggtgggaaattcagatcctccgacgtctctccgatgacacaaacccaaacccatttctcccaaaactcttagcttcatcagaatcctctgaattcatcgcatgggctttaccttactgctccggtggagatntaaacgtcctccgacaacgtcaaaacgacggcgttttcagttcctctgttattagattctacgtggcggagatcgtctgtgcgcttgagcatcttcataccatggggatcgcttacagagacttaaaaccagagaacattctgattcagcaatccggtcacgttaccttaaccgattttgacctttctcggagccttaaaaaacccctccgaccccatttctatcaacccgacccggaattgataatcgatcgtaaaaaaagtcggagcttttctcggttgatctcgcgacgcggagaaaacaaaacagggttgaagaaacaagatcgctcgggttacccaa

SEQ ID NO: 31703 - DNA, 546 bp, Arabidopsis thaliana landsberg
aatttttcaggagggaacagtgcaggacttcatgaaggaatctaggattcttctcatgtggaactggtaatccaattgatgactgttggcgttgtgaccgtaactggcacaagaaccgtaaacgccttgcggattgtggcattggttttggaagaaacgcaattggtggtcgtgatggacgcttatacattgttactgacccgactgatgaagacgttgttaatcccaaacctggtactctactccatgctggcatccaagaggagcgtctgttgattgtgtacacaacgggatttaggttgatagagactgaaaacacgagcctcatcatcgaatagattgcaaagacacaattgatgcgccgcggctccaaccttcatctaggcaatgatgcatcctgaccatccagactataacctaagttatcgaataaggtcttcacgttcatgattgcaagcctcctgggaatgcaatggttacaagctcgtcatgtcactttggctgaatgacaatgactgaaggcgatgcctgctctatttttggatc

SEQ ID NO: 31704 - DNA, 565 bp, Arabidopsis thaliana landsberg
gagaactggatcgcccaatctctacaagataaatatgaaaccattacttagaagccaaagttcgaaactctcatttcccggtttagaaaagtgtactatacctgcatgcaactgaaatttacatggagaagctcattggtgaagccacgggaaacatcgagctgttgctttgcagacattgctctttgaaacagccatgatgcgctcaagtttggctgtcgttcaaaagccaaatggattcagtgaagttaatagcagggagaaagatatttagctgagaaccacaaagctatattaccatataaggatttagctttgataagctgtcagagtccagaagatctccatctattgcttcatagattccttttttaagttgaacaataagattgtcagaaaatctgaatattctgaaagagttcatgatataaaaagttgtataatgttcaatgagatatggagacagcaagtgtactctcagagagtgagtgtatataccattggacaatcttgcaaggtgtctggtcaaactttccaaacccccaaatgaaacaggtgattgaat

SEQ ID NO: 31705 - DNA, 1175 bp, Arabidopsis thaliana landsberg
tttttacacaatccagatttttttttttaatttttgtttttcaaaacccagaaaactcagaaacataatcatacataaatgtatcaatataccaaaatactagattcaaacaaaaccctgaaacatagctatacccaaacaaatcagttgtactagaataattaatttcatccaatacctaaaaatactttctatattaataaattcaaaacattaatctgctttaatcactcctaatagcaagtaatttagtttcatccaatcactccaaatatgattaaattggttgtaaattactaattatcttataataattatttaaactacagtagaaactctataaattaataatgttgggaccacaaaatattattaatttatagtgatattaatttatcctataaattaataatttatcctataaattaatatttattagtttatatgataaattattaatttatatatatatatatttacgtaaaatataatactatattcttcttaaaatgtttcttaatttaattttctatatgctctgttgtttgcatatatagttatattaggtttttatttttctttgacttctataatttatttttctgcaaaatattgtgtctgtatatctatgacattaacgtgaacgtaaacgtaaacatgaagcttaatccaattttttttacacaaattaggcctgggcgtttaatccgaatcccataatccgaaccgcatccaaaccggaaaaatcggattaaaaaccgaaccgaatccgatcaattaaccgaacggttattgatttctatatccacggatatcggattttatccgatccgaaccgaagcaatacgggtatccgaaacaaatcaatagttcttcttctataccctactcgtcccttacaatacgggatccacttcccttatcatgattttcctctctatcaaacaatatggattcgatccacttccctaatctttttgattttcctagcaatacgggatccatttcctctagcttataaccataaaatcctaatctttcaatatggaattcttaagctttctttcgtcccaatcgcctctatcagaagcatcaagtaatcgatctcgggtatgtgtttgaacttcaattcttcttcttcattagttatcgtctatgttctctgattcttcttc

SEQ ID NO: 31706 - DNA, 121 bp, Arabidopsis thaliana landsberg
ttgcggctttcccatttctggctgatcagtccgcttgcgaaatccccgtgcgtgatgccctgataggcgaagggcagggggggcgctaccgaaacttctcctgtgatgccaagcgtcctgc

SEQ ID NO: 31707 - DNA, 1119 bp, Arabidopsis thaliana landsberg
tggatcaaattaattgacattttctaaaatagtttgaatatctaatttcttaaatataaacagtttagtttaaaaataaaatttgttataactaattaatcaatttatttagtgtcttatttctaatggtttctatttattaaggacaaacatgtcattttaaaaccaatataaaatatatttcaaatagtgtaatattatagtgtagatttcaaattaatactaaaatataaggtatacaatcaaattaatcctaaagtaaaacacttctgcaaaatttatataactagttgtttataatcatatgctaataatcacaatacaataacttcttaaaagcaaatctaaatgtaatgtcagaacaatataaatctaggaatttccaatgttacatgaaacagagaagattttttacatgttggtacatcaagctctacattcaagatatctttcgaataatgtatatattagcttaacttgcgagagggtaaaaccccaaagattcaataaagaaaccctaaattgaagcccaagaaattcaataacgataccctaaattgagacacgaaaaccttgaataaaacgaaatcaaaataaaaattgaggcataacaaagctatatatactagtgaataaagaatccctgctccacattgaccaagataccacaaaaccgaaacaaaaatcatgacgaagaggtgagactttgaacttaatcatattcaaaacttacacttctactatacaaatgaaccataaactctacatcacactacatatctatagaagctccatcaaaccacaatgataccgctgctgcttccctccatctcttgctccttccatctctttacaagttctaatacacttgagtcctccctgtcgttgtctacgataccactaggcttccaagtgtcacagagtgaggtaagtgtaaagacaacatacctcatctctggtctctgagagagctccttggcgcagcaaagaattgctagtctcgctacgccgtcaatgatgttgcgagactctacatacactacaattgtttcggcaatggctcctctgaaagagtccaagacgatgcagactctctcgaaccaactgggaatgagatgc

SEQ ID NO: 31708 - DNA, 4548 bp, Arabidopsis thaliana landsberg
  unsure (1)..(4548): unsure at all n locations
tgctcgagctgtgggtcatgaccccccgcctaaacagggaccacaggtagctcccgtaggatgtcaacgcgaggcaccggcctagggagatcaccgtcctacggcataccgagatggttgctttcggagggaccccctagatcgatgtggaaacattcgcggcttgggccgcagtcctcgtcaccgaggctgcggctaccgtcagaacagtcagaaaggcagtagtcgcatgcggtcatgaagtcccgcatggcactggggttaccaagtccggagaagtcccaatagaagtcgggcacgtcgtcttcctcggacccagagggcccgtaggtcgagacgtccgtcagccggtcccaggatgaccgcatacgaaaccccagagggtttgggacacgcctttacgaaagcgtccaccgaagcagggtcacttggtgggtcgcagctggatctaaaaggcatggaacgggaaacggacggtacctcttgatcgacgggtggtgacgaagtcacgtcaggggcggactgcaccgttgtctcaggtacgaggctaatgcccagcatgtccttcgcgagcgtgctggcgtcgtccgtctgcttggagttggcgtgttgcggggaaacggcgctcgtcttcgtctcagacgcgaggtcgacgcccgacgtgtcccccgctgggcgccggcgtcgtcgactcgctcgacagccgacgaggtgccgcctcctgcttggccatgtctgtcccgcctcctcctccgtcggcggggaaggtgacgggacagacccatatgttgctcttccgtcacgcggggaagatgtcgtcgattccgccgtcgccgggcgagctgacgcgcgccattgtcgtcgtcgcgcggcggtggaaggagtatcatgtcgtagctgccgtcgagggacatgaactcaagactcccgaaacggagcaccgtcccgggttggagaggttgctgaagactacctatttggaactcaacgggaagttgttcgtcaacacgcagcgtgcccctacctggcgctccaactgtcggtgtctcgagaccggggggtccctcaggccgacgagtgagtgtgccgcgtgccccagcccagatgggtcgagcgcgtgggcgagcgcgaaggggggaagcgaggtggccggagacgggcgtgagagaggtggaaatccgcggccttcgtgttcgtcccgcgcccaggtcgggtgcgcttgcagtagggggttcaagcgtccacacgggagagggagcgagcggcctcacgcgagcgcctgtctcgtcctcgtccccgcgcggcccaccctctctaagagggccctggtccttccttttataagcgtaaggagaggatccaggtgtacaatggggggtgcagcagagtgctacgtgtctagcggaggagagtagcgccctaagtacacgccatcgtggcggccggagaggttttggcgctcggttcgtgtgatgtcgtggccgtcgaaggagcgctggagctagcggagggacagctgtcgagtccttgctgacgtcctcttgcttccgtaagagggctgagagccgccgtcgtcacagagtatgcggggcgccatcattgtctatctggcggacggagccagatgggacgccggtcttgttccccgtggctcgagtcagttcggggtagggtgatgatggcgcctcctgttgtcgtggctggtctgcgccctaggttgggcgacgtcgaagctcatccgaagccgaggtcgagtctgtcttctgtggccgaggtcgagtctgagcccctggttcgggcgaggcggagatcgcggctgatgctggggcggagtccgagccctggggtcgggcgaacggacgttcgtcgtcttctggggccgagcctgagtccaagccctgggtttggcggacggtagttcgccgtcttccggggctgagccgagtccgagccctgggtcgggcggacggaggttcgccgtcttccggggctgagccgatgtccgagtccgagctcctggggtcgggcgaagcggagttcgtcgtcttctgggacttagcccgagtccgagccctgggtcgggcggagcggaggtttcctacggtgcctgaggccgggcctggccgcctgatcagcctcactctgtcgagtgacacagcagtcggagcggcgcaggcggcgctgtccttcttgtcagaccggtcagtggagcggcgaagtgactgcggtcactttggcgtctgtcgactggaggacgtgcatcaggataaaggtgtcaggccacctttgcattaaatgctcctgcgatttggtcagtcggcatggcgatttggtcagggttgcttcttagcgaagacagggcctcgggtgagccggaaatgtgttcgtcgctggaggggggcctcgggcgagacggagatcctccggggtcggctgcccttgtccgaggctgggttcgggtgaggcaagattgagtcccttgagtggaccgatccctgacttaatcgcacccatcaggcctttgcagctttgtgctgatgggggttaccagctgagaattaggagtcttgggggtacccctaattatggtccccgacagtagcccccgagcctcgaagggagtgttgatactcgcttggaggcttttgtcgcacttttttgcaaggggaccagcctttctcggttgcattttgttccggtgggtgcgcgcgacggccgtgatgggtagcccccgaggcctcgggggagtggtttcactcctccgaggtcttaatgccttgcgtaatgcttcggctggtctggttgttccctcatgcgaactggccgtagcccgggtgtacggtcggggcccaagttctcgggctggtatgttgacgctgtcaacggttcggccggagccgggtttgcgagagcagcccctgagcctccgcacagggcgagagggcgatcagggacagactcggcttttttacatacgcccctgcgtcgcctttccgcaaggaggaggggggaaagcgccatgttaccctcgatgggcgccgaacatggcgtctccggtgagctgcaagtgggtaatccgagtggacgcccgtgccacatttgttaggggtcggctagaggcccggaggcgnnnnnnnnnnnnnnnnnnnnngatttgccggacccggacccatttgatagggtccgagggcacgatgcctcactccggtgggattccgttacaaaatcgttcccgctggtctcagaaatgtcctagggtacctcgggagcgtagcccgagcctcggccatgtatcgaactgtcacacccagatttaaagggacagagccgggtgcatctcatacatgcgccaagaagacaacatatataataacagagtgtatagagataaatgtcacataaatcagagtatttattatatagcggaagtcttacaaaataaaatataaatatcgcaggaactaaaatctatccttggcgccagaaagctgactgggagacgccacctagatcaagtcgaatgcctcagtgttaggtggctcctcttcgaccacctgttcttctcctgtggggggtgtgagacagcaagagtgagctcacatacgttcatagctcaacaagtcgtggggaataatgtggcatgaactcaccaaaggtgggagttcatgtagtgtaaggctgatcaatgaaatagaggttgaggctgagcattgcttttataagttggtcaaaattttattagcaattactaagtgtaagtaaataccaaaccttaataataataaagaacagtaatagtaaaataatcccaaatgcgatgcaaatgtcaaattgaatttaagttccataattaatcatgtgagggtccgagccgctcttgaccgtgagcacggctagtatactagttttacactctgcagaggttgcgcatctttacccacaagtcgtgtatcccatgtcgcctgggtttgcaaggcccttagacactaccgaggtgaatggctagggatccactacgaggcctttacaaagttccactagcttcagaaaacccgctacagtttataggaagctccaatgcaggaatcccttgcaggaccgccatcgcagcaaaatcctcccgaggcctccctacactgaccactcccctactgcccttgcccctttcgggtaaggtagtcttccactagctttcctaattaatcggccaagggcgtcccattaaacccttgtggtagcactgttttcccgggtggttctccatgttccaattaacataatgatcttatcatgaacaataaataataaacagataataaaaagtgtaatcatgagtaatgtatcttcatacccaaaaccacataaagcactagcaagtactacccaaaaagttcagtggtaacaaggtataaagataatcaaactagggtaacctattggatcccatcaaaattaacctatgcagatcattatgattaatcagaacatggctgggtaaaaagaagtgatcaagggcacaacttgccttcaacgagctctgctcagcag

SEQ ID NO: 31709 - DNA, 1018 bp, Arabidopsis thaliana landsberg
caagtttggagagcaaagtaagggtggccaggtcttctagaatgttactctgcttagttgtaacaagaagcaggaacagagcttcaataggctgataaacatatcgcacattctccgtctcgatataggtatgctgctttcccattccatccagcttaggaaaagctgcaagtagaccttcgattctgatacgggacatatccacatagtgtctggaaacaatcactacataaaaaagaagaaagttagaaaaatcgcaaaaatattgaaaaacgagaattcgaagacaaagtcaaagatagatgaaaataacctttcccagacttgaccacaatggcagcagcaagcacaacctataaagcacaggttccaactttagaaaacgcgccagacactcatcaaacactaaagttaacaccaaattgcgaagatgcactaaaaaggaaaaagaaaaaaaccaatcatagaacaaaactcaataccattttgattattcaggcttttactttctcggcgattataagaaaggtaatgcgaatctgaaatacaaagaaccaatgttagagtaaatccagttagagcgagatcagaagaaacaaacgggatttgatcttcaggatcataaatcacgtaatagaggaagagatctcgaatacacgaatccaaacgaaactagactagcgaatcgaaaatataaaagaattcatcgcagatccaacggatctacgagcatcagaggctcataatcgaaaaacataactgtagaatcaaaatcaacacaagcggatcaaattcatgaaacaggatcgcgaaatttagaaggaggagaaaattcttaataatggagatccacagaaatgtagccagagagaactttcattcaaaggaaaacgaaaatcatcaccatcagtgaagacgaagagcgagagaacaagacgataccttgggagtgatcgaaggagatgaaatcaccagtttcttcttcacaaagctcgcgagtaaaaaagatgaaacgagt

SEQ ID NO: 31710 - DNA, 646 bp, Arabidopsis thaliana landsberg
attagatcaagctctctattaattcagtttttatccgaaaaaatggcacctcacagcttcctcatgagtaggaagagcctctggtcgagttcgaagtgagaaatgtgagctggatctcccttaagcaacatcaggaggccgccaaacgaaacatatagctctctggaaacacataatttaaagaaaataaaataaaacatgatggtttgatatgtgagttgaattggattgaattattttgatatgggggggttatatgggattcttacgcttttggagttttgccgaaacgctcagagatcttgtaaagcttcccgtgcattatgtattcatacttatcggcaagtgttttctttgctccctgtaatgtatcgagatgaaaactacataagattaatgtttagatatgcatacacattcttggttttcaaatttagatcttgaagattcaagaactaaagcttgctaaaattccatgtctcctcttattcctagatagacaggcttctcgaatcagccaacagagttataatatcaaccatttagcagcattaacagctatatcctaacaaaatccagatacgggttcaaagttaccattcatggaaatttggccaagcaaacaagagactgtgtatattctcaa

SEQ ID NO: 31711 - DNA, 501 bp, Arabidopsis thaliana landsberg
gtgtccgattgccagtcatgagggtaatgtttgccgtcattaggttgcgaatttcagacaggggtagtcattaggtagtcgttgcgcgtcatgaggttgccatttcggtagcaacgtgccattccgtcatagggtaattttccgtcataaagttgccatttcgtcatcaggttgtcgtgtgccagtcatgaggttgtccatttcagacagggggtgtcatgagggttatgttccgtcataaagttgccatttcgaaatggggtgtcatcaggttaacgttccagtcatcaggttgtccaattgaggggggttttgcatcagggtacgttcgcgtcacaagttccatcagggttctaataagtattacggggtaggggtgtgggatggcctagcccgggcgtagaggcaatcgggcgcggtagagtattaacgcgggcatggggtaataatgattggcgcgggtagttagtagggcacgtgacggtggactggggataatgg

SEQ ID NO: 31712 - DNA, 1482 bp, Arabidopsis thaliana landsberg
  unsure (1)..(1482): unsure at all n locations
tggctgtcaatgtatgatccgtcatcaaaactgatacaaggtgtttttttttccttagatttttttattgtctacaagtatcccacaatttaaattagtttttttcgtttcaaatgtgaagaaaaatttatatattggaccacaattcttgatatgaacctttaccttcaagttggtttcgaaagatacaacaggaaatatttgtaccgcaatgcttgatatgagctttcaattctatattttataatatggttttcgtttctaacttgttatataaaactaaccctaaattagtaaatatttaagtgactgacattaattagttagaaactattaaaatgctaaaggcaaagttcacttacttggtcggaagaggatactccgggaatagcttagccagaatctcaacaacttcccgcggtggcgagcactctcggctaggagataacgtccggaggccgagggtgcctcatagaccagaacatgagccagggcgacatcgcgaacatccacataagcttgagtcaaattagcataagtcttagccgagccggttagatacttgaggacgtggtaaagactggcgttgatcgttggctgtaatggcggtccaagaaccagcaccggattcaacaccaccaagtcaacacctttctcctttgctgtctcccacgccgcttgttccgccaccatcttgccgtaacaataccaattctacaaaacacatacaaatattcaatagacctaacatcaaagataatactatttcacaatagaaccaaaaaattcacattttttagacattaaatatttttcaattttttaacatgataaacatgtttaattaacaaatgcaaaatatttaaaaaaacgaagcangagtgcaagaccttggtgtttntgcagaagtcaagatcactccaacaactttcgtcaacgacagcctcagggtcacggttcgggtccatgtagacggcaccaatggaggagtgatgaccacgcgcttgaccttggcttcagccgcagcattaattacaaacttggctccattcacggccggctccaccatttgttcctgaaaattgattatacattttaaaaataattaattaaatacctcgtttttttttcaccaattaaatacctcatttcacactctgatgtgatttcacataataatactcattgatttgccttccaacaaaataatttctaaccatctttgcttcattttaaagtcaaatgtaataaaaacatcacaacaagatggaactttcaacgtcctaaaattaaaatacttgacgaatctggcaaaaaaccaaatattcaatgaagaataatattgctagagatttcaccgttttaatgaggcgatattttaaaaatagataaaaaaaatattatgttcatgattaaaaaagggattagataacgtcacgacatggtctaattaacaaacgacagaaaaatctaaatgaaata

SEQ ID NO: 31713 - DNA, 1638 bp, Arabidopsis thaliana landsberg
attgactatacttttcatttcggagtaaactgtaggtaattgctggcattgatattaggtcagacacattttctgtaatcacagctcccaagttgcgtacaaaattgtagtttacatagagacagcctggagacatgtttggagaaaagatcagtcaataatatatatataattgaatatatttattttggtcattcattcacaatgagttaattgtattgaactattgactattgagacacacattagatcattattcataagtcataactatcaaaaattagttgagaaaagaatttataaatcaacagaggaaaaaatgctttcaggggaagaaaaagaagaagagcagatatgccgtttgtctcatccaggtcatcctcacaccctctctcgtcgagacggcaccgacccacccgatggttgttttgcaggcggctatgaatcaggcgcctatgaatcattgggtggtttagaaaagttctatcactactgtaccacatgtgatgtagcgttccataaatattgtacaaaagaagcctcgaaagataacacacccttatcacccacagcaatctctcagtttcagtgttatagaccgtgaaggtagagttctatatgatcgcgatcgtcatgagtacaacaatggcaagatatactttggtgtcggcacacccttatcatggtaacaccttcgataactgcacttggtgtggggaaaatttgagaggcggtacctttttctaccgatgttctatatgtagcttttgcttgtgtcccctttgttctttcaagtttccgcttccaaccatctcaaacccaaaaaaccaccaccattcactcattttccttcctcggcctcttttggttccatgtgatgtgtgtggattggtagaaagatcagacccaagttatgtttgttttcaatgcaattatgtggtccatgagagttgtatagacttaccatgcgtcataaaaatcacccgtcaccctcatcgtcttttttacactccttttctttcaccctccatttcatcctgtcttctttgctacaagacaattgatatcaagtatggtcagtattcttgcaatcatgaagattgctcttatgtagcccattccaaatgtgctacacatgaaacagtatgggatgggagagaactcgaatgggaacctgaagaaattggtgaaactgaagatgttgcgccattcaagagagttggtgaccatttgataaagtacttttttcatgaacatcatctaaagcttgagaagtacaatggtgttcgagacgcggacaagcaatgtcaagcgtgcatccttcatatcgactctcgcgatttctacaactgcatgcaatgtaattattttcttcacgaggtatgcgccaatcttcctcgaaaactagatcatgcattgcataatcaccctcttttcctcgacccggctccaccaaaggactttgaatccatagattgtttcgtttgtcgacgaccgttcgctggtttcagttacaagtgttacaaagacaattgtgaggatgaatatggcataaagtatcaggtagtttttggatgcttcttgattcctaaaaatttaaaccgtgtttgccatgaacatcccttattcctccctttc

SEQ ID NO: 31714 - DNA, 838 bp, Arabidopsis thaliana landsberg
  unsure (1)..(838): unsure at all n locations
tgatttagaatttatatatgttctaagtggttgggaaggttcagctttagactcaaaggtgtgagatgatgcctaaacgagaaacacaaataaattaaaagtttctgaaggtatcttgtttagaatatgacaaaatagtttttttttgttattaatttgtattttatcctacttatattttgtgctttaaattacagaaatttttttatttannnnnnnnnnnnnnnnnnnnttgtcgtaattgttttgctccatttcgaagtactcggtatcatctccaagactttagaggacaaggaaaagatcccaacaatcaaaatgagttgttcaaccatcggcattctagcttgcgaaacgtaatagagaggatttttggaatcttcaaattaagatttcttatcttcaaatatgcacctccttttccatataagacacaagcagagttaatatttgcatgtgttgttttacataattatcttcgtaaggaatgtcgttcggatgtgtttttcctaagaaagatgttctcgaagaaaatggcattgatgaaagcggcgatgacgaaaataagcgtatgaagagggtcaaggtactcaagaacaacaaagagtacttgctaataattggagagcaacaatagcagaaaacatgtggacatatgttataaatatggaatcataataataaacattttatgttatatatttttagattgttttttttctttttttattggtttgttgagatttgagatttgaaggtgttgattaccaacatatctgactgaacgtcacctataattctacgagctttctttcgctttttgattgaattatcaatt

SEQ ID NO: 31715 - DNA, 692 bp, Arabidopsis thaliana landsberg
tatgataggatggggtcataatcatacaaagattgggtatctattttaacggagtcaaatggtgcttttctaccattttgtgatcatcgactaaatcaaaacctaatttgaataaaagaaattaaaactaaaattttaacggtgtcacatggcctcataaagttcttacttcgctgtggatccgctcatgctcctatgtcgacgatcatctagtacacactgattcttcttctgtaggaatatggaatatcgaaacaactaatgcatggctttattgctcggacagtcttaaccgataagctctcgtcactagatatcaagcattctcttcggtgttatatatataaataactggaaagtgatattgcatgtgatttaaaaaaaaaataaccaagttttgaacctattttatataaataacatgagatcgggattatatcatgtgtatcatgtcgagttgtaccttaatcagtcaatcatagcttataagtgcgctttattaacatgttaatcgaacaccaaccgctacccgggacgctacaatgatacaaacccaagcgggccagtcaagcaaagatgacaaccaataatcccaaaggaaatgatagtatatgaagaaaccaattcgcttaacagttatataccctaaaagaaaacaatttcccaaactaggcattaatgccattgaatac

SEQ ID NO: 31716 - DNA, 966 bp, Arabidopsis thaliana landsberg
  unsure (1)..(966): unsure at all n locations
tctttatgccaatctactaacctatatgcatgagttatttgttggagttagttgatgtagatctggatgccaatgacgtgttgttttaaaaaatataacatttttatcggaggaatgcaatccaagcatatataatcacgtgttcccatatttataagacatcggtggtgcaatatcaattgtcactacagttcataaatcataataattttannnnnnnnnnnnnnnnnnnnnntaaaagaaagttagcttttgccactttgcaaaaagaagtaaaaagaaaacgtgtgtgtccttcattttgtacaaaagaaagaaacaacaactccaacgttgatggcgacttcctcctaaacgtagtggttcaccagcagcagccgcctccgcaactaaagtgttcataaatttccgaggagctgagctgcgaacaagttcataagtcatctactgaaagccttgaagagggaaatcatcattgtgttcatacacactcgagaaacaatgggcacaggtctggacagcctgttccagagaattcaagagtcaaagattgcgattgtggtcatttcaagcaggtacatggagtcacaatggtgcttacatgagctgctaaagatcaaagagtgtgtggaggcaggaactttggtggtatttccagtgttctacaaggtggccgttaaaatggtgaggttcctaacaggatcgtttggtgaaaaattataaacattagtgttgcgtcatagtgaaagatatgagccatggaagcagactctagagtttgtgacctcgaagtcaggcaagagggtgcaggagcataggtacttatctctctatatgaaaacttaacgtacatagtataacacaatcattctttgccattaaacccaaacaaaagatgactttttattttgtcatattaaagtgaaaagtctgtgagtaatgattttgatccgatggtctgatatg

SEQ ID NO: 31717 - DNA, 556 bp, Arabidopsis thaliana landsberg
tcgatatggtgaagtttatttaataatttgatattttttgtatttttatcacttcgatattcgctgggaggctaaatattgggtattaatttggatttatatacaacaaaatactataaatttattatttggtcagtgggaaaaaatctaatccaataggatgtcctcatacgaaaaacaaatgggtaagctcgagccattgcaccaactttggtctattatcagtaaaatggcccagtttaagaacaaaaggccaacattacaaaatggcccataaataaatttaatatgtagttggacacgcctgaatcttaacctatttcaaactccaagaattttgttttcttgggtaaactccaagatgattatgttgctttgtttttcttttaaatggatcggtataaacgaatacaacaaaggtccaactcaaggtaagactaaaacgatatggaaagagataaataattctgacaacaacaaaatgtcaagaaaatttctacttatacaatgtaaatcagtcgatgtaacatggaaatttaacgtaaattaaggacat

SEQ ID NO: 31718 - DNA, 1043 bp, Arabidopsis thaliana landsberg
aacctttaaccattcattgattattcatatatacatgatacattcaaagtccccagcttctttttgtcatccccggtttagccatctattaagccagctacatgattcatatcaagaccaatgcgggattaaggatcaagtttaccggcgattgcaacatcatcttcatcatcaccatccgaggcatattcatcttcactcatttcatcatcactagacatttcctcagtatccgcccttggctttgcgtatttctcacaatactctgaaaccgagcaagaagataagataatgtagggtaacaagaatctaatcaactcaatatctaacctttaactctctgttcataggtaggacgatcacgcatcatcaatgcagctgcttcaccattcaatggatctgacggattcggatacagaagaagttgcggaagaaatgtctcgaacacattcaacaggtatgaataactaaatccaaatcataattaacataacaaaaactaacaggagttaaaacaatcttgtatattgttccatttgttatgatcataccgaacatcgggctccaggtctggttaataacatctagacaaacagaacctgacctgcataaccacatacaaagagggataacaaataagcaccactcaagatttggagaaggaacataatcactcctccaaaagatctactgattcgattgaactcacatttcatcgacattagggtggtatattttggtaatgaaaccaacagatggagatttataaggataagcatcaggaagttcaactcttatcttccacacacctccctcatatatacctgtccatagtacaaacacacagagataaaatcaccaaaaattaacaagttgatactgataagttgaaattgacacaaaaccctatgatgatcatcatcagcagccagaacaagaaaaaacagaatcaaaactctatgatttaaattattcacgggacgaattgagttacttactgtctttgggtccactgaattcgacaaagaactcttgcatgccat

SEQ ID NO: 31719 - DNA, 1260 bp, Arabidopsis thaliana landsberg
gaagaagaacacgactacgcttagaagtacgatcggaagtcctccggatgaactcgatgagatctcggcgggtaagctgaaaggagatctgaaggcgaagaaagcagtggcgattaagattgttttgaactcgaaggtgaaagtgaagatgggagctctaaaaactcctaaatcaggaattagggttacttgtgaagggattaaagtggtggctccgacgggaaagaaggcgacgacggctacgacttccgccgctaagtgtaaggttgatccaagatttaagatctggaaaattactttctaaatatagtaaacaaaataatggaatcacattcttagttttttcttcattttctttttattactccattgtttcaattttcatttctttttaaatttgatttcatatacagttctttgattcctgtaagactttatttttttggtttatgtaaatgaagatataaatatttgtgttctgtctgaaattttatttttctagcttagttaacaaaacccaactgttagtatttaagtactgtaattaggtaataatgcgagggaggtgaccactagtaattacaagtgctttggtcaattaagctttaaataagacaattacggtggctacttttatttgttctttgcatcaaataattaagctaaccatgtggtccatgtgtgtatgagaatatatacacataacataccctaataaacttatgaattattgttgtagaaccatgaatttgattacatataagtctccgggtgtgttggcaagtgacaaaaaaatctgttggtcttgtgattaattaattaattaagtgtgggtgcgaagttacgtcctcttaaggtctagaaggtgtcggtgaaatgaattcaactttaacaagaaaaagcaaagctctacaaatgattcaaaatcaggtgttatgttgtaatcaacaacaaaaaaaaagaaagcgattagttgttgttgtggaattttggtgtcaagacgacggctaacatgtggtggaatttgtttgttttcgacgaaataataaaactcaagtaggagagatttggttagtttaatcagttaagaatatactagtctgattataataaaaccaaatcgagtagactaatacaaatatataatgtaatgtccaaccacatatattattaaaaaaatagttataggtttattgaagaagatgcttaaaatttgtattcataaaaactagttataggattgtgagagatgaaatggag

SEQ ID NO: 31720 - DNA, 906 bp, Arabidopsis thaliana landsberg
  unsure (1)..(906): unsure at all n locations
aaaaaactatctcacgcgctttaattcgcactctcctctctcttttttcttcctttttcctgaaaaccataaatgagaataaatagagagtttagtcattttatcgtaaaaccaaaagaaagagaaaaagattaatcatcatcaatctaaagatttaggaatctacaatttcccagtagacagatttcacttttgcgtcttcttcttattccatttgatctaagtttctcgaaataggtacaaagttcgagtctttttcttgtaaccgcgtgaaaccaccaagaaacctatagtaagagtttctgcaaatgtgaattgaagacagctcatcactctgtcaaacttctacagtattaagttaacgaagcaggtacagccaaactaaaataacgcggagttatgggaatcatcgacggttctttgcttcggcggttgatttgtctctgtctctggtgtcttctcggtgaaggagtgacggtggttacggcggaggatgagaagaaagtggtacataaacagcttaatcaaactccgacttgggctgttgctgctgtttgtactttcttcatcgttgtttctgttcttcttgaaaaacttcttcacaaagttggaaaggtgtgttcttttttttctgggtttttgctaaatctttgtacttttgttgtttgtgttgaatttgagggtatattggagatgggttctgtttgatttgtgaaaagggactgtctttgtctgagattttgtgtttatgttaatgtttgaattggcaaatttgtcttgaagtgaagaagttgttcttgattaataggttctatgggatcggcacaagacagctcttcttggcgctttggagaagatcaaaaaggtgnaaaatttattctgattacttggaattttgaacatgcg

SEQ ID NO: 31721 - DNA, 1206 bp, Arabidopsis thaliana landsberg
  unsure (1)..(1206): unsure at all n locations
cacattcttggtctttcttgaattactcagaattttcttctctcttcttctctaaaaaaaacatattcaaaaatctgtctaaatcttcccaactcttggtggggttcttgaaagtaaaaaactttattgaaaaaaagaaatgaagcaaattgttataacagctcttgttttactacaagcttatgttcttcatcaatccacatgtgttatgtcccttactacacaagaatctccttctcctcaaccttctgctttcactcccgccttatctcctggtaaattgcttcaattttagggttacttgttcacttccgcatgttacttcggtatgaaaattaaagaaatttagaagatgaagaagaaacaaattctggttactttgctggttgtcacatgtgcatttaatgattatgatgtttttggttcgttattatagcttgcatctctttggaganaaagtttaaaaggttttagctttgtggggattttgtcttctgggtcacagaaatntctgtgtagtcactcttttcatgtccttcattgnnaccgcttatatcacttgccgtaaagttccaacctttcactcacattttcgatttgtttttaagaaagagagaccattttccttcgtaaaattcaatgtaattatttcttgaatctgaatttgttttggaggtcggccaaattttcttgaacctgaaacgataggaaaagctaatgcttttggttgattgttcagattatcaacagagagagaaggaattgcataaacaagagagtaacaacatgagactggttatttcactagcagctacattttccttagttgggataatcttactttgctctctgctttattggttttgccataggagaagaaacctcaagagctcaggtaaattctcttagtcacatctcgttttcaagtttttatggccttaatcttgaaattcatgatgaattcgataaagctgagaaagtgactctcaatgtgtcaatttgggttttgaaggttgtgggtgtagtggaatcacattcttgaatcggtttagtcgctcaaaaacattagacaagagaactacaaagcagggaacagtgtcattgatcgattacaatatactagaagaaggaactagtggtttcaaggagagtaacattttgggtcaaggtggatttggatgtgtatattctgccacattagagaac

SEQ ID NO: 31722 - DNA, 542 bp, Arabidopsis thaliana landsberg
ctgatgatcaatttagtttaggaaaaattattaaaatatgatgaaagttttcttatgtgagggtttttgcaataataaaaaagtcaaaatgttcaataagacgtccataataataatcaaaaaaagggaggtgggtcttttgttacgcgaaacacaagattaagggagcaggttcttttgtgagttgtgacaaaacaaaataaaaagggagcaggttaactccatttgtcttcttacatattaattattcatttaacaagtatattatcatactaatattatttgatcaactttattaaacatgtgtattgcattgacactttttcttttataggtcttttattgggttaattagtcaactgactataaataagaaggttagaagaaattttatacagtaaaaatgttatggcctcagtatttgggcctactactaccatgttaatcgtcgatcttattaggcccacacaaaatcttaacattagaaaaatatgaacctttttaagttattgctaacacatcattcattagtcatgacgacg

SEQ ID NO: 31723 - DNA, 459 bp, Arabidopsis thaliana landsberg
atatttgggagaagtatgcattgccttggttcttgccctttcactgcagacctttattattgaggggcatcggggctatccgtctcaggcaatccctcaaatacatgaattgctttctcgatatccccacacctacaaaacatatgcacaagagctgtcccaagaataagattcacagtcatgtgactcttaaccacatactcatatgctctttctccaaactcaagtgcacccatttgagcacaagacgaaatcacactcactatacccgtttcattcgaagacaactccttcctttttgatgaattcaaacaagccagtggctttctcaaaacagttgttcttcgcatacccattaatcataatactccaagtaaacaaatttctgtgaggcatttcatcgaacatatctcgtgcattgtcaaccatcccgcatttctatcccagcgccaagaggcc

SEQ ID NO: 31724 - DNA, 510 bp, Arabidopsis thaliana landsberg
ctcaatcactataacacaagcactaagtgtactcttaatctctcattcactcaaagcttgagttaatttaatgttaaaacacaaccacaccaaaaagtttagtaagagagaagatagaaaacattaattgatcaacaaatactttttttttactttttttattgatcaacaaataccttctatactttttcatgtagaagtaaatgataaatcacttcttttacatatttgacaccacttatcaattcatttatcgatatatatgtttaaacaatacttcataaataaactgaaaaagaaccaatgaccacttacatcagtctttttttcatcttaataatgcttttcctttttatttgagacgttgaatttaaaaaataccctttttgatcattttacaatcttaaaaaaatctattgagattaatgactattattcctgcaaaattatgaaataaagacgtaaatattattttatttcattaaacagtaaacatacattataaattta

SEQ ID NO: 31725 - DNA, 575 bp, Arabidopsis thaliana landsberg
  unsure (1)..(575): unsure at all n locations
tggatattgccctgtccatcaaaacatacactcactgcagggacaatccatatttcagcaaaggctttatgaaactgtaagttggtctctgaatgagtcagcatgacccgattttgatcccatatatgaattatagcaggtttgattgaagtctatgtttaaaaatttatggcaggaacaatcaagtttcagaccagaagctatgtatgaaagactacaagatatggtaaaagacttgaactagactttaaaagtcaactcaaaaatttcacgtgtttctctgtttacaaaggagtgaaaagagttagtgtttatattcatgaatgttagggacaatcaactgttagacatcatcctcagcaacattgcaatgcttcgaaacatcaacactccaacaggaattctctcactgagtcactagctctgcctttttcgagcactaggatttaaattgtgaatttttcttaatctttgatttttacttttgatgataaaaatgaatatatgtacataaacaaatgtggcanataataatatatgtataaatttgatggtttcttaanttttcgaaatct

SEQ ID NO: 31726 - DNA, 786 bp, Arabidopsis thaliana landsberg
tacccaagcatctcaattaagcttctttataccgcttattaagatcattaaacttatcttcacattgctgcggcgaaacatgataacctctttcatccatgactttagaaactgatctccacttacctttcttctgcaaaactgcaaatttcttatcagaaccagagtcttcaccgatataagaaagagcagttatcattagcttcaccatcttatccatccatttcacacgttgccaaggagagttttccttggacttgttttgaccatcactacttaacaaacatagttcatcatcttcactcattgatttctttcctctgtcgacattgttgtgacgtgtatccatagtattgttaaagcctgagtcttgtcgagaatttggatggtgttgtttctgattctgatttatagcatttggacgaagatctctcatagaagaaacttgagaatcaaagcgtccttgcgagcaatttccttccatttctacagtttgcaaaagaattatttttatcaaagaaaccacaaattcagtctttctcctcaaaatcaaactttgcttatatggttttctccaaatatgaaacctaaatcatccgatcaaagtaagcttgtaaacagagcaatcgcaatcaaacactacgaattcgataaactataaaacatcgctaacaaaagacgaaaaaaaaaacttatctttagagaaaatttcatgctaaaactaaacggacctttttaaaacgattgaagacgagagagtctagggttttagagaggacagctcaa

SEQ ID NO: 31727 - DNA, 870 bp, Arabidopsis thaliana landsberg
agaggagcagcagcagcggaaatgactactttgattttgatgtgtagtcaccgcaaatgctagatatggggacggggaattattaatatgaaaacatcaaaagcagtaaatattcaattatgctggacttgtgttataaagcatggactggggaggatggaacctgcattacaatttgaaagatctaactatgttttgttttgctacaacctatgatttggaagctgacactaggacaatgaggacaagataattgactgtggtttgcagatatattgacaatttcatacaggtcacaggatttttggtccgggaaacaaaacagaacctccattatatttacggattgttagtgtctttgaatatttctgattatccaaatctgtagagagattggaatacgtgatcctagattcaaatcgttttgaattgtctcctctcttaaatctttacgtgtttgatttcaatgtaatttaataaggaaacatttttatattcaatagatggcttattcagaaccattgtaactctgggataacttctctttttctgtgaaactgactgtagtagccaacacaacaaataaaagacagtaaaacaaaagctgtgaagttctcatccattaaacttttaaaataagccacattctattaggatccatcattcgaaagatgcagcaacacacaacacacaaaaaacaatgaagtaggaataacataaaacatccaaaagcagaaattattttcttgttgaataagtaacatcaaactccagctagcgtttgcaaactttgtaaagaaagtttgtttcttgatgttcaaatttagctcctcaacattcaactccttccattcatcgatgagctcttta

SEQ ID NO: 31728 - DNA, 506 bp, Arabidopsis thaliana landsberg
  unsure (1)..(506): unsure at all n locations
tttccattagggactatagcgcggtgatcaaccgtttgtgtaggagacatttggtaaacgagagcaaattcttcttctgtctaatgttatcccagggtatttcgcctgacttagacatttgtgaagtgatgatcaagtcagatgaattgctttcctggacaatcaaatggggtttgttgcctgattagtaatgagagaagttttgtctattgtcccatcttatctgctaactgcagaaggnnnnnnnnnnnnnnnnnnnnnnnnnnnnatgaggtaactgttattagtatacttttactgcataaagaaactaaataagttacgtaatggatttatctgatgctttattgtctttctcagtgattcagttaacagattaatcttagctactggatggtatcatcgggcaacagttgtatcacattgacgacttttacgaattgcggttagtgatgtttctttacccattttcatactaacctttgaactcgatatgggaacgtatg

SEQ ID NO: 31729 - DNA, 521 bp, Arabidopsis thaliana landsberg
ctaaactaaagagaaaaggaaatatacatatttccaaaaacttttaaactttatgattaaccatccaccctcgggggtcgtgtatgccgtctgaagaaagcccataaccaaacctaaataataaattcatgtataccctaattacctaattttaattacaaaagctaaaaaataaaaaaaaaatttattattattacaaaagttaaccaatatacccatctagttataatgagaacctaaccaatctaaccgcctaatcttagatccacctaactaaattaactactttaattaaaaatcataaaacttagtaatacatattagagtccaaaaaccataaaactttcacttttccactctaggctaaatcaattatgacttacttatatttatccgttaataatccatatatgttagatttataagttcaaatctacatcatatcaagaaatagtttggtactgaaatggcatttgtatacaacatccttataaattattttatatttttttaacatatac

SEQ ID NO: 31730 - DNA, 7351 bp, Arabidopsis thaliana landsberg
ccccccccttctcgtggcgatggtctgacgtggtgccagagagattgtaattttgcgggtgagtagccggagtggagtggagaggttctgagcagaaatagttttggcggtaagaatggtgtagccacgaatacatttcgccttcttgaatgaagagattttgctgatgcaggtgaggcggaggttgtgaaaggggagcattttcttctcctctgccacttccgctgccgcggagaatgggaggaggatcgtaggattgtctatgtgtttggttggttccaactacttggccgctttgccataaaagctccactatatcatcttcacgcctaatttcaaaccaaatccaaaccctagcatcagactcatcaaattgcataaagtaagagaattaaaagaggaaaaaaaaaaccggagctgtacggagcattgggtggtggtggcagggagacagaagaagtccgggtggacgtaacgcccgggtgagaatggtaaagccaagaagacatttcgtcttcctggatgaagagattctgatgaggcagaggaggcggaagcggagtattttcttctcgtccgccacttccgctgccacggagaatgggaagaggatcggaggagggtatctgtgtctggccaatcttacataagagctccactatatcatcttcacccctagtttcaaaaaaaagtttaaaaccctaataataaaagattcatggaattacagagtgagaaaaaaactttcaagtaagaagataaaagaaacttacatgatggaggggaatttctaatatgatcaagaaggaggaagaaatagaacaaaaagaagaagaatctgtgatgatataatcatcataggtttccaagttgaagtcttgaacgaaaatgattcatattttgtgacaaaagaaacaaagtttctgagagaaccctcaaaacacaaatactctctatatatatacatattatatatttgtgaattgtaccttttatcaggagaaaaaggcagatatttgtgaaagaaagaaaaaagaaacataatgtcgtttagccagaaacctccaaaggaaccacccagaggccagaaaaaaacatgcagattcattgatttgcgagttccttgttttttctttctccattgtctgattctctctgatttttttgctagataagctctctctctgtctctctttgagcgtctttgtgcgtgctatgacttttggtatattccgaatgacgtcaacagcccactttggtctcactcatggctccacttgtacgtgtaaacaaaaatcaccgggaaatataatagtacgagttttgtatcaaccttaggaaacaaacagacttcttcttacgccatcctctttacaaatatcattaaatatatatttagtcattttggctgagacataggagatgttagtcagtcaaaaacggagactaacaggtgtgcttggttatattttgctattttgcagataatttattttatgattttttctccgaagaaatagattttcattttctgaaaaacatttgcatgttagcaccttcaaaattgtgcttttcttagagaacagatccttttttttttaactcttcaacatcaacttgcaataacacaatggagatccatctgtcagaatcttgaccattaatgtatccggcaagaaaagcctctggctgttcctgattcctactaacttgttggttggttgtcctgatccccaagttacttgctagtacttgcgtggctgaaactaggctgtgatgttggttgaccctacaagaacatttagaaaaaaggttattgatgaccatcacccattcgtaggaagagaggcagaataacggcaatagatactgagaaagaattacctgcaatggaggacgaggttgttggatccggtggtgaccaacaaactggctatagggattcatctgaggttggttcgacaccagattaggctgcggactttgtaaacgaattctggatgggtcaaaggtctgaatgtttggaaaagggtagcgcggtggtggatatgatgatggacctgttgagaattgagtccatgattaaatcttgtaatatcatatatgttatagtttgtatgttaagtcaacggacgtcatgtgactacgaaaggaggcgagtaagagacgtaacttgttggagaagttacaactgttaccaacgtagagtagttatgtgaacatgtatataagagtgtgtcttgtcttaataaaagaactaacaagtttcagttcaagaaaacattttctgttttgttcttttgtcttctctaaggagaagagacattgtctcttgctctgtttcttcattctctctaaataaatcaacaggacctacaccttccgccatatgagcctgcctagggaaaggtatgaatgcaggaggccgattcatacccatggccatgtggggcatgtactgttgttgtatattccccgcatacatcatcggtggaatcataacatgtcccattgagaacatctggcataaaaacctcgattcagatatgaaatctcactcatgacctaaagatccttaaatgtttaccctacaaaatttgggaagcaaagacctcaagaacagggctattaggccatctcatctaaactttataaatcttccaggaaatgaatctgcggacattcaaactgtttccatgttcaaactcacattctgtttttgaggacatacctgtatttggctctgtagagatttcacgtactctataacatcatccagcatggaagatctatcagtctgatcagagtagacacagaatcagaatcaacgttaaagttaaataacaactagttaattaaaaaagaaactgtaataacctttgtgcagcgaggaaggagttcttgcaaagccttcatcatctcgttaatcttttgtctccgtctctgtttaacaaaaaaaaaacaagttttaaaggagatgaaacagatagtccattattcaaactcagaatcttgaaattccaatggaagcataagaaccctttcggagagtttatgcattattgcagctcgtgacctcttactagacgtcgaatcacgagcttcttcagttccctgtacgccaagaaacagaaagatacaaaataagcttcaactgctaaactgcacgagtcaagtgactaacacgcgctgacatgtttgcgtaaagttaacctatatatgggagctctgactcacctggttttcgacatttgtttcctctctcgtttttctcttccgttcatcggtgatatccgtctccgtcgctggttgtctctgaaccggctctgtttcggccttgcacaacccccaagattgtgttcccgccgtctcaatcgccaccgcctttcccctcggaccaagaccaggaactgcaaaagtacgagatactccgccagtgactgtcgctcgactctcggtgccgtgagtcgctggtattgattcagtggctgaagacaacagggtcgagttcgacggtacagcttcaacaccgccaagaaatatgttccctctttgcctcgagatattcataaaattctccgcccttctctcggccaaaatatgaccggtcggtctatccgccgccagaatgtactgagccctaggtggtggtggtggttctagggaggccaaactttgcgggtgagtcgaggctactccggagtaaagaagttgggagtagagataatcttggcgattaggctggtgaagccaagaagccatttcgtcttcttggataaagagactctgctgatggtacaggggaggcggaggctgcggtagaggagcatttccttctccgtccccgcttccgctgccccggagaatgagaggaggatcgcaagagggtgtttgtgtctggctacttgtaactacttggctgctcttccctaagagctccacgatatcatcttcacccctaaactcaaacaaaaccaaaaccactaaaatatacacctcatattggaataaacatgcaagtaagagagaaagaaattcgaaaatgaacttacatgatgtatttttctggtgagattagatcatgggataatataagcatcttcggtttccaagtcatcccttgatacaataaaaaaaattatgaacaaaaattctgatagaagtcgcccagaaactcatatggacatttgtgacttgtccactttcatcagaaaaaaataattgtgaatttgttaaaatgtcccttaaaagaaaaggaaactaaacatttgtcgtagccttttgactcgtttaaaccacaaagctccaagaaactgaatattttataatggtgttttggcctatagtggtgagttagtttcttcaactgattactttttctccgaattttgtgctaagataagctctgacctgaagtaaaacgtcctttagtgggatatactactacgagcctcctagagacgtcatcactcaccacgaaggctttttttgttgttattcttgtcttaatgtagtacatcaatggacatatctatgattttgtacgagcaaactggtacgtttgtttaaacaaaagcatccaaaaagaagaatgaggtaaacttcattcttaagcaaatctctctgagtgtagtacaacatcaataaacatttagatattggctctgcagtggttttcttttcgatttctttgaaaatgatagtagataccccacaccaaaacaaaaattacaaaaaattgatatttccttgcttgctcccatatgtatgctcatgtggagccatcaaagacaccaaaaatggagtacgtaggctatgaatagtgacaaaagagttgatgccgagggtgatgatgtcattatgaatattgaaaacgtccacacttcaacaatgatattaaacgtaataaatatttctttcgacatggagtgatgttagccattcaaaaccttacggtttacgttatatcgtaggctcataatcttagaaaatagaaacacttcaactgatatttgtgcgaagtatttataaagaaaatagagtgtaaaattgacaaagttttataaagccttcgtaagaaagaagtggcaactaaccacaaaattgaaacataacagaaaagacagagccgagacagagactccccattagcattagagagaaactaagaaaaccataatttggaaaaatagaatccttagttccttaccattgtttggcagactcgcgatattttatcatacgagaaaaactggaaatagattctgtaaaagattgcatccttaattatattctggagtctaaagccataatagtactaaggttcatggggttcatgtactcaaccgaaccagtcatgatttgttggacgatgagtcgggtggctttctcggtcgggtggaaagggtcccagaaagcataggcattgcggtcagagcataaagtcgacaatggggtgcaaacgccttgcccgttgtatgctccttgtccacaacatgctacttttgacgtcacaaaacctatgaaaatgtatcaaattaggtctaaaaatgaatcatgagacaaatttaccaattaagagtactcaccaaatctttggggattgttgatgaaatccgcattcgtgttaaaggcattagccccgatgaaaacatcagaaccaatctcacggttaagtccttgaagcatttgaactaaaagaggattgaagattgctgcagcctgttgcgcctcgggtgcacattctccattcacacttcccgatgatggtaactctgctggtacgcaacccaaaggtcctgttcccgtcaccatcaccctccttgctcccaactcataaagactctgtatcacataagtagaagaacgtgataaatatgactctctaaacctaatgtgtaaacctaacgtgtaaacctaacgtgtagaccaagaacccatatatatataccgtcaggattttcttgtattcggagatgagaagctggctaaattcaccgagagatgattggcgtcttctagtagagatggggaagaagtagttgttgacgaaatcattgccgccgagagtcatgaggacgagagccccatttacaagctgttgcgttttgtctgaacctataatctcactcactctctcttgatactcttggaacagctcgaattgcctaccgatccttagtatgttcaactgcaataaattaccacacaaaaaaaagattagactggagtccaaaatagtttagacatttttcaactaaaaatatttatattttaaaatgaagctttactttggagtttaatcaattttttttttttgaatgaatgtaaaattgtatacaccttagtcaaatttcatataaaaattaaacgcggtaaacgacttacaaattgaacgccagtatcgttgagaattccaatgccggcagaggcaaagttagctccgatcaatagcttctctccagtgagttcagggctaagaattggtaatgtaggctcagatccaatttgttcacctaaaaaaaccaccaagcaatatcaccaaaagatatataaagaaaaagagagaattaagtaactgaaaacgtgatcgtactgatgatgtcagggaggttcaagccgttggagaaacgaccggttggtcgaccagtcggataatcgattccatacggtggagaatcggcacgagcagtggtgactaagtaattgttattaccactgtccacgagtgagtcgccaaacacgaagaacgctctagccgcatttgtttgttgcggcataagaaaaagcgttacgcttaacgcgacggtcataataatccatgttaggagaaatgtggacatgatctagaaagcgaaaccttttgacttttggcgttgttttgtaatactatgaaatgttaaagaaaagattagtctcttgtttgttatatacactaatggaaaattgtattaatgatttgcttgtttttttggtgtatgtaataaatgttattacttatgtcgtcggtcgatctaatggtgagaaacaaggtgtcatatttaagaggaacaaaagtgaaatgtcaaaacttgtatatttattaatatatagaaatgattatcgtcgatacatattcttatatatgtcctttcaaacaagatcttattaattactatgctgtataattaaccataattaaacaagttgtgatcatcagggttttgcttatttcattttttgatcaagcaggattttgcttgtttcaacacagagaaacacaaattctttgaaataggatcgtaaaacaatcctatttcatctccagcagcaagctccttcaatctccataatgatccaatgtaatatgtat

SEQ ID NO: 31731 - DNA, 598 bp, Arabidopsis thaliana landsberg
  unsure (1)..(598): unsure at all n locations
attttggattgacacatgttaattgtagtgagtgttattttattgattgatgcaaatgtcttagtggatggggatttgtttgtagtgagatcataattttacagttttgtttgttatatatgcaaatttaacaactgttatttttttgatcacatggacaatgtgtgcattgttttgcccttgaatattaaaataaaattaataaaaaaagagattatatctactaaacttaataaggtggtcattattaactcaataagttgataagaatatatacctacctttatgcttttggaatttgatgaataaacaaacaaaattttattttctcaatgtatcttcaaatgattatactagaataaattgtttgattccatataatataatttatcttattgtttgataaatagtaataacttatactgcttgtttatatgatatagctaacttcatattattcaatctgaaattagtaaaacagaacttttggaaaacaaagttacattattatggaaataatgtatgaggtcataacannatttccactcttgtctttttattagctacagaagcaagatgaacattagaattcacttta

SEQ ID NO: 31732 - DNA, 672 bp, Arabidopsis thaliana landsberg
gaaccgctctattatgtttgttaggttatttttcggttgcctctacactctatgggtaccatgactttcacccgtcccatacccaactcaaaaaatgggtacccatttgaagaaaacaaatacccgtcatataggattcttttgctaatgtagatgacattgagacgagtaacggatagcttcaaaaaccatatccgttagacattaaattcagagtttttattatccaagaacgtgcaaccctcacgaaagtctttacaacaagagtcccaataatcaaacgtaataagaaaaagtgagtaaaataaaatccttgataggcataacaaaagcatccataagaatcctaaatgagcaaatcagtcacttggtaaaatatgcaaaacaacaaaagatgacttaagactttaagacttagtagtagtactgtacattcacacgtaccttcccttccctgtctgtctctgttcgggaatcagtgatgtcccacgtcatcaatcattcagacaacgattgtgccacgtcattcaactacagtcacctcctgatcaaccttccagtagttagtgtcgttgtactcctgcatactatcatcagggctctcctttcccggtgaggctgtggtggtgttctcttcatcggtcctgcttctccactatgccttccttgaga

SEQ ID NO: 31733 - DNA, 1107 bp, Arabidopsis thaliana landsberg
atcgctatccaatcacccccaacctcaagctctctttttcttgtcctcgatcgtttggctttggcaggaacacgtttccttccagcttcacccatgtgaatcgaaaaacctcgcattgagagaaacgattcaaattcttccctccaacgttaattaagattattatcgcgaaagagttggtcaaaatagaacaaattttcaaaacgagggcttatcaaaaatggcgatagagagaaacaaatatgtacttgtgtgaacccggttcgaatccattcggtttagtccgattaggatatccgtccttaggaaccctagttgtaaacgttaacgtttttagtatgaattgcaattgttgatcaggtaattgggcttttaatgggctaggttattacttcttaggtgtcttgttaatcaacttaagccccaaatttgcaagactatagaaaacaagtaatttaaagctactaaatgagccttttgcattactaaaagtcaatcatgaaaaacaaatatactaatgcatggtcaggagactgagggggtgttattggtttgtgactttgaaagagtcttcaaaaagaactcaaccgttttatgaaatcactcgcaaactaccaaaaaagagcaaggaaatcagactaactacgtacttgaaggaaactttaaaaatatgtttcatagtcgatatctagagcataaggatcagagaatgacaacttggcatgcgctagagagtcttggaatagtattgagttcttttaggatgacagattcttctttctttatggaatcatccaagcatagggtcagtttcttgaggattgttgaattctcaagtaagtaactcactagtttcatctccatcgcctctcctttcaatggcctttctatcttaacatactcgagagacgataggaaaccccgaggtacagacaagatattaattccctccttctcccgataattagcagatccctgcaagtaccatttaaccaagtgaaagagacataagttcaatatattatgctattatcaccatttccatcttaagatagaaaagtcatgggtcagtagtagacaatcctcaccacgacaagagattttaga

SEQ ID NO: 31734 - DNA, 1676 bp, Arabidopsis thaliana landsberg
acctttcttcctttgcatggagtgacccgcttcttgcactatcacaatattatccgtgctaacccttcccggtatgaagctcgattgcgcgggcccaatcaacttaaccataacctgtttcagcctttccaccattgtctttgtgatgatcttgaacagaacgttacacaaactaatgggtcgaaactgagtaatcttatccggttttcccactttcggtataagaaccaccaacgcatcattaagctccggaggaataaaccctgtctcaaagaattccaaaacaaacttaaccacagaatcccctaccacatcccaacacttctgataaaaaatgggttgatatccatccggtcccggcgccttataagcgcccatactgccaacagccttctcaacctctacccgcgtgaactgccttgaaagttctgtgcattcagccgcctccagagaaacaaacccctcctttggtaatttctcaaccacagctgcaacatcatcaagagagtataagcgtgtaaaaaattctaaagcaagcttctccaactcccctgcattagaaatccaacgccccgcatcatcctgaagcatctcaattctgttccttctccttctgataatagtggatgtatggaaataagaagtattcctatcacccattgtaatccatttctctcttgacttctgataccaaatcgtctcctcctgttccaacacaatatcaagctctttaatcaacacttcctcttgctgcaacagagcgtccgtttgattcaaatcaagctgatcttgaagtgttttaatgtccgtcaacagcttctccttccgctgttgaacctctccaaaaacttctttattccatcgccttaaagtttttcttagcatgattagcgccgcgggggtactcatttgacgattccaggaagcagacaacaagtccctaaacccatcatgagataaccaagccgcttcaaaccgaaacggtcttctcctcgcatcacaaataacctctggggacagctgcaagtagagaggagcgtgatccgatgccataaaccgaaggtgcgtcaccacagcctgctgccagatgaacctggtctgagcacagcacagaatacgatccagacgttcagccacgaaagtccgcgtctccttccctcttctccacgtaaatttattaccccgaaagcccatatcaataagggatgaatcgttcacccaatctccaaacgctagtgaatccgctgacaagtgcccattacccccagtgcgttcatcctaaccttattattgtgttgaaatcccccccaattaccactggttcactaattccctcaaccacaaccttcaattggtcccataagccacttcttctactaaccgatggtgctgcatacacaacaatcaaatgaaagatatcttctccgttgactaccttcgcatgaacaaattgttccgacgaagccatcacactaacaatcccaatattcgacctccataaaagccaaatacccccgctctgtcccacagcatcaactcggaacgagttatcaaagcccacactctgacaaatttgacccgctttatccccacttgcatgagtctcaaagagcgccaacatatcagtataatttttcttcaaaatatatcgaatcgatcttctgaagttaggttta

SEQ ID NO: 31735 - DNA, 255 bp, Arabidopsis thaliana landsberg
ctgcttgatgctgactgctcccttccacaaacaagctcttgccttgaacctacgaccctcgaacacaaatggagctagcttacagttagtcttcactcgaccttcttgtgctgcccagtcttctgcgttccataaacttgcaaacactttcataccttgcttgctcgggtatgcgattccttcactttcgtatacactaaaaactctgatcggagttccatcgacgaaccacctatataagatattcaacatggt

SEQ ID NO: 31736 - DNA, 1332 bp, Arabidopsis thaliana landsberg
aattatcatcatcaacaccatgtcatcatttttgtttttggggcatacaaatttctctccgattaagaaacaaatgaaactaaatttatcttctttttttagattcattgtgaaaattcgaaaactcacacactgaccttttgaaatctctcaatcgctctctcacccacaaggatgccctaaactggcaagaccctttctctggattttcgttttgaaatctctctctatctctctcgctctaatttttcaccttttgaggaggaagcaagcgaagatgggaattttccggcgataaaatgatcaccgtccattgtagctccgcgattggtgacacgtgttgaacattcatgttttttgccggtaagcccataagaatcaatgggccataagaatcaatgggcttatcttaattgggtttaattaggccttataatataacaactcagccctcataatgggcttgaatctttttaacaaacataaaactaaatcatatagcttaaggtatatggagttttaaaaccaaaatacatagtgattataaattgattgtgtacaatttttttatttggatactagcaaacaatagctgtaagtatatcatgtattctattctgtttattttagggaaaaatgtcatttaaatcatcatttggccatttgtggtgatttaaatcatgaactttatagtttgtgaataaaatcactaagtatgtattgatttcaaataaaagctgtaattttggttgataaagccaaattagtcacaacgttaactgaccaaacggagcaattaaacgcaatgatttgtccgttaataagtccgtttaagacgcaaacgacgtcgtcctgcttttgaaacaaaaatccccaaattgaatcgatccctagaaatcgaaattgaaatcagaaataagaaaccctaatccccaaatctcttcttcttttcttctttgaattcaccctaactcgactgatggctccgcgaaagaagagtaagcctcgtcccaaacgaaagagggatgaggaaccaactgttgtcgaaccgtctgcccccaaatcgacggctctcgacgatgctagtacaaaatcgtcggctctagacgatgctcgtaagcaatcgactcccggtgaatgtcaatctcttatgctttacagaggtgagcctgttcccttagagcagtgttagtattttgctgctgaaaaaacctgtgatgactgtgatgttgctggtgatgaagattgtgatgaaattggatacgatgctgctggcgatgatgacagtgaagatgatacggaaatcagatgacttgataagaagtggtgttg

SEQ ID NO: 31737 - DNA, 1810 bp, Arabidopsis thaliana landsberg
aatttatttatatgttttactaatcaattttgtagtgactaattttcttttctacaatattgatgttcctttcatatacaaagaccattgcaattacaataccgcaaaaacacaaaacacccagaaaaacaacaacaaacaaataaatcttcttaaaccggatcatgaaaccgatcaatcactcactactattcacataacaaattttgaataaaccgaccggttaaatttagtctcatggtacaactcatcacactaactttccatctctttcttcccaaaaccttaatccttcctctaacctcagcaacacttctcaactccaaaaaccctaatctcaaatccttatccaaatccttagtatccaataaccgaaacgaaccgatctcaacttcaacaccggttatcctaaccgtcttatgagcttccactcttctcccttcaatcttggtctctcccacaacaccatgatcagcgtaaacaacacggaacgtactatcttcaaactcaaacgcgccaaaattcgagtttctgatcgagatatcacttactagcgtggcgttgaagtaagggtttgttgaattacctcgggatcgaagatctcgagtcgatattgatcttgtttcgatctctggttttgaaatccggagaaagattgaagagaggatgagacaaagtgcgaagatgatgacgattattgttaataaatagactagacatttccctggtggttcttctgttttccgacgccagattcttggtccgctctgttcttcatcactcctgccatagatctcagtaggagctagtgttatccgatcttcgtccaccattttttgttttgttgtttagatcagaggaagaagaagaagaagaagatgaggaaagttaatgttaatggaagagtgggtggtttcttttttggcggttaaaagagggatttctggaggacacgtggcacgatcgtgttaagttagagtcttacgcggtgttttttttccttaataagtcttttccggagggcttgatttttgtcttttaattattttattcttttttgtgtgttaattttgattttatttttattcgtttataaaagcgagttatagcagaagagtccagtgaaaaaaaagaaaggagaagagtctttagatgaaaacgacgtcaaagatttaaatgtttcaactaacatcaattgtttttagaaacctttgaagggtttcagttttcttctttcatcaattttgggaaacttacaatacctaaatagtattagttcttttgttttgaaacctatcacttgacttttatttctcttttaatgtctttgatttaaagttcaaaaattagaatccgtacggagaaatttgacgatgattagtggacacaatgtgctcataataaatactattcgcatttgtctacgatcgggcgaaatggaatggagaaaggttctcaggggacctagttttaagaacaaatcaagatatataggtactgtggtgatgcttactacttactaggtctcttctaaaactttctcgttaagaaacaaaaataaaatgtgatcatgttcgatacttcaacaaaagtttgagaaaaaaagaagatcataaagcacaatgatcccaaaataaaattaatttcaatatttttggtgatatgagtaagcggggtttaagaaaccatagacatgatcaaagataaagatacgcaagcaaccttacaaagtctcccttttcttttttgtatgaaaaccagccttacaaagtaagtcaaacgtatgagaaagcaactcaagaggcaactc

SEQ ID NO: 31738 - DNA, 759 bp, Arabidopsis thaliana landsberg
tattatgaaaatggaaaagagtagaaattaattttgatcacgataaagatattcatgaaaaacctagtcaatgggaaattcattatactaccatgtatatactttaatttttggttaaaaactaacatgtatatactaataaattaataagtaataatactcatcgattttttaatttttttcacaatactcatcgatccgagtccaacaaaaaaaaaaagtacttgaggtcatcaaatctaacatacttcccataaccggactaaatcaacattctataggctgcattgattcaagacacgtctgtatccactaaaccctaacatacgagaaatcttacatcaacaaacatacttgatacttccccagctagctccaaaacccacggcggcaccatggtccatcgtctactttgcttgcaataattcacagtaggagctaaagaaatgtcactgtatccacgattatcaccatttgaccacaaattttgttcgctattcatatgtttcagtaaaataaaaatattactagatagtagatcctaagaaagagacaacgaagtataacaaatatttactttttataaatttcagctagatttgtcttttgctagtaaagaagtcaggtccgatacagtgtgaatgaactgcatgtgacctgtgggcgtcagaaaatgctggggtaaaaacatcatttcgtcaatcgtcgtagaagataatatctatcacagtagtataatagctacttatacgtatttga

SEQ ID NO: 31739 - DNA, 1255 bp, Arabidopsis thaliana landsberg
ttgtttcctttcgcatctgaaaaataacaaagaaagatgttctttgaacataaaacgattaaatatccctaccaataagaaaacgattaaatatcgtataatcgtttttttaatagacccgagtagctgtgagaaaaagatatatagctatgagaagtggtaaaaaggtgggtgagatgatacgctcgaaatccgtaacatggctgtcattcaaacaattaagaatacatggattaaaaaaataaaaaggactacttagactacatgcataccaaatgaagaacaaatcttgttacagtacaaaaacctcaaatcaacaccaaaataagatatgttttgatttttacccgctattgaaattcatattcgtaatttctagaaaactaaaactcgagtatgatttttattcaaactaggggtgatcagtactgatttaaaataaataaaatgcatgtattgtacccaactcgttatccatattactcaaatctagttttttatacttttttaaacagcttatataatgagaaattatgtacctattatttgaatcaaattatatggtataattctttacattttttggtactgaaagtaaacaaataattgtactatgataacgaaaagaaacaaattgccattgaattaaaaatttgcatttgcaaaaataaaataatgttattttcattttataaattggttactattacttatttttaaattatattttaataactgtattagtctatacattttattttagatttgttacatattatttactgtattttactacttgaactactatttaaatgttttttttattagtaaatacatttgaaccgtttgatacgtttgatctgcattttctcaaatccacttaagacgtttgatctacacttgatccacttaaccttcttgctccgtttgatacgttatgcttgacctgctttcttctttcggagccatattatgattaatgcaagtagcaacaaaccttgcgtaatcatatagattataggtgtctcatttatctatcactaactcaaatacgagttagatgaaacctcacctaattaaatggataattcagatttagagggacaaaactggaagaatcttcccttactttttatagtctaagaagaatcttccgttattaaaagataaacaagttattttaaggaatcgaaaagatacgtatccctttattatgattaatacaaataagcaaaacctaacattcttcaacatg

SEQ ID NO: 31740 - DNA, 2179 bp, Arabidopsis thaliana landsberg
  unsure (1)..(2179): unsure at all n locations
atcaaaatctgcttcttatggctcagtgctgacctttgcatgcataacactgtttacttcataagctttgcttataaaagattaagcttcaaaggtgttaaattaaacattcagaaatggagaaagccatctataattgattgaacaagatccaaagaaaagtatgtttcttttagctgttcagaatcataaatactcttctaacttctaaatcaccagatgatctacgtgagagagattcgtgctggactctgcagtgtaagaaaagccgcaagtcaataacgaaggtatagaagattaacaatggtgccagatattctcgagatcacctgttttgtgaggaatgttccttgaggatatattgaactgagcctgatgttgtttattcctctgtgttgtgtattgaagaataacgattagtgttataagttaagttgggacatatttcgacaaactgaatacgaatagtttgtggcagatgcttacaaattataaaactagcggaattcatcgtggaaaccataatcatcatcagtgtcatcttcatcgaaaatggcactgtagaagacgtatggatgctcaatcatctctgccaaagtcaaacgtctatctttgtctgaatccgcctggacgattagaaaaagaagagataaatcataaatgtaacatggaacaattcagcagctaaatacaccatttatttggaaagttatgtacctgtgatattatataatcagcttgttgctttgcataataatgctcagtaggatggattttactgataatgggaagcaattcaacgtctgataagtacctgtagataagtggcaattatgttaagggatgtatggtattaatggaaatgctaatcatggtgtgtactcgtatattacgaacccgtcatcatttttgtcaagctgagaaaacaactgctttgctgggccttcaggcaagtcatggtaaggatgcgtagaattgtgattgtcttcttcgtagttccttacagtgtcaaagaggccgtggaaaaactcttcgaaactgatcttcccatctttatctgaatccctttctctgggagagggaaggaggggaatccgttgataaacattaagctaaaagaaaggttcctcggaaacaatcatatgacaaccgtacattaccttacttcctccttgcataaccataacagtaactttgggttcttggtgtcagcaggatgcagaaagctaagggaattaaccagcaaaaactttgtgttaaatagaaagaaaaaataactgatggtactgaaaacctgaaatagctcggttgatttctatctacactagaagaaaacgcttactcgttaaactctgttaaattcagaagaccatcaccatttgcatctgatgcattaaaatgctcctccttccaccagcccatatcatagccaaacgaattattatctgttaaatttataaccaagtcagctagcagtcctaagagacaaaagtgagatcatttgcttaaaatcgcaatcaaactgtggtccagaataaggaaaggattattatataggtcataggcagaagagctagaagtgaaacacagattaaagcaaatctacttacaagactgtcatcaaatatttctacatggtcatattaagtagcaaacattttagtcaatgaaactcaaagacgaacaggaaacagcagctcacccgacttacggacccaagacggtggttcatattcagagaaagaaataaaaccatctttgtttctatcatgaacatccaggtctcgttgagttctgtgcacaacttccttggcagaagactgcatagtccactcagtcaattcactctccgtcacaaacccatcagcaggagaaacatcaatcttcggaaacaacaatatcagcctgcaaagtaccataccaatcaaactcaatccttacaaaaatgacatctttagtaaatgctaaactaaaatcttcaaagatccaaactttgaaggaaattgaagtacacattgttgcaattagcgctcaaaatcaaagattgggaactgaagatatatataagtataaccaaacctatcagtgacattgaacttctnctcatcatttaagtaatcctcagcatccatgaattcttccactcaggctgcgactcgtgaccaaggtgcatgtcatg

SEQ ID NO: 31741 - DNA, 812 bp, Arabidopsis thaliana landsberg
  unsure (1)..(812): unsure at all n locations
ataatacatgtatttaaattcaaaaaaataatacatgtatttttataaaggaaatttcaaaaaagaaatatcaaggcatagatgaatcaaatcaatcatgcaaataaatgtttgtttttcgggaacgtttccctcgcttttagttaaaggttcaagcaatatatataaccgagcaacaaaacaatgcaaagctaacaacaatccctagacttgtcctcttcacgcttgatccggcagatttgtgctcatcatcagcagctggagaatcggcatcagacgatgaagttgaggatttcggggcaggagctccggtgggagtggtcttnnnnnnnnnnnnnnnnnnnnnnnnnnncacactgtccaccacgtaaactgctagaggaaactgttgccttaatgcattattgatccgagtctcaacaacaccggtggaaacattcacttggttgctttgtgcttgtcctgttaaatttaacccaaaaacacctccgtcttgtcccgtagcctgagttctaacgggattacttgctaagagaagatcgcttagagagtagtattttggaatgatatggtagagcatgagctggatttgttgttgatatgtcagactgtttagggttccgggtttaagcttgttgaatgcgttatctgttggggcaaatatagtcatcccttggtcagagctattgagttgtacacttacctgaaacccgacttgagttgtgttgaggagttgtattaatgcggaaaattggcgaccggcttctcaaatcgctgtgagattgaggcggccgtctatcagaggtgtggaa

SEQ ID NO: 31742 - DNA, 845 bp, Arabidopsis thaliana landsberg
tctagtgtatcttttgatgatcccactgtcgaagaagcggcaaaaacatatatgcaattgcagctaagcagagcgaaggaacatttaagccgcaaagggagaaagacattctaacggctggtctcggtaaccctgagcatcctggccgtgtacgaggaatatcatctaaggaaggatggaaggaaggattcggacaacagtgggaaggtctgtacaggaaacgtgatcgatacaaggaagagatggcggattattttaagttggaggccaagaaagagttcaaagccatgatgtctcaaatgctatcgaatccccctccagaattgatgcaacagttggcgagtgcgatgtctgttcaacagatgaccactccacaaatacaaataattgcagcagctcaaccgccggcttccacagattgtacaaccatcccaagctctgttgcttcaacgggaaataaggaccgttatccagttgatgacatcacaaggcctgtggcatgcacactggttataagatatggtattaacaatcagcgtacaaagaaagtagctacaggccttgcgatcccaggacgcaagttccatggaaacgatattccagatgattattgcagggttggagttgacgacagtcgtccaaggatacgaggacgacatgctagacatccctgggcccgaaggtatcgagacacttggacaagctatcaagaattttatcctttggcctcgaagggatgtcgaattggttgatatcgcacgacagccgtcgtcgcaggcccaacctctccgccttctcaaattgttgttcctattgtacatccatcatcacctcctcaaacttca

SEQ ID NO: 31743 - DNA, 950 bp, Arabidopsis thaliana landsberg
  unsure (1)..(950): unsure at all n locations
attttcataaatcaataaaaaaaaaaatgttttgtttgatcccacccattttcccggaaaattatatttgaaatcggagtcaatacgataattatataaggttgaccaatttgatgccgcacatgtcactctttttacaaagtacaaacgctagtcgtcgaaagagtaagtggatatttgaaagaaaataaatgaaataaacccaaacatctcaagtatgataggaaaatatttcgtaagtatcttcttgttatttcatggattcaacttttttttctttttttcaaagatgaattcaacatatcttttttttttctttttgaattcaacattttcataatgaagtagctagagtttctaaactaataatatcagtactataataaatagtcgaacggttaaatatacccacatgacaaaacaaaattctttctcttttacttcatctccttgtcaacatttcatatcttcttcgtcaatgatttgttagaagttcaaattcaaattgttgaatccatttcattggtaaagcatatgtatacatgcacattgtaacatatgtggaggccaaagacagcatgagtgttaaaacgaattttgggtttgctannnnnnnnnnnnnnnnnnnnnnnnnnnnnacaactaaatagatgcttaatgactagactatatctttgatagatgcttaatgttgatttttcagcaaattaattattatttttgacgtcaagcttatcaattagttacttttatcatttcattctattttgatttttgttctctttgggtgacagtctttcttttgtctcttcacttggatggtagtctacggctattgttcgttgaaaatgatacacacttatgctatttctttttataatatatcctgattttctatgatagaaagtatggtaacctcatcaatatgttttagaaanatatggaaataa

SEQ ID NO: 31744 - DNA, 2169 bp, Arabidopsis thaliana landsberg
atgctaatctctacctctatctcaccaactccatgtagtggaaagattgttgcatctttcaagcataatgctagcttgagagaagtgagaactttgactttgtaattggagacgaagaccagattaatacaatatgttaataaaataaaataactaaaatcaaaaaaaaaaaaaagtcggtagggcaatatcgtctttttccgatcgtggtcgtttcttacaagtttcttcgttcgttctctagaaacgcagaaatggagactcagtatccaaaactaatcgaaccatccaagacccgaattggatggattgggatcgggataatgggatcagcgatggtttctcatatcctcgccgcaggctattcagtcaccgtttatgctcgcgatcttcgtaaaacaaaggatctgcaaaccaaaggaggtcgtaccgccaatagccccaaagagttagcggagatgagcgacgttgtgttcacgatcgttggaaactctaacgatgttagatcgttgcttcttggggatgatggtgtactctctggtcttaaacccggtggagtaacagtggacatgactagtagcaagccaggattggcgcgtgagatatacgcggaggcgaggcggagggattgctgggcggtggatgcgcctgtatcgggtggagacgctggagcacgagaggggacgttagggatattcgccggcggagattcagagattgtggagtggttgtccccggtgatgaagaatatagggactgttacttatatgggaggagctgggagtgggcaaagctgcaagatagggaatcagattgctggtgcgagcaacctggttggacttgctgaagggatagtgttcgctgagaaagcgggtttagatacagtgaaatggctcgaggcggtgaaggatggtgcagctggatcggcggttatgcggctgtttggggagatgatggtgaagagggattatagggcgacggggtttgcggagtatatggtgaaagatttgggaatggcagcggaagcggcaacggcgatgcctggaactgctttgaacaagcagttgttcactggaatggtagcaaatggagatgggaagttaggatttcaaggcgtcgtcgatgttattaggagacttaacggcttatcctgataacactagtgttaactaggcaagcttgttttccatttggttagaagttgctaataagaacaagagtgtgtaacattagtttccaattggattatcaacttctacctcctataactatttctctgttacccacttagcctataatcttaaacacgaccatcaaaggtcttacattatacaagtcaccaaagtctcttcaactgaaacgttggagcagctatattcaaacctttcttcctcggatcccttcgctctacacctcgtccatgtccatgtcttatacgtagtgagcactaacctgcagcccagagacaatacgtagaatggaatgaatgagtatacattggaggcaatagaatagccatctatggaatgacaatgcaaggaacaaactgaactaaagcatatggtctaaggtcatcgaaaaaactgcaattacagcctcatgtcaggttactctatctcaagattgtatcactaaaacctcttgatagtttaaggattgattgatttgtccaaaaaaaaaaagtttgattgactaacctccaatacaaaatgttaacaagactagcaagatgcaaagggacaatgacgtaagtacccttactcatcaatcctttcgattaaaagtatagccatgactgatgtgaaataactaaaatccagaagaaaaagagatttgagctcaataaataaaaattgagtgaagtagctaagacttattttttattttctaccaatcgtcgtcgtctctcacgcaaattcttcattcgttctgtggaaacacagaaatggagactccatatccgaaactcatcgatccttcaaagactcgaataggatggattggcatcgggataatgggatcggccatggtttctcatattatcgccgcaggctattctgtcacagtttacgctcgcgacctccggaaaacaaaagatctgcaaaccaaaggagctcgcatagccaatagccccaaagagttagcggagatgagcgacgttgtgttcac

SEQ ID NO: 31745 - DNA, 877 bp, Arabidopsis thaliana landsberg
ggtgactcttgtgtgacctatttcaaagctgactatgaaaggcttcaaagccctgtccttggaagtgatcatgggaagaagacattgcttggagcagaggaggttgtaatcttgatttcattttcaaatcttgttttctatagttattgatctagaaacctaaagtctttaattttgttgcaaaacgtgcagtttgtgcttggaccagatgagtatgtcactgccgtgtcgggctactatgacaagatttttagtgtagatgccccggcaatcgtctcgcttaagtttaaaacaaacaagagaacatctatcccgtatggactcgagggaggaactgaattcgtactggagaagaaagaccacaaaatcgttggtttctatggacaagctggtgaatatctttacaaacttggagtcaatgttgcgcccatagccaaatgatgtgaaaccaatctggatatccctgaaatttgaataaggttatgttgtgagtttatgaagttgtggtctagtgttgtattttgtttttcttaaggataatgcatctgtgtgctttgcttatctaaaatctaaataaagtgggtttctgcattgtgactttgcacaaacttcttttgttaaaatgaataataaatcacatcaagaaaacagaacaagaccacaacgagaagacttgaaactctctgaaggtatataaacaaacagaacctagtaaattagagtcagcttattcaaaacttttagaccatcatcaagatcattataaacttggagtcaatgttgcggaaaccaatctgctttccccggaattttcaataaagagactagagaattacttttaacacccttctttttattaaaatcggatcacaaaaat

SEQ ID NO: 31746 - DNA, 687 bp, Arabidopsis thaliana landsberg
cttcccgcagggacttgacaaatatcactatctgccatttttatttttattttgtattggtgtcaaagaattgagagtaatgaacaacggtcgtaaaaagatgtaaatggtgtttgattgattaatgttttttttttttcttagtatattttagcaattgcatattatcatataacattaattaataattattgtgttgtaaataaatgtcatgcataatgcagtaataaatgtgtgtgcatatattatatatacacgttaattagatgctaaaatgagtgacatatcttttaattctttgataacaccatttccataaatcattgtaaaacttaccttataacaaaaaattaataaatgttataggggtcaattgacccccataactctacactagccccacctctgcggataagcttaacatgtctattaatattcattagtttacgtggtttaaaagtttattgtcacgagtgcatgacacttaccgtgatgttgactatatgaagaggtagatcgtacgtgtacaaatgacttcatagatctttgatcttttttttcttcttcttcttttttggtaatattctttagttttatttgatctattgtcgttgtaatgatctttgattacaaaggaaaaaaaaaactaagacccttgacgaaaataataaccgtattcgtaatctc

SEQ ID NO: 31747 - DNA, 1242 bp, Arabidopsis thaliana landsberg
ccggttgcaaaatgtctcaatttctcggtttgaaatggaaataaaacgtagttacgtgtaccaacaacaaaagtacacatgtcaataatgatggtaactgcctagcgagtgaaagatcgaagaaacgaatgacgtcatttttcacgtgggtcccacgcgccgttcccttagaaagttagtaacgcctctgtgcttcctcaatgtctcctccacgcgtatgtttttcttaaatgtgtaataatccttcattttattagtaaaaaaaattgaagtttgttgtaattttttttataaaataaatactgttaaataaatgaatgaaaaaaaaaatgttaagctcttgaacttgagtttcgtattcgagttttagatttaggtaaaaatatggttgaccaaaaaaattgtgttgggcatgaatgcataacagcatgagtcaaaagacaattcttgctatcatatttatttttatttttttagtttattgcattagtcataaacatcgtcgaattatataatagcgtaataaattagagatgagatagtgtagaaggtggaagtgacatggtacctcaaatcttggggatatatgtacagaaagggtcgaccattttcgatcaaacataaactattttagttcactatattttctcttagattgtttcttgatatatatgatatatagctcattatatagttaattaaaaaaataaaatataattaatcacttcgcttttgttgatgaaactttttattccactcgtgcagtcaaaccctaaatctaacattctcgtcgaatttggtaaggaatatatataaggattgtataaattgatctgtcttacaaattaatagacgtaatttaaaaattatatatacacacatgcgttgtttaaccatatattcaaattgggggttgatcctatcatcctacgaccctattattcctttgaactctaaaatccactggtcaatatctactaaaaaatattattagaaaattatacggtgtcgcctaaaaacaaggcacagcgattgatttaagagttcaagtggaagctgatgatacaactatactactaatattttattaaatatgcttaatgttttcacaaatgtacgtagcaatacaatctagttagggtaacttcacctggttggtcatttattcatagcaactacaacctgttttttctttttcttggtaatatatcatctgtaggatttatcgaaaaaaatccatag

SEQ ID NO: 31748 - DNA, 723 bp, Arabidopsis thaliana landsberg
  unsure (1)..(723): unsure at all n locations
gaggttctgcaggtgcacccaaggttggcctctcgataagccgtcatatttgcagccgctcagagtaccacatggcctgatgtagtggagtatgtgcttggaaatagttggttcgcatatacgaagaatatacattgtatggtctcgcagcggctcgttagtgagagttgtcacgagggttcaatgtggcatatcctttattttcctccttttagtgagattagataactgcactgggctcgtggactttacatggctggtttttgctccacatctagctactctatatgtggtatgcttacccaatatagaacacattataagcagatctgaggaatctaggttgcaagaaacttgtgagttagcaggtgtcattccgtttcgagaactggaattccttactctgaggaatttggggcaactgaagagcatatacagtgatcctttgctttttgggaaactgaaggaaatcaacattaaaagctgtccgaagttaacaaaacttccacttgattctaggagtgcctggaagcaaaatgttgtcataaatgcagaagaagaatggctgcaagggcttcaatggaaagatgtaacgactaaggagccgtttttttccaagctaagaaaaggttccggtttttcttgcctactctnttttatatatgaatactactgcgtgattattttatttggtatgcaaatctctgatgcatcatatggttt

SEQ ID NO: 31749 - DNA, 1132 bp, Arabidopsis thaliana landsberg
tctcactcgttaaatataaagtatgacaacatttatggtgagtctttttataaaagagttaaaagattgaagctttctatatatatctacatatattttagctttctttatttgtcacttcgtttactcgaattcattactcatttcctcttggtatagcttcaaccaacaaaatggaaacttttggtactattccaccaccaccaccactaccaccccgtctagaattacgacgacaacgagcaccaccaccacaaccaccacctccaccaccaccaccaccaccacctccaccaccacggttaggaccacgactacgactacgactcctaccaccaccacgacaacaactactacgattacgaaagcaacagccactagtactacctgaaccattgccattacgaccacgggcgattccttggcttactggacatgatgtcaaaaaaggaaaatcttatgacaagttgagagaatacgtcgaaaatgtccgtagacaaaacgaagaatccgaacgtgtcgttttacccaaaagtatcagctatgaagaccaaaacttggagaaccagcaagacactcgttctaaacctggaatacacgaggtggtcgaagggagcgggaccaaacgacttgagtgggtgatctcaataagagacaagctcgagcaagcagatagagacgacgacacaacaatttggggaaagctctgcatctacagagttccacattacctacaagagaacgacaagaagtcctatttccctcagactgtttcgcttggtccgtaccaccatggtaaaaagcgtcttcggcctatggagcgccacaagtggcgtgcgctcaataaggtcctgaaacgtttaaagcagcgcattgaaatgtatactaatgccatgagagagcttgaagagaaggctcgtgcttgctatgaaggtcccattagtttgagcaggaatgagttcacagaaatgcttgttcttgatggctgttttgttctcgagctcttcaggggaaccgttgaaggatttaccgagatagggtaagcgtgaataaattttctggttttttccggttatctactatacttgctaaaccggtcttattttggcctgtatctgaaaagttgattttt

SEQ ID NO: 31750 - DNA, 1241 bp, Arabidopsis thaliana landsberg
gtccaaaccctaattccggttaggcatacaagaagatttgaggatggttgcatagagatgcagtggaacgagatataaaaatatggttttttcaaaacctctgttttaaacaggtgttgagtataaggcccatatctaattcttttttttttttggattcactagtcctgacgttcggttatccaaacgactatcggttccattcgtttcggttatataatttagtattcattcaactaatttaaaattttggtttggttttggttcagttctttaagttttatcatttagtatccattcaaatattttactttagatatttcaattattttatggatatttttcttttatttttgaatatttttatgattttatatattctcaaatatttttattatttagtttataaataacttttgttttggatatataattgtattttatatcggcttggtaccgattctaaaatatctattctgttttttttcgaatctttggtttaatgtaatttttttttttttttactttagttcccgttcgatacattcgattcggttaatttacattcttttaaaatttactgtaaaacagtaaaacggctcggttaatttgcataggcctagagtaaactgtacaacaggtgactctttcatgacagtacagaacggctaatcatattatcacgtaaatatgtttttgtttttacccaatgagtaaaaagtcagttatattttaaaaaccctagaaggtgaaataattaaatgtaagtggctaaatgcggtggaatcagagccgtcgatctcaaaaaacaacacggcttaagcacgtaaatgggccccacgtttcggccagttccccaagacccattgtttcagccttaaacccattaactcacttctctctctctctctccgcctccttttaagaccaaatctctctctacctctatctctctctccgccattaccagagctcaacgagctctcactttctttacgcacacttgttggaacgaaatatattcatagagaagaagaatctcgaaactcttgaatctaaaacaactcggagactctgttttccctttccggagatcagatcggatcaagatgcagacaaccaacggctcagattcgacgttggcaacttccggagccacaccgccgaatcaacaaacccctcctccacctcagcagtggcagcagcagcaacagcaacagcaacagtggatggctgccatg

SEQ ID NO: 31751 - DNA, 1710 bp, Arabidopsis thaliana landsberg
atacacatatagagtgtatatttgttagttatacctccagtgttgcaaatcctttagataccatctcaatcattcttgttcttatctgccaaaatcaagatagtgcaacatgaaataaggcaaactagcaataagggctacaaatgacaagtaatcacagaaagagcaccatagagtatacctcttggtcagtcttttcgttctcaaattttggatagaaagtggctctgatctgagcatgacaataagtcgatttgtccaccgaaaatttttccaacaaattacctccgaaaattttgctcagattgagaccaacttttgtatctccagaagaacctatctgtgagacagccgatgttttaccaacttctgttgccgaagatgatccactaactgttccatatgacttaggtttccatactagattttgaacacggtggttacttgtagtttgactcggtaagactggcgcattagtgttgctttccttaagacttaacccgccaaattggttgtttactgcttctgcaacaactgttgccgaactatcaccggattcaaatggagcatccatcttcggttttacttgccacttctgctcagcgtgatctctctttttctgccaacaaaaacaaaaaatagtctgagtcaaaccattgtagcagtacctaaaatctcgtttgtgaaccgttgtagcactacccaagtcaccggaaaggtaaaacaatgaagccgtgggattaaaccttcacagatctgtgttaccaaaccctcctcttcgtcgttcagtccgccaaaccaagccgacgagaaaggttgcgggaaaaggtacgtcgcagcttctcgtgtttgtggtggtgtgttgctaagaatattgaaccagaaattaaaccaatttaaaccaagagacctaatgtgtatttcagtattgaattgataaaacccaaacttaataatcgaagatgggattgcgttatacatttcagacaacaaagtgattttaactcaaggcattgatggtggagtgaatgtcgattacttccagaagatcgagtcttggcctttctgattcacagtattcaacattaacgtgtgaatgtattcacagggttctatgataatgattgtgaagattcttgtgaaccttgattatgtagtgtcctagtgtcttctattccatcagttgcacatgagagtttaccaaaactttgaagattatgttgtgggcagaaaataaaccaactgataaaaagccttttgtggtactttaacattaagagaattcaaagcctagttataggaaataaattataaaagcatgaaagatattgttttctttgcaagtttggtctgaaagagtgtattttaaatgggcttactgtgggtagttattgcagaaacgctgaatttaaatgggcttactgtggcccaatagatagatactgtgagtctgtgatgagcgggttatttgtgggtgggcattggtttatagaaacgacgttgtgttcaagttactaaatcgcgtgtgttttttacttttctgcaactaaatcgtgtttcttcctaagaaccctaaatctgaactgtctcatcttctccgatatcagtgacttctccggagatcaataaatcatcttctcaccctagacgacagggaaactcggggattgattcggaaaaacgagttcgttttctgcaaggacttttctt

SEQ ID NO: 31752 - DNA, 760 bp, Arabidopsis thaliana landsberg
tggtgtgtgaagaagaattaatcaaaattttattttgttaactttatgtcaaaatttgatttgaccatgggtcaggggatttgatttactcgacatcgttggatctaattgaagcaaatgtcttaatcatgtcactgtgtcactgagccaatcgatcttctaacctttacaagtaaaaatttggaaaaatagaaaatgtagggcaagtggacacttctctaactttggtgaatggttaaatgtcagcatcactatcactataacacacaagattagatacgtgaccgaaaaacctaagcatcaatagacagtgtccatgtgaaaagtttattcctttgcatctttttcttaatcctgaattgctttttcatgcagaatatccatctctgttttgttagcttacggtaaaatgctgtcatagggcttaaccagtttcgatccggctcggtttgatgaagattggttcaaatcaaaaccttattttcaaagtgtaaacctgatccgtccatataatgataaaacactaacgaacattattaagaccttaatgtttttttaggtagaaactaagaccttaattgtttcaaaaaccgttgtacaattttcatgacttgtctttgcaacgtatggtataagaaacaaagagaagttgatgtatcaaaagcaacaagaaaaaaaagtctagagaccaaaacacttggctgataattaaatacattgattgaagtgacattttatagtatgatgtctctttgtgagc

SEQ ID NO: 31753 - DNA, 1816 bp, Arabidopsis thaliana landsberg
tttttccctgtccaagaaatgatgttaatggaataataagagccaattgtttcttcttttcaacccacagattttacttgctttaaaggaagtaaaaaacctttgctttaaactgtaacactattgatcgtgtaataatcatttttcaggttcgctgttgtttcagcaggtaagtacatattcaagaaacagagcctattacgtgcttgttcagaattggtcatgcatacgcaaatatgaagaatggtgtagacaccttaaatttgcatgggtacttcgaatatggtaatgtattagtttaatcctttttgcaggagcgctgtttttcatttctttatcaatattgatttttgacctctgctacaacctcacaggtggttggttgcttggctggcgaaaaacctcaaatgattagtgctgctgtcaagggtgtagctcgtttgacatatgagttctccgatctcatatctagtgcttacaatttacttccttcaacatttcttctcctccagaggaaaaataaagaaattacaaaagttagttactcatcttccctttcaagagtccacaactttatcaatgatacacaatgaactgtttcctttttctgaaacttacaactaatgtattttgggaaacaggcaaatttaggtttgttgaaggtgttggtggctaaatcacccgttgaaggactacacgcaaatttaaagagcatggttgaaggcttactaaagtggccagaaggaacaaaaaatctgttcaaagcaaaggtgtgtttctgatatggttttattcatacagaatgcccaagatgacatctttgatgcctagaatttgaatctcattaccgcaactttaccttctctcacacaactcagacgcacacatttatccatgttgagctggtgcttgtacataaaatttgtttcttagcggcaggcatatattatgatttgtttttgcgggttcttgtctttttttttaagagtcatgttggtataataggtgaggcttctgttggagatgctcatcaagaaatgtggcacggaggctgtcaagtctgtgaagcctgaggaaaagatgaaactcctgaaaaatacgaaaggtttgcttacaatgttcaaagttggctagatttcagtatttgtgttaactcacatcttctctcggttcatctcagatcaaggaacgtaaggagaaaatatatgtagctggttctaacataaggagatcgcagcattcaaatgatatttcattaaaagtacctttccaactcagttgacaaatgctctcatagaagtatttgagtgctcaatccctgatgttcttgatttatgttttttcattactaataggtggaaagtctttggatggggacgaggacgatgatggggactatatgaatgcggtgtcgcatggccatagcaaggcttcctcgatttttaaatctaagaaatctaaggcatctctttgaggttggttgttataaagtatacacattttggcataatcttcgtttggatctatccattcaactttttggtgacatattacagatccaagtatattaaaaccagagtcttcttgaagtggattactaagatgattaagcgctgacttaatggattaatacaaaacaagattagctctttgaacaagtgaggtttgcaattgagttagatgatgtggaaggacttctaatcatccgtgaaggaaatatctaatgcagacttggatgccaggaacaacaaagccagtcgtttctctgtaaattaatggagaaagaacattctggaaatacaaggatcgaaatcca

SEQ ID NO: 31754 - DNA, 665 bp, Arabidopsis thaliana landsberg
catataagtcaccagtaagatttttgtgcttaacttggaggttctataaagtaggagattctccagtggtgctaggtcaaatttgtaacatcctaaaaagaatctcgcttgatctatatgtataccttctcttgtgcttccttgagatattcatgtgctttctatatatgtataattgtgtccacaacaagcaatcttttatgtttggggtcggtctatccagcaatcatcgttcttcgcagcatttttccatctatgtttaaaagtctctaactcggcgtaagtttgcttccgaacgtaggtaatgatcattgtttgaatagagattttagccagacaaagctctcgatggtctttttaaacaccaaactggttagaaacttacctcagatataccagatgacactgatgatgatttgtgtgcatcatgcggagtcttgctcttatcgaacttccatgaatctgtctgctgatacgcagtaactatagttacttcctaaataaatgtcatgtagagtagtatgaagaaatgacaagagagccagtttcaagccttattttcagctgaccctcctcctaatgtaggaagacccatataaagaatatactcggaatcaacaatcccgatattttggttcgatcacccaattcaaagcaacaacagc

SEQ ID NO: 31755 - DNA, 485 bp, Arabidopsis thaliana landsberg
ggcctggagtttttttaattggttcaaccattccaattccaaaccttcatttttaattaggttacctaaactcctaaaggataaagattaaagggctcatgtccaaatattaagatcattattttcattagttccatcaaatatcataaaaatacctccaaatctggtttgtcgagagggacatcttaaaaactcagagtcttccaaaaggaattatatgtattataaattttaatattttcaaacttttatctattaagtttctaaagtcaataaaaagaactttgtcgagttttgaatggggatatttgaattttcatcgtgtttctaaacctagattcttaaaaaacgagttttggtgacgttttaccgagttttcaagaattttcgtttccaaaatgtttccgaaacagaaacagacctcggaaagttcaatgcaacataggtttatgttatcaatcgacaagcacccaacatcgagataa

SEQ ID NO: 31756 - DNA, 1244 bp, Arabidopsis thaliana landsberg
ttttctttttctttttatgtggcgtttgattatcacaactaattggtgcacacacaaaaaaaaaagattatcacaactaattaatcttgacagtttataatttaaaattaaaattaagtacatgcgggcaggcataaatggcgctgcttgatttgcgagagtggacctatgatctgacatcagaaactgaacaacaattatttgacttttattaatagattttcacatagctattttcaagattttgttttaatgattgaaattttgttaatcttatagtataaagattggtattaatgaattgaataatgtgaatatcaagcttaagcacatgatacaataatatacatcatcattacattatcaccaacattttatttaaatgtgtaacaatcagttggcccaccttaagaatatgtttagagacactccgtactattatttgataattttcttgcacgtcgtttatctgttcaccaattaatcatttttttttatattagctaattaataacttatttataatttattttgtttaaaaattaatatttgttgtcacgaaatatttttttgtcaataatatacaatatgtagatatcgtatattagtgagaaataaatcaaatcattagcctacatatatcattagttaactaccgcaaaacgtttatctaaagcaacttaagtcaaacatttcgaaaaagtctactcgtttgaatctataaaaattggatctagtgggcgaaattgcaatatagctttggtagattatgctgtagaataatgaaaacaaaatacatttcaataagcattgtcaaaataatgaaaaatatatgtcattataattatcagaaaacatgtgattttgtcataaacttgatttgaaacacacatggcatatgatcttaaatcaccctagctactgtaatctttctatgcaataattattatttatttacaaaatgattgaatcgatcgtctaagaaacatgacatatgcaatgcagagagttgaaaatgaatgtacttttttgtcgatatgtcaccttatgcaagttgtgaatgcaataattgttatcggacaattctgaaggtacaagtattaacagtctttattcattggtcccgtgtacgtatccaatttagtttcggcgattccatttcatattttttttttaataaaaaaatcttaaataatacagaaatatagattatccacctaatcttaaaaaaaaaacttaaaaca

SEQ ID NO: 31757 - DNA, 482 bp, Arabidopsis thaliana landsberg
ccaaataacgaagaagaaattaaatcaaattgtttgaccccatattttaaacaatatattaaatgaaatttcagaggacaacttatgtggatagaaaacattgcagtattatagggggcatgtagggaatgtcattacatcacatagttactgtcttactgacttgatctctataaaaaatatgagatttgacttactgtaaacatttaatctaagtcttcaaaatacggaaaaatatcttttaaccaaaaagagatcaaatattttttatatataaagagtaacgtatctaattttcacctatattgttgttgaccaaaaaaagaataacgttatctaattttcactcatactgatacagcatatatatagtcaatattgttactacttactatgttatatcaaaggattctagattgatctactgccataataagcaaaatgtgatcgcgttccgtattctggccctaatataccgtact

SEQ ID NO: 31758 - DNA, 1116 bp, Arabidopsis thaliana landsberg
  unsure (1)..(1116): unsure at all n locations
gggggagctttgttgtataacaataacatgatacagtgttattgttaagttgcctaacttttaaatatcggatgtttttttaaagaaattgtgttggtcaaagttgctgtgcatgcaccatcgtattaaacgtctgattactcatttcattttctttgataattgggctttcaccgaagtaaaactaatcataaattatgattcatgaatatgaaggggtctttaagagtgcaacggattaatatctacctgtgaccttgaatcagtaacatgcaaccactggacttcttaatatggagttgtcactttgtatgatcgataatcaaattttgtctctgnnnnnnnnnnnnnnnnnnnnnnnnnnnnnnnnnnnnnnnnntcggtgatataatttaatatacttgtcagaattggtttatttatgaaaatttttagattcattaaaggtgttgacataagaattgataatctttattgcaatgcaccctaagacaaaatcaaaaccaaaaccttggatactctgactctgactaaatcccaaaagactaaaatacatgtataggaaaagaccatttcagtttccaatgtctgcaaaatgaatttatatacaaaaatcatcagtaaccctaactttttttgaatcaaatgcaaactaatctaaagaataaccatcatagagaatttcacagtggtaatcaaagtgaagtgtgtgaaaacacttagccactagaatcaaagcatttacacatatcattttttcatgtaaacaaagccgcagagacgctagagagttgctctttcctcttagccttggtccatcgatagtgcctcggtgcattaggaggctctatgtcgtcctcttgatgcctggaatccgaaacctcctcgagatcgatcgagtttcgaaaagctcgagtctttttaggtgtggtgtacgcaaaatgtaacgtttttgctaccaaactctgttatagttcaaaattgctatgagaacattgcatcaatcaaaactcaaatgatgagaaaaaatggaacttacagcttctctaatcgatttagatacaagttttagactcttgagatcctcatgatcaacaccacaaatgactcgaatct

SEQ ID NO: 31759 - DNA, 981 bp, Arabidopsis thaliana landsberg
ggttcttgtttttggcgaccacgggaatggggaaggcatccttcaccgtgagcgcgttgagggcgcggtaatcaacgcaaaagcgccaggacccgtcgggcttcttgacgaggaggaccggcgacgagaagggcgagtcctgcggcgtacgatcccttgctccatcatggcggcgcactggcgttccagctcgtctttgtgggcagccgggtaccggtatggccggactgccacaggctgcgcgcccggcgtcagggtgatgcggtggtcgtgggcgcgctgcggtggcagaccgatcggctcggcgaagacggaactgaaggagtccaggagtgcgtcgaggaactgctcgctcgccaccgtggcgctgattgctgtgggactggcagccgagacgccggtccagcatatcgggcgcccctggaagttgaacttcatgcgccggctagccaggtcccacacaataggacccagcgcgcccagccatcgtgtgccgaggacgacatcgtacccagcgagcggcatgacgtagagatcggccgggaacggggtaccgtcgatggtgaggggggcgtcacggaggaccccggcgcaggtgacgcgctcgccgttgcgaccatggcgatgagacgtggccgctggtgaaggggcagacccgtgcgccccgccgccgcctcggatatgaagttgtgggtgctgccggaatcgaggagggcgaccagcgaggcggcaccaagcgcgacggcgatctgcatggtgtcagccacaggaccccggccagggcctgcagggagaaacagggggcctcatcgtcagcgtccggagcgcgtcgttagtgtcttcaatctccacgccctccacgaaaagaatacgcctgcaaaacaggttgtggcacgcgtgtacttttcatgcagttaaacagaggccatcggcgccgtctgccactcgtcggggtgagcgcgttggttgcctcgcaaggcc

SEQ ID NO: 31760 - DNA, 869 bp, Arabidopsis thaliana landsberg
  unsure (1)..(869): unsure at all n locations
cgtatattgatatatatctagggaaaactcacaaaaactacaaaagttacatgatgcttataaatttgagaaataacatctatattcaatacgaacattcacattcactcttgtattaaaattacattttttagatcattttataagatggtttacaatataaaacaaaagaatgaaacatgcggactttatatacatcatggttacgttacgtgtgtgtatatgtggacgttattacaagacttaaaattatacttttgcccttctcctacccaatggtccctcgattttaaatttgatcagctttatttcaaatcttcaaaaataaaataaaaccatttctttctctctctctctctagnctaggcttcttggattgagagagtgtcttcaaataaagctgtctgtttcgaaaaggtacatgcgttacactacaactctctatctctctctcttcttttctgctcatttttggggaattcttctggctttatgttcttggtcctattactgactcacaataacccaacgcaaatctttctttgaccatttttaatagtttctcttagtcacttgttggtttcaatgcaaagttgacctcatcttcttcttcttcgagggtaagttttaactctatttagggggaggctttagcttattaaatgtagcatacgaacattaacataaagtttataagttaccagctttgacaactctcttctctgtgtctggtgtttgtcatttgaagattactgtctcttgttctctcacacatatcatacactgatacacacgcgcttttgacggcgcgtgattataatcatatgtgagttcctcggaattttccgacatgagtcatggctttggtt

SEQ ID NO: 31761 - DNA, 1092 bp, Arabidopsis thaliana landsberg
acagaactatcattcattcagaagttatataacgtgactttatattatgtttctgtttatatatacatcttccagtgcgtatgtataaaaatgtctaacagataacatttttgtaatcaaagacaaatgttttcacactctaattatacctttttagtgaacaattatattcacgtctgtgtatcatcaatgtgtagtagtatcagcaggcttcagaaacatgaaatctttggtttttgatacaattgttcacaaaggggaaaggagatcagcggtatcgatgtcgtcgaaatctgtgtccaagtcatcgagatccatactgctacttccaatggcaccattactgcttccaccagagccaccagcacctgcgagtccagtagctacggtgataggtttccgagcttcttcaatgatccacactatctcttctactgtctgagtcgatggaccattcatcatcaatgatccttcatacatctctacggcaagttcttgagaaaccaagaatgattctttatctcctctattgttattctctgttacaatcaaatcttaattagaataaaaatctaaaagtcgaaatcgaaagagaacattgtttaccttttcagggttggcaacgaatatccgagagagaagatgtctgcattcatccgaaactcgaacataatcaggaatagcatactgagctttgagaatccgaccgatcgtcttccgaaaatctttaggatcagaaggatcttcaaaaggataagcaccaacaagcataacatacaaagtgactccacaagaccaaacatcagcgattttgccgtcatactctttcgtggagagcacttcaggtgcaatgtaagcaggtgttcctactgttgtctttggttgcgaatgaagaactcctgattttgaatatccaaagtcgcaaatctttaacacgtggcgcttcgcttccatcaagtaacgtgttctctagctttaaatctctatggcatatttgcttcattttccaacataaaaaaaaacaaacactcttaatttttttggttacaagaaaagaaaaaaaaacgtttttgattaagttagaatgttatg

SEQ ID NO: 31762 - DNA, 548 bp, Arabidopsis thaliana landsberg
aacgaacccttttttgttcatgcatgcaaatgctttcatgttcttcttctattttcttcgatacaattttctcgtctacagacgtttgtttctctctgtaaggcgatgaatcgcgaaaaattatacggagctgacaacgacgatgatgacgatataggtgaaggcctcgaagatttaagactccgagaccaattccggttcagttggagtaatgtcgtcagattcggagagtgaagacaaagacgaagaagattctctgcatttgaaacccttcacgctattcgtagacgataaatatctgcttatcaaaatctcggtgagctcattggttaagttaccgttcgatatttgtttaattgtttctcaagaacctgggatcaacaacaaaaaaaaacctgggctcaacaaaaaatcttcaatgagggtattttcgtaatttactgtcacggaaatccctagtgccctaaaaagaagctgtccatttgtctattggctctgatcttatcctggcttttctcgaacttcaatctttttttcttatctcgatc

SEQ ID NO: 31763 - DNA, 1167 bp, Arabidopsis thaliana landsberg
  unsure (1)..(1167): unsure at all n locations
aagattatgtggcagaccttgttcataaagagaatatccgattcgataccctaccctctgaacggacgtcgtcttccgatagatagattgctatcgattggattctcactgtccgtaatctcaaatggattttcccttatctgatctttgtcttaatctctgattgattggttctttgtcttaatctcagacaaggacaagatttgggttcctacatcacacagcttgcattgcaatctcatacttcgatctgtttctccaccaaagattcatcggtgtaagtttcactctccggtttcattgatctataaaaatctcgcctttatcttcagattaaagcttaaagatggtttctttgtagttacaaataaatgaaacatgggcgatgcgattgttatcagtagcttgtttatcattagctgctaaaatggaggaacgtattgttcctggtttatcacaataccctcaagatcatgacttcgttttcaaacccgatgtcattcgtaaaactgaactgttgattctatccacattggactggaagatgaacttgatcactccttttcattacttcaactacttccttgctaaaatctctcaggacaaccattctgtttctaaagacttggtgttgttaagatcctctgattctcttcttgctttaactaaaggtaactctattaagaaacacatttttttctcaagatcaaagcatttattgatatcacatttttgtttccatgtagagataagttttacggagtatcgacagtttgttgttgctgctgttactacattgctagcttcttcttctacctcatcggatattagattgactagagaagagatagctaacaagtttggttcgatctcttggtggacttctaatgagaatgtataaatcttggtgtctttttattcgattttgattgtttgatgttgatgatcataatcttaggagtgttgggttttgtaggaaaatgtatatttgtgttatcagagaacgctagagattgaggagaggaaacatatgacacctccaccggaaatagcggtttctcgcgaacagccggcttcaggaagtggcgctaaacgctgattgtcttttgatgaatctgatcaaaagtctcgaccagctnagagaatgcgtaagctatgaagagagag

SEQ ID NO: 31764 - DNA, 2348 bp, Arabidopsis thaliana landsberg
  unsure (1)..(2348): unsure at all n locations
acaatgcgaaaatcattgtattctgactcacaactgagaaaaatgcaatttatggtaaacaaacaattcgtacgggtcgggtatccaagcgggtgggtcgggtccgaaatccttgtagcaaccgtaatacatcatctggtgaaaagagaaagggagattagggtgaaggatccgccgagaaatctgaatccacgtctccggcggcgtggatgaaccgtgaataatgtcttcgagatctctgagaagcttctcggagacatcaccggagattcctagagcttcgatatcagatttggtgattgaatttagggatttgtacgccatttttttgagagagctaagaaatcatgaatgattcaaaaaatgatgagagtggcagagagaagagtggcaaaattgtccacgtaatataaagagagctcgtgatcgccacgtgtcaatctgattctgatatttgatagctttttttcgctctttacacgtctgattggattatcttcttcttcttggtgataggagttacttttttttatcttcatgttatattatgatatgaatctttttattgatatcagtctatatacattgtatgagatatgaacttgtattcttaatctatgaatcagttcagaatctaggctccatattatatacattgtcgatatgtttctatgaccaattttttaccttaagtttagttggttttttttttttttgggacaaactaagtttagttatttatatgttaggaatcataatgaaagtgaaagaaaaaaaatgttgattgattgatatattgaggaaaagaagataacactttacgtttggttactttatatgattttatgtatcttgaaattggtctcagtctatatacattatgtagtggtactgatctcttacaccttttttttttgctttctcttttcgacttttgatcatcatcttatttggtttatgtcttttatttattgatttcagtctatatacactaccattttagattgtatggatcagtagagcaatatatgttagtctatataaattttatttaatttggtgtagaatccgttagcaaaatagacaattttgttacaattcggagtgaccggtgtcacaattaatattaattagacaacattttgattaaaaatagtttgtttctatttcaactattgcacaatatttataatagttttcaaaatttatatcttggttttcacatgattgaaagcactaaactaaactccacaaaacaaaaacttgtctaatttttattatcttcaaccatttgtaaaatggattttcggcaaaaagctattggcaatcccactaagtgataaggctaggccacacacacacctaccagatggtccaaaatgattgtgcatctatgtgatattacaattagttgtccataactcattatgaatttagtctttatcccaattttttcctaccactataggccaaactcatcccggtttttgatcatacattttttcttttagatgattagctactnnnnnnnnnnnnnnnnnnnnnnnnnnnnnnnnnnnnnnnnnnnnnnnnnnnnnnnnnnnnncaattgcttcagcttttccatatatgatcatcaatgtaaaagacaagtaagtaataattcgaaaatcttatcaaaagatctttcaaagttgagaaataaaggaatactaaacaagacttgtaaaattgtttatatatcctctgttttcagtcggagctaggaaggaacttggttccggacctagggccaaagcttctcgaagctgccgggataatccgcgatggagacaagacttgtgcaaacgagaagtggcaagaatcagggcctaaccggctctgcaaccatcctctgccaccagagaatccatctgtcacaatatagcaattcttgtacccgagaacctttaacgttttcgccactatcttagccgaatccgtgtacctacaagccaaaaagaccaataaagattaagcaagattcacaaaagaaggtcttgtagaagagtaataaacaaaactcacgagtccagtatgatgatgttggagcctttgttgattttcttgaggtaagaaatctttaatgctgctatctctgcttcaactcgtttagagttcctcacgattccttttactttgtttggtagttcttctaatctgataatcacaagaacagtttcaatgttttgagtatagtaataatgaaaagaattatcaaagttatatagacacatacggaatggagatcacgcggttcttagcattcgaagggagccgtggaatcccggctttctccttgtctttctctgatcttatatccaccatca

SEQ ID NO: 31765 - DNA, 524 bp, Arabidopsis thaliana landsberg
  unsure (1)..(524): unsure at all n locations
cattcactgtttctttgttttgaacttccccttccttaacatttgcgttttgacccctccctatctctcgctctctgtctctctcagtcttctggctttctcctattcctctttctctctctctccttcaagttgctgcaatcccttgaaaacccaataaacccccaattttccatttctcataaagttcacatttttccttcttcttcttcttctgccaattctctgattccctcgtttcaatctccgttttgctttgcctatcagataaatttcttcttgctttcctttctatctcataacgataagttgaattaatctttgcgtcttagttcatcagtagagagagtagggttttttccgcttatttttagggaatttcattntgtttgaggtgagaatctctattcgagtccccaagattctctttatatccctagtttagttgtatgggtgggttttgattggaatatcaagggggtagttttagctaggttcactgatacttggaagatctgagttct

SEQ ID NO: 31766 - DNA, 516 bp, Arabidopsis thaliana landsberg
  unsure (1)..(516): unsure at all n locations
ctcgagaaggttcttggtgatatgcctaagaagacgtttgagttcaaccgcattgcttatgcacgggagccacttgatattgctcctggaattacattgatggatgctttacaaagagttctccgattaccatcagttnnnnnnnnnnnnnnnnnnncaaccaaagtggatagatgtgtgacaggtcttgttgctcagcaacaaannnnnnnnnnnnnnnnnnnnnnnnnnnnnnntgttgcagttattgcacagacattctcagatctaacaggtggtgcatgtgccagtggtgagcaaccgatcaaaggcttgcttgatccaaaagccatggctaggctagctgttggagaggctttaacaaatctggtttgggcgaaggtcactgcactttctgatgttaaagctagtggtaactggatgtatgctgccaagcttgaaggagaaggatcagcaatgtctgatgctgcgattgctctatctgaagcgatgattgaacttggcattgcaattgat

SEQ ID NO: 31767 - DNA, 2472 bp, Arabidopsis thaliana landsberg
  unsure (1)..(2472): unsure at all n locations
gaagttgcttaccatttgaacatgccggaggacatgcgactacataaggttttccatgtgtggcaactttggaagcatgttccggatcctaatgctatcatacccgaaccaatacaagagttgagaacgaatctcacctatcttttaggacctcttggtattggtgaacgacaaatgcgggaactaaagaatagaaggatttcgaaaattcaagtattttgggtaaaatagaatcataaggttactacatgggaagatgaagagaagttaagggcaaaatatcaacagttttttagggagaaaacaaagaagatgaacccggaccatcaaatctttttgtaattcgggacgaattctaataagggagggggagaatgtagtgacccacacacgtccattagaacgagcataaaattgaacgacagaaagttgnnnnnnnnnnnnnnnnnnnnnnntatatgtgccataaaggcgataaaccttcaatgagcaaagaaataatgatttcagcaagaatgggcaagaacatgcaagaataggcgcaggacaacgtgataacactatattttactcattttaggtgtatgtttatcatcatttagctttgcatttgctcattgtatcatatcattttgcaccattttagcttgttttgcatacttaggcatctaggatcatcttgcattcgcattgcatgttttggtgtgttttcaggtgcaaaaggagcttaaaaggactctactcgatccattcactcgatccaggcagctacagaagaggcatcattctactcgacctctttactcgatccaggatgccacagaggaggctgcagtttactcgaccctcctactcgatcaaggcaacctcagacgaagcagtagattcaactactcgcccctcctactcgatccactactcgatccatttactcgaccaagggtggccatctctacaagacttgttgagctatcaaagcgtcttcgaatcctcctcattccccactcaaccagacatctgagcatacagataggagagcatgaagcatctacttgaccaattgatcactcggagcatagacacaaaggcgcagactttgcagcaccctctttactcgatccccattatcgagcactcgcccaaaccgcctgaagtcggttgtcttctagtaatctagggttttcaacattttactataatagatcactttgggatttgtccaaaggatcttgcttttatcctttactttttctttgtgttcttgaatcttcaaaacttaattactcttaatctatttctttttgcatttagttctttgagtaaagcagctcagtttgcttagatttacattttggtatgatttcagtaatttctgggtttgtgttcttagttatgttgcttgagtagtgattagggttcttgaggatggattacattagggtaatctctaggttagtcaggtggttaagattaggttagatcccttctggattggttggcccctatgcggtttttgctagctaatatgggaattcgaccatagacatgcagcgtccaaaagacgttcaaatggatgcatgatctactaattccagagatttataaactatagaccaagagattggctagtctgtttattggctttggtagattgttgcttaaactctgctctactatgtttcatcaacgagagttgagattaggaagtggtagagttatgagggactctatcacgagagtggatggacccggttttgaatctattgtctacgctatttgcctttcgcctgttagccacctgatgaaccctagagttgcccttatcaatgaatccatccttaggacttctattcttcttagatttatttgtattcaccccgtgattacacttttattcacctgttgcatgtttgtcaccttttatttgcattttagttctgaaatttgttgcatgtttgttctactcggcccaatgatcgagtagggctcttaagttctcatttctgttattcgaatcttgacttaggattgttactagaaacccaccatcattataatctagcttgacttagttgcttctatacacatcttgattggtagcaataacagtggacaggattaacacaccctatagctggactgaacctcacttcagcacataagtaggcttaaaaaacctacttatcaaatccaaagatatgggcaaggtaaaaatgaaacttgccaattctagttcgaaatggggtcatcctggcgaagccgaaacgggagaaagttgtcctgaatagatgatcattgactatatgttcctaaaaggtaataaaccatcaaagggcaaaagaaataactatttgggcaagaatgggcaaagatgagcaagaataggcaagattggccaacacaggcgtgccgcgggcgaagtttaaaaagccaagcgttgaccgccctttgaccgcgccatagacgtgtggg

SEQ ID NO: 31768 - DNA, 382 bp, Arabidopsis thaliana landsberg
acatgtcgtaattatatataactatagactctattcaattaaactagacagacctctgtcaactaaacgtactaaagaaagaagagaaaaaagatatacacaaccttacgagctttcacattttcattggcaatcctctctttccccgataatacaatgttatactgcatacacatcagagtgtcccttactgattaggacacatctcttatacatgctaaaaaatatcaatttaatttgtgtaaggtaactaaaaactaaaaaaaagagttactgcactcattctaaatttctaataattagcaattttgtttaacaccatctccactcaatatcgaaaatccctcgagttctcctatataaacatcccaactcctaaaaa

SEQ ID NO: 31769 - DNA, 252 bp, Arabidopsis thaliana landsberg
agacacgtgacataacaatcgagcacacacaatctagaaatgattatctgaacaatcgttgattggtctctctacatactaaggtaatgaagatacattcaaacatatagaatgttctatgagaacacaaataacatgtatgagaaatacataagaacaccattatcacacatcatgaatcatcgtatatagatatagaaccacatgcagagcgacaccaaacaaatccagtcaactttttgggaaacatat

SEQ ID NO: 31770 - DNA, 561 bp, Arabidopsis thaliana landsberg
aaactctgctcagaaaatatgatcataaagaaaaaaatgtagagaaaatgattggaacatgagagatgtgagtgataccaccggtccggtaaaatttttttttttttacaaatagaaaagttaaagataaaagcatttccctccaatgattgttattgacgataatcgttgtcaaatccaaattttctactattttcatatatcgatttcaatgatgttttcgatcgactttataaccagttggtctttttccatatgattaaagtgggtcgatatacctatttgatttgaacgactcatactttcaaactacatatccctatcttaaaggagggctcgaaaacaacttgtatgtttacttatccacacacacacaaaaattgtatatacttaggaataatcaagttttagtgagatagtaaactttggagtacatgcactaacatatttattcgcaaaaaaacacgtgtgtaaaaattgtaaacaaggaccaagttatttttatacgataacactttatttatacaatgtcacttgtacaataatatgcgacccaaaaaa

SEQ ID NO: 31771 - DNA, 807 bp, Arabidopsis thaliana landsberg
tcatccattgctgcctctgtataatgttgattatctgttatgatttttcatagctacataacgcggcacacatgagggctttgaaaacttgacacatgagactaaagaactactgatctaagcctagagattgagctatcagcatgcctctacaacaagtcaaacaacttgatcaagcacattacactcaaagagtcttatatactaagaaacctattaaaggaatcatttttatgctggtaaattggttttctagcctaaaaaactaagagatctaacgatctatgaataacccatcccgggtaatcggtaatctaagactaaggattcaacttttagcatttctctacaacaagtcaaacaacttgcacaagcacattgcagtcaaagtcatatatactaagaaaacctactaaagcaatcatttttagaacctcaattggttctctaacctaaaaaacgaagagggtataagtcacataccgattcttgcgtatcccaagcaagccaaacagtggagaaatgtccccaaccaagtttactctgaatcacataagctccattcttaaaagtatcaccgactcttactgtatggtatcctcctttcttataatcctctgttccttcgtcctccgacgagtactcactttcgtcattcacacgtccgttgtttttgtcctccgccatagctgaaacttgactaatgaagcaatctcagagaccaaggattcagagttgagggtcaaatctgaatcttgatttcaataaacccctaaaatttcggttcaacaaaattgtggtaatgaa

SEQ ID NO: 31772 - DNA, 934 bp, Arabidopsis thaliana landsberg
tttctcaccctctagtcttggtaccatattctctcgctctttgatgaccgctacagcttttgttgcaactttttcagcaaaaactctctctcttctcctcctacgctcctccctctgatgctctctctcagagtcagtgctcgaatcagactcataatcggattcagattcatcacttgacaaggaagattccttcctcgttagaccatcagaaacattgctctgtgagacttcttccctcacctgctttccccatacagaacttcttctggactcacgaccatccctttttcctacacttggtgatgtttccctagggagagtctcattagccgatcttctggagtcatccaggggaggtgtcttaccactgacatccttctcactctctttatgagttgagttcacaaatatatcccgaggagcattcctatttttcatgtcagcatcagaagggctagacacttccttgtcgcttggttccttattcgtctgtttttgtggcctccctctggaattaaccacattactactactactcttctttccatcagataccaaaggatttttccccaaattcccatgtctttttccatccttcttcaatccccgaatcgcagatgttccaccaggactacgaggcgtagaagtgctggtcctctgatttggagtactcagaagttctgtccaatcattgtcagtgagtttagtattatcttgtgtcaaactttgtgacggtgcacttgtcctttcgtgtgattgatctggtttgcgtacttttttgctgctacttaagtagctaggcttttgctctgttgagtttctctgagatccactaccagagtcactaccttcatatgtcttcttcctcaactgatctttcaaagaaacaggactactttcagattttggagaggtctcaaacacctcgtca

SEQ ID NO: 31773 - DNA, 1159 bp, Arabidopsis thaliana landsberg
caaaataaaattataatattcaatttaataatatttttacaacacattttttattaaaaaaaaaaatgggtcttgttctctttttggtaagttatgttgatcatattcttcgagaaggttcagacaagctagtctgtgttcacatttcacataattattatgtctctttcatgccaacacttttaatcagaatgagctatctttcttttccagtgaattcacgatgctttgacggtcaaagatgattagttaggtcaaaagacaacgaacagataattatctttgcattcctagagtgcaaattgtggaaatttcgaaagaattttctgcatattattgtctcgcgcaataatagattataatttggatatgaagactcttcgaagaaactgataatctagaacccgtttgtacgacaaacttctctcatttgggcttcgagcttcccacatttaccttatctttaattgggtttgaattttttggggttccaatatatattttaattgggcttaaaatcaaaatatggcccataagtaccttgtaatcttgtcacaaattagtttatttcacttcgtttgtacttaacagtatctataccaatgaaaaaatactatatatattcataactattatacacatattatgaatttcatggtgtaaattttttttttttaatacacagtgttgctagagcagtatttgaccccaaaaatgtatagatgtttagacgatagaaaaaataagtacatatagaaatgcaattcgttcatgcataacataacaatgcaattattagtgtgacaatgcaaagttactaatcaaatatcagcatcacatgaactattttgggatttgttagactccgacaaagagaccgtgacatgagaacacttaatcttagctgtacgatgtgatgacttccatatccccactttaaacctaaccctagccttaacaaaaacttcaaactcaatctttcccaacgaattttgagacctcaaatccttaccattggattttgaaacggcaacgttttccgcaatcaacgtttcatcaatctgcttaacgttcatccgccgttggtgaaacggctccactgtgtcgaacgcaagcgtctggtcttttgatttaacgaatatctcgacggaactgtagt

SEQ ID NO: 31774 - DNA, 975 bp, Arabidopsis thaliana landsberg
  unsure (1)..(975): unsure at all n locations
gaaactggaaaaagtaatctgataaccctaataattatattaatttctacaagtcactataacactatgggggtaattgggtcattttctttccaatcacctcaaaactctaaaaaatgtatattgaactaaactttagaaagttaaaagacagtatactgatgttttttttttttctcttttggtgagaagtatatactgatgttttaagtaacctcgattgtgttttctttggtagatgtttatttactcctcgcaactgatcttgaaggatgtatataaataagaaaaagcacaaacagagaattatggatgcttaaaattttttgacgaagaacaaagtagagttaaataaagaattaaaaaaaaaaaaaagagaattatcatccttgattagagaaaagattgatccaacatgcaaaacaccatacacataaaaatctggtggagagggtccacacgtttgacaatttaagttctaaagagacgtacgtgtgctattggattactggtaaactttagaaacattgacgatcaaagtaaagaatcctaacaatcatacatactacatgatacaagaaaacaaatattgcataactcgtctctttctgtcttcgatctaatatgcaaattgcaacttgataaacttataaaactagaatatgatttgtgcgtgtgaatcgtgaaatttgcttttgtttgaagccgacagtggtcatggagtgtttgaattgaagaccagttggggaagagtttaaaagttgaccattctcactcccaatatttaaccatcgttgctcatattttaataatgtttcgtgacacgtccacatgtgaaccagaagggaacgttactttccatgtcggtaaatctcctgatattttgtagaaaataaaatatgtaaatgtcacgtaggaattganatcatatcatataacccacttgtatagtaatgactggcataactgaaatga

SEQ ID NO: 31775 - DNA, 821 bp, Arabidopsis thaliana landsberg
tataccactataatcgtgcctcatattttattaaatgataaaatgccaataatgcagggcacgttacttatacttccataactttagcatataatatcctaactaactagtaactaccatatatattagtctcatcgatccaataatatagattcgaattttacttggatatcgatcttcttcatagaataatcgattcttgtgaatgaatatttgatgctgaatatatacattctttatagatataatgaaaagctccccagaaagaaaccaacagcattaaacagctgggagatttgtgttgtgtggaggtcgacctttcagcgttaagataggccaatcatgtctttgatatatgatgatatttaataacatttgtgtactagtatttaattgttctatacttattctatagtacaatcttttttttttttttttaaaggaaaatagtacattattttttttgtacgtttttttgttgttgttgttgctgctgcatactaaaattttgtttgtttgggtttagattcataggagtctacttggtgttcatccgatcaaacccgatatgaaccaaacctaaataactatagtttaactggattcattatttctatattcgaaaaaccaaatcctaattcgaatcgaaccatgcagaaagagaaaaagcagcttaattatataaactaaatttatttggattaacaatccgtttggtctaatctgctagtgaatcaaatttgttccaaattacttgcagacaatccaacctaatgcagatgtgcactgaccgtgaatgccaaggactgaccattcaacgc

SEQ ID NO: 31776 - DNA, 1016 bp, Arabidopsis thaliana landsberg
gagagtccaaagttataaggagagagctagagatacaatttaggacatggtggactatttgtttttttttttggatgtaatgttaaattaaattcaaaagaaaaatatcattttatatcgagtgcaatgtttgttaaatagaacttttatgtactaaatcaaaagtttaacctcaatctcgcatcgcaaaccaggcttttagacccttatcataccgcttatctccacttgctctgatcgaacacggtggactaatataagtcataatctaaagtttagcttctgtagattaagtgagactatatttaagacatagtaagctctgatataaattaaataaatatcttatatactaataaaggaagatctacgtaatgcttaagaaaaagggagaacttaatgttttagccacatactctttttgtgtgaaaagtatgagttttctataagcacgagtgattatgtaagaaatgaattcatcaatattttactcttttcttgtaagaaagaggaggacctacaatatgcaaggtttgataaagagaatgagatgggataagtggagatgatagaggttagcatgtaccatatgaccgggaaagatatatcgtaggattgcttgtcggaccaaatgcataaatatataggactactatgttgcggcccgtgaacgactgacgagcctgaggagacgggtgcagacagataaaagggaaccgaattgttgttgcttgtttgttggttgcaagagcatatatatattgttagctatgctataattgtgtggtgcctgcttgtaccttgtcgttctatggatcatgtgggcaagaaatatcgtcctcattgagtaacttgttgctcatgttcccggaaaatggtggcaggagaggactaggagcggagtggaaaggcgctatataggacgggattctacatggttttaggatttcacaaagacatttctttgttctaagtttatgatttcaattttcaaataaggatttttgtttatgttg

SEQ ID NO: 31777 - DNA, 560 bp, Arabidopsis thaliana landsberg
aagacgaatttgccctttactcttctttcttcattgaaaccaatttttgtatgtaagaagctttaacaagatctcatgagtggagttgaaattaatttgggcacgcacaagccaccgattccgatgtatgctacgatgaagctaaaatatattcccaagactatttctctttcaaaatccagataacaaacaacccaattagtcaattacacatccaaaaactttgattaaatgctcgtttaaattttcgcttgggttcttcatatagtatcatcattagggtttagatatcttaaatcaatcgagttttgtgattagaaagagattttgggataaaagatttgatttttttgcaaaaacattggattgagaaagcagctaagaggaagaagatgatgagatgatgattcaatagtaaaatagtcaaatcatcaaataaaaatgcccatctacataaacctaaataaaaagtgtttattttcaaatatttgggtcagaaagtgcctatttatataaaagcgccatgaattttagttcccagattttggaagacatatgtt

SEQ ID NO: 31778 - DNA, 509 bp, Arabidopsis thaliana landsberg
taagggatgtttaaggtttttacacatttattatgaaaacataaatctttcatgtaatatgccttttttacatagaaacaaaactaaataaaatgaattcaaccaatttgaaaacatactctaaaatataattggtcgaaaaaaacaacatttagatattgaattattgcatagaaacatgagagcatcacttaaaatgaaacaaaataaattttcttaaacatcacttaaagttatacatagggagtaggtaatatatgtcattttaatattaaaatattagttaaccacataattaacattattgtttatatgttttaactatgagatagtagcaaataactttatttgagtataaagtaaaaaaaactttaatttaatggattgagtgacaaatctttttctatttaacttataaaaaaatagcgcttaacgtaaagggatcgattattaaacaaaaaacacaccacgaacccttccaaactttttacctcaccttgcatcggttt

SEQ ID NO: 31779 - DNA, 796 bp, Arabidopsis thaliana landsberg
cgaatcacttcaaaaaataacttttcatagttcatgatcgatacatgtaaacgttaattcaattatagtatttcatatgttccaccatctcactattatattggtcatttgatatttcactactaaaccagataactattgttcttaccagatttcacacgtaatcattgtattttctagaacatcgaacgaatatagcctacaaatattatatgatttagtcaactcctgttgaatttcttctaaatattgagataaggtaaactaaataacatctgaaatcatggcaaaattcatgccttcacagaacttgggaaaagaacaagtcaaactttaaaatatttgtgtaattacttgtttattaacatttgttttaaaatattgtactccaaatagtcaagttgatacataatgccgcttctgcattcattaatcaaactaaaagcaactggcttagccgatcataatttcaaataatagtagtgaagagtataacaggaagaaaatgataatctcctatgaaaaaaaaaaaaaaaattgataatctcctttatattttataaaatagaaatatagaagataacaagaaaacaagaactataaaaatataatttagtacaaaacaagagaatatacctcccagtatgagtggatattcctaatcaatagttgataaatctatttatttatcaagttgggtttcgttatattcttggaagaaaataagttaacgcgtataatttgagttctggttttaaaaagaaagaggtgctattatatagtttggggaagatat

SEQ ID NO: 31780 - DNA, 842 bp, Arabidopsis thaliana landsberg
  unsure (1)..(842): unsure at all n locations
gtctaaagatcttttcaattccaaaattaattccaaaccaatttagcagccttactataggagtgaactatctgtgtctcccctcctctctttgcacacacacattatatatattaccacaatggctccatgattcttaaagatcaaaatcaaccacacagaagagaaaaaaggaagaagaacaagagtttttttcttgggcatatcccaagtttcctttttcttttctttcattcttctttcttttaatgtgggttctaaaactccattaaaattgatcataatgggaaactgtttggtcggaagaaacaatgaaaatattgctgaagaagaagaagaaaaatttgaagaagtgatgaagaaagattacaaaagaaaagatcgaaagttgaagattgttctaaggagagatgagttagagaaaatcattcttttccagcttaatgcagacggtgcatacaaaggaggagacgccaagagggcttcttttggagattctcttacagaactagaggcagaaagattggccggagaagctgctgctgcggtggcaaaagaagagaagtctagccggagattatgtcgaaggnnnnnnnnnnnnnnnnnnnnnnnnnnnnaatggcctgaagaagtatagtcctctgtattggattatattttattctctcattattcgaggttttcaaacattctatattacaagaataaaaaaagggaattgctttttgggattatgctattgcctgtgtttattttaccaacctttttgcaagattttttttttttgcatatgaaaacttgggtgttggcaatgcggcattggtgtattaccacaaacaatc

SEQ ID NO: 31781 - DNA, 977 bp, Arabidopsis thaliana landsberg
  unsure (1)..(977): unsure at all n locations
ggatggtgtcatcggcctgacgcaggtcgtcctcggtatttccttgttcttgagcaggtccttggcctgctgcagcgcatcgcgacggatgttgcggatggcgatcttggactgctcgccctcatgggcgacgtgcttggccagttccttgcggcgctcttcggtcagcgccggcatgttgaggcggatgaccatgccggccgtgtttggcgtgatgccgatgtccgaatccatcagggctttttccacggcgccgaccatggtcttttcccatggcgtgacggtcagcgtgcgggaatcggccagggccacggtcgcgacctggctcagtggcgtttcctggccgtagtagggcaccttgatgccttccagcaaagcggtgctggcgcgcccggtgcgcangcggcgcaactcgtgttcgagcgcttcgatgcttttgcccatgcgggtctgggcgttctgtttgatctcgtcgagcacggtgggctccccttaaaacgtcatatccgaccgagtattgcaatgcgatggggcggatttagtcacacgccggggttggcgaccagcgtaccgacgttctcgccggcgatgatgcgcgccaggttgccggggcaggtcatgtcgtagatgcgcaagggcatgctgtggtcacggcacagcgcgatggcggcggtgtccatgaccgccagcttgtcctcgatgacgcggtcatagctgaggcggtcgtagcgcttggcatcgggatgcgtggccgggtcggcgtcatacacgccgtccactttggtggccttgagcagcagatcggcgccgatttccaccgcacgcagggcggccgccgaatcggtggtgaagaacgggttgccggtgccggccgcgaacagcgcgatgcggcccttttcgatgtggcgcacggcgcgccggcggatgaagtcctcggccacgtcgtggatgggaatggcgctcatcacgcgcgcgta

SEQ ID NO: 31782 - DNA, 1002 bp, Arabidopsis thaliana landsberg
aacatgacatgctcttgctttatctcttagctcttcaaatgccttcattgttttttcatcaaatcctccagcaaactgaacaaaagcaaaacagattttaagaatttggacaaacaaatgttgtaacagaagatgatcaaggtatctataactttacctgatgaacacggaatgcgaatcggacgccttgaactataagctcttcctcttcagggccaccaccttcaatagcctctagctccgcggatactctcttcatatacttcatcgctagtttcacggatgccagtttaatctgaaatcacattcataacacaatacactttactcaaaactttcacactttaccaatttcaaagttcctcaagaaatatgagatttgcatgacatatttagttgagcacactacacttaacatcaagactcaaagagtgacaatgaaggcataaaaagtcttcagagaatctgattccattccctattgaatttgtctattataatcccaaagcaaacaacaaaagaaacagacaagtagatacaatagagaaaatctcgagaatttacaggcgtgcacatagaaaaaccccacaaaacattaaagtaaacaatgtattcaagtttacttttgctaaatatttgtatttatctgaatttgtcatgtagtacataatagttttaccatgtaaacaagcaaaaaaaaaaacaataatagagtgaagaacagtgtcaacaaacaattttacaaatgtcctgccatcaacaattgacttttatcataaaattggggaccatgagaattgttgttcttgtctatccctctatgttttctatattccaaaatgtatttttttcatccaatcaatatgcaataattgcaccaaaaaatgggaactaagtattcatcataaaaacattaatcagaaccaatattcaaatcttacaagaaacacagaagaaggatcaataatgtaaatctcgagataaattatgtttgtaaaattg

SEQ ID NO: 31783 - DNA, 1007 bp, Arabidopsis thaliana landsberg
  unsure (1)..(1007): unsure at all n locations
aatataaagatcataacccaatggaaagatcatctctagatctgtggtaactcaaaaatttccaagaaaaaacatttagttatgacattttggtgataaggtccatgactaaagagccggtggatattttttttacttaaagtgtgttactattaattctttttgttgtaaagcacaatcaaagttcatgagcctacatggtatatgaattgttttgaattttccatgcttggagttttgtgggattaagattcggactccatcctccattagtcaattggagaacatcatccgactgtttcatcgatttccagatattaaggccataaattatttgaacttacttttatatacttcattctttggtctccggattgatttacagatatcttcaattttcatctccactattgtgcactataagactatcaccaattgaagtttattaaaatctatctatgtgtcaccaaaaataagtcaactgcgatattaaatgtttttacaaaagtaggttggcaagcaattaacaccggcaaattaaatacaacaatcataattcatcatttgtatttgatttctttttttttaaatgtactcctatttttttaactttttgttcgacaagtcaatggtaagagaaattgtaaacatagctaatacgatgcggctgaatatgaattctttgcgctagattatctgtctttgtgtttgcacttcaaagaactaaggataaagaaaaagaatcaaattcctccatgtcgttctgtatcgcctccatgtacgtaaagaaagttggtcactcttacgtaaagacaccatttttaccaggtctgagcaatttataaggaaagctatttttcacttgccttgtagtctattaaatactagggatgtttcagcatccgcanacagtaaataagaaaccgcatgacttgcatttaccacctttatactaattattaaactatctatttatgctttcttgatattagcaatcagcacttttg

SEQ ID NO: 31784 - DNA, 660 bp, Arabidopsis thaliana landsberg
tcttgatgactacgaagagcaagcttctgttttcttcacttgatgatattgttcttgctcttgaaccttgtgctcgggctttaggggaccttcaatgctgttttctagatcagactcccagatgttgaggaaacttgcgtagatattgtcgccatcgagagaatttgatctgcaaaatgtgcaggagaagtgagtttttggtctaggaagtttcttacctgctcggataataatggacttgagactgtgaagtgttctatgaaagaaactgtttgttttctgaaacatctctcttcacggcaactgatatgtttgttcttgtgggcagatcaatgttctcttcacatatataaatcattttccagtcatagaaatcaaattatatgcttcatgaacgtgcgaggctcaccttcgtttcatagtatggcgccatgtatatgttgtgtcaatgactcagcatcagaaacaataaagtcataatctgtcttgtcttagaataaagcgtctagctcgtgtacaggagggccatttccatcagataatatgttattcgatacacagtacccacattcccgtggtgcaagacgcaagaaaccgagctatacgtcaaaaatcatgtatcatgagtttgtccattggacttacatcagggattcctct

SEQ ID NO: 31785 - DNA, 1538 bp, Arabidopsis thaliana landsberg
taaatatatactcattttggagattgatgaaaactttgtctgaagggggcaaaaatctacagaagcatatatatttcttgaacatatatatgttcatttgggtttctggtgtgtctttgattgttcattgcgatgatataattacggttttgggataaaatcaaattcgggaattcatgcgttgacagagtacaaaatgtatccaaaaattgttaaagtgagacttacctgagacatagactagtgtaaaagagacacctgttttagatatcataatttaataggggggttttctgtttcgattgatgcattgtattccgtgatgatgttgatggtgattcatatacatacttaaagtgtcgtttattgattcgggaaggatgcaacaaataagtttatgacatggccgataagtgagtgactaaagctatatgacttttctttgtaaggattcttaaaagttcaaaactcgtagtctaataatatcctttcccataacacctgtccctgagtttgatagatagttttctttggaccagtttatattttaaaatcatatattgtagaaaattcggtttaaatgtagctaagatgacgcagagaacttctagtagaccaattaactaaaagtctggtcacatacgagagagtgtatatttatctctttacaaagaagccaattattgagtttgaaatgttctatcttccacaacaaaatgattttcatgtggaacaacccatatatattatggccgaaggacaactacaccacttggatagaaaaaaggagttcagcttattatggcgaaaagaaaaaaaaaggtaaaatggcttaaaaggctctcagataaatgcaatcaaatgcacaatagactggatttaagcaacgcgatggaagttgcagaatcaagaacatcatcataagataaaataaacaagtagataaagggaaaaagaaaaaaacattatttatcagacaccaaagtgatctcaattacactatatatatatatatatatatatatatataaaagatgatgaaatttgttgtaatggattaacaataatctgattcaaccatatgaaatacctcatcaatcaaacagccgaatctgaactctgagatgaaactttaggtgccatgttcatagcaacaagcttcccgtccggtccagttctcaattcactcataccagttacaggtaagccaactccatggtactgcggcggtggagcctccgtgtaataaacttgtttccccattcctccagtgtaagtcacctgagtatacgctgatgtatctggtaatcctactacttgtcgtggcggtggtactgcggtgtattgcggtggtggaggaccagaggtaaaaggctgaggaggaggaggttgttgttgttgtgcaactttggttcctataggtgcctgaagtggctgagccacgttgtacggtgattggtgtggttctctgtaagtatctgaagccattctctgtacctgaggatagtagccgccttgatttacttgtcctgtaagta

SEQ ID NO: 31786 - DNA, 1818 bp, Arabidopsis thaliana landsberg
atcttttttagtgcttctccgcaaaaaagaaaatcttgttaatttccattaccatcctcacaacgctgttctctcatcgaaattataggaacctctcccgttcaaactgcagaatgtaaaaaagaaaccagaaatcagtacttttaaaaggaacattgtttaaaatcaaacggagaaaaaagagattatacataccaagctagctagctagggagttttatctaattcgtgagtttcttcagaatgcaagagatggatatatataggatgattaatgattgataccaaaaataaagaaggtgtgcgaatgtaaacagcctttgctcatcgtaacttgacactctgccataatatgcagaaaaagcatgcgtctcgagagaagtgcttgaatgcgaacagcctttacatcaacgtgtttattctgcatgaatatgaaccaaaatatgacaatatcaatgaatattaaagaagtctacgtcgagccacgagccatgacttttcaagtgccacacctctgtttatagcccaaagagattactttttttcttttatcttcaagattagtgtcacaattgtataacattccttcacaaaaatatgaaaactttccacataagaggattcatttcaaaacatgccaatgaaccgagtgctgaagaacttccaaagaacaaatctttgcttcagacgcaagaaaataaatatgtcgtcaagaaactaagtgctaaatcaaatgtggtagctgaaacttgcttgataaatcatagcgtacaaaggtggaaacttcaaacataagttcaattaccttacaagagcaaatcttattttgaaaccaagggagaaactaagatatcagaacaccaaatgcctaagaactcaatgcatcaaacaacatcttcaaatgatagaggagttcttatagctgacaactctgccttttcagtatccattagagcatctagctctgtacacttttgcttcaatttcagtaaagtttcctctgtttcttggagcttggccaaacaagaccgctctttctccttcttatctcttacttggtccaactttttctccaaccagtccaccttgaaccccgcatctttcaagtatgtcagcgcgatgtctgcttccacaagatcttcattggagaactcttgcagtgactggcacagcgtctcaacaaggctgagaaggaaatccatgcatgctttcctcagatattggttctttgcacggaattctgatgcaatgtcagggtgtctttcaaatataagtctcacagattctacctgcaaaagagagaaaacataattttacaatgcatataagataacatttatttagatatttggaaatagacgaagacatgatctcgtctcttgtaaagtaacaagaagtttgcagcattcttaaatttcttacctgtgaaggaagaacttgaaatccgttgacctccatgctttcctttctgggtgaagcttcctcaagcaaatcactagacaccgcaccatcatcattaagcttaatctttttcagaggttgggttggatcttcagattcctctgactcatttaaggggtcaatgaatccaagagcatctacctcagcaacaatcatgagttctccattaactagaaacccttccttttcgtcatgaagtttggtaaggggaagcatatataggaaaccccaaccccacatttcctgatcaaaccagcgatgtgtttctgtaacaattcattcttcgttaaccaatatcgaaaacagtactccttatcagtgttgacaacttggcaaaatatagagtgatgaatatca

SEQ ID NO: 31787 - DNA, 1711 bp, Arabidopsis thaliana landsberg
ggtcccatgtttctttgcgcttggtgcacataacgcagtctcccggggctcctctgattttttttattatacgatctgctgtggctaagcgatcgtgggctgcgagctataaacaaaaaggagtacttaggcttaacatgggtgaaccaaactgctttgtgccaagctaccacattggatgtgcgtcggctgagattccaagtctcgtccttattatacactcaacaaaataattatatcattatcgactattatcactttagctcttcctttccgctgtaaatttgtctaataaacattataatatacacttttgtgctttctgctaaatttgattacacgaaatttctcaggtggtgtgacaaaaaagccaatgatttcatttctcaaggtaatcccctaaaccttaaaaaaattacatctgagaaaagaaaataaactatttttattacaacaaccactcgtatatatgtttctctataacagatcctgctacacactccacaatcgaaactttcagacaaagaactgctttttttttccttcaatcaaactcttttctcacgaatcttcacatcgatcctggtcgaaccaattgacgaaattaccatcgttaagctctctctaccgtcgccggcgccacaccggcatctttctggcgaacttgacggaggctgaattcaaactgtacaacgtaatttccccggagaccatcaattcccgatttcgactaaaacccagaatttgtttttttcccggcgaaccggatacgaattctccggctaaccggagatgaagttcatggaattagggtttcgacctgacacattctacactgtggaatcagtaaggtagaagacagaaccaatcgtctctctcaaaatttcgaatcctctgttttcaatcaatctcagatcttttgactctgttttgttttaaaattcccaggtctgtgtcttctgatttattgaatgatcttgtaatccaagtcaaatccacaaaataccttcttcacaaggtttttttttcttgttttgtgttgtttcttataacatttcatgttttgattctgatttttttgtgtttcttggcaatgcaatatacagtttccgatgttatccaaatgcttaacgttaaagaacttagtctctttacaagaaacagaaacctcttaagaacagcaagtcattcaacttgttgattttcccggtgaaacagaagcttttgagctttgtgctaagttctgttacggcatcacaatcactctctgtgctcacaatgtagtcgcggtacgttgcgcacagagtatctagggatgacggaagaagtggagctcggagagagggagaatcttgttcagagacttgaacttttcttgactacttgtgtgttcaagagttggagagattcttatgttactcttcagactacaaaggttttgcctttatggtctgaagatcttgggatcacaaaccgatgcatcgaggcgattgctaacggtgtaactgtatcccccggagaggatttttcgacacaattggagacgggtttgttgagaaccgatcaaggataagaagagatgaaatcttgtgtaatggtggaggaggaagtaaggcagagagtttgaggtggtggggtgaagatttagctgaattgggtttagatctttaccggagaacaatggtggcgataaaatcacacaccggaagat

SEQ ID NO: 31788 - DNA, 1039 bp, Arabidopsis thaliana landsberg
tacggttattgcctggttttttcaaacaagacttgagctgtatgtttggttggtgaaccggcggtgcttgctctagtagctggttcaatggtttagtgatgggtttgtctgtcttgggcctcttggctttcttcagttcatgatctccggatgcagaagaagctttcatgtcacggagaaagtatgtcacattcacattgccaaagagagatttgcttcctgatacatatcttaaggcagtctgcgcatcgagtttatacaggaagccaacacggcagatcgaggatttccaggaaactctgatggctgattgatccaactgtccaaagcgtccaaaccttgccttaagcagatcaatggaagggagagatgtgccaggaggaaacatcatgaccagcattgttggctcaaccaccttaactgatggagctgttttcttcccggtttgacctctggctggttttgcttgtaccaccctgcttggctctcttattggttttatactatcctttgcttctcgaatgatcttcttttcagaagccattgatttcaactgattagttttcttcagcttcttagctgatgggatttcatcttgacgatcagaagagagccgtttttttccagcttttgatgggtcttcggttctcttcactgtcttgacaggttttgagggttttgtgtctctggcattttcgacagtagcatcagaggaagatacagacaagcttttctggtaattaagtgaacggaaacggagaaaaaatttcctagcagttccaaaagaagcaacggataaaccgtggaaagggtcaagagagagatcttgcagatggctcaacagctgcggcacatcggcttccatataggtttgtaaatgcgctgaaccaagctgggacaatttcttggccccagcttccccagaatacaaattttttctcttcactggatggtcagaatcaggctctttcttctttttctttttcttttttggctctgaaggaggattctccgagctcatttcacttgaagatcgttt

SEQ ID NO: 31789 - DNA, 694 bp, Arabidopsis thaliana landsberg
aaaaacagtgtatattttatcaaagtattatcaactataattggttccagatctttaaagattattataagatcaaaaaccttttctgtagtttttgtgtatgaaaaaaagattaatagtttagctagaaaacctttaggaaatcatcttttatgtagtcaatctgattatgtacacaagaagtcaataactacccaaaaaaaaaagttcaccaatttcaaaatacttctatagttatatttcacctagaaatagcatcatgaaccaattatcaaaataagaataaacagaatctttattaaaaaaaagtaccccggccctttatacagtcttttgtgcaaattgatgatggtcgtatacagtgtgcgctacggcaaggagacgattatattgattaaaaaaacttctgcatacagtattgcgaagttaacgtcgacgtttgatatgtctttgtggatagcgattacatgtttaagtcaattgagtttaagtcccatagacgcgtttatgccagtaagattattaaatttgagaaagaaaaaatataaagggtagactagttacgatttatgcgtattcgtaaacctattattttcttgctatcacatttaatcttgtgtccaatactttgtaccaagattagattggagactgatttttttctggttattactgaatatcacactaaaatttg

SEQ ID NO: 31790 - DNA, 1521 bp, Arabidopsis thaliana landsberg
acacatttaatgtttgcatagaaaagtgaaaacaacacttatagtgaaaaaaataaaaaacctttaaactacacttaattagaaacaaaggaagtatatatatatatatattattagttcttggtattttatactttttatgttatagattacacataatttgatcattttttatttatccgtttttgcaccaactagttaccaataaaaaactattgcaaaacgtaacaattttcaaccgctaaacaaatcgtgcaaaaagtttaataagcttgaaaccgcaaccacccacttatagcaaacttccacagtcgcaacgattgctattgcgtttattcatcctaaaatcaatagttggttcagttgatatttaacataatatttatataaaattacaagaaaacttactaaacttttttaaaaaacaatataacataatatagtatatatataaaccctctcctcacctctcacatgctctttcttttactctctagatcactcacatagttacattctctccctctctctctatcacataggagaggaaattaaaactctaacaacaaccaacaatggtggtcgctagaacattgttctcaatctcagcaactctaatcatttttctagcactctttctccatgtaaatgcgtaagttcaaagattcacaatgtgatctccgcttttttcctatctttcgaacagagtttcttatattgatgtgtattaaaatgcagagttcaagaaacaagggaaccgaaacatgagagctcaagaaatacatcaacggtagataagtgagttctcacaacagctttaagtgtagatttgatctcagccgttcagattctttatctatgataataaaacgttttgtttttgcatgttctgttttctcagtttatcagacggtgaatggcatgaacacgcagttaaagacccagaagaaatagcagcaatggtcgatatgtgagtctctcactattattatacatatataaaaaaaggaaaacaactttattagatatatttcgtattagtaacgttttagtaattagtcaaactagatgatgctttaactttactaaacctatgtgtagaccaagaaaaacattttctacatctatgtaaaaagttagttttgttcttctctatcagaactttttttaataaccattgtgatccacaaaatttaaagttatcaatatatatgactgaaatgtacttttatttcctcgttcttgttctgccaggaaacaaataaataaacatgtgaaaacacttctgacataaaaacagtagttttattgaataaaaccacaaaccgtgattcccatttatacctcactattttcttcttaagatccaccgacgacgcatttgtattaatatttacatacatcctctctgaagactgataattaacaacattttttttcattttcggaaatttttaatatcttctatatattaaattatatatatcacttactttacaattaccatttttaaattgtata

SEQ ID NO: 31791 - DNA, 800 bp, Arabidopsis thaliana landsberg
  unsure (1)..(800): unsure at all n locations
ctccgatttacctcaaaaattattcacagttttgtctgaaactatatatcgggaccattcctttttacctatctaataatagatccggcctattttacctcaaaaatcaatagactcacaaaaaacaataacatcaatgtttggttgtgtagaggagttttgactatctaataatagacccagcaatttaacaccacttttgatggcttgatgaattcgatttccaacattagttaaaatggcgtaatgcaatagataactagaaagaacaattcatgataaaaataatttgtaattaaatttaaaaaattatcccttgaaatcaatgaaaaatttgaaagttgtattcaacaaattcaacgaataattatcccttagtagagattaccaaaagagttgtattcaacatattcaatgaaaaatttgagaatttcttttaataaattttttattgtttcttatttctaaattgctaaagtttgtaactaaatatttagtggtcattcatattcaaatctgcataatgaatattgatataaaaattgccgactagtgttgatggcattatctaacctaaaactaatttgtttatgacggatacaatatcaaatcatatatctgccatatgcacgtatcttaaactgagtaacgttgtaaagaaaaaaaagaacatagatattactcaacacaactgcgcggacattttcttatcataggaaaataagataaatggatgtcatttctcgagcaacgttagctatctgtattcatcaattnggccagttatatatatagtagta

SEQ ID NO: 31792 - DNA, 731 bp, Arabidopsis thaliana landsberg
gctcttaccttgatcaaggagctctgtatcacaagaagggctgcgggatattagaacattcatggaaccctgcttcttggagaggcacaagatcttctcacttcatcaaatcccgataggatagggccttaggtaatcgttcctggaccgaactgctccctcgaagtcgatgcgacattctaccataagagggctctgatcactggccattagtaacactactttggtgcaccaccatagaagaaaaaaaaccatttcggtttgtttctcgtttaaaagaaaaagaggagattcagttacttgtaaaagaagcatgggatctttctcgccaagactctgttcttcacaagatcagtcggtgtcgtcaaagtattattcaattgactaaggagcaaaactccaatagtgcaaagacgattaaaacagctcaacaggctttagagtctgctttatcagcacatattccagataattctctcattgcgtctattactaaagagttagaggaagcttataaacttgaagaattattctggaagcagagaagttgggttcaatggctaaatacactgtgtacttccacgctattaccaaaagtagaagaatgatgaacaaactctctgtcattgaagatggagagggtcaggagtttcatgaggaagaacagatagcagccactatatcgaactatttccaaaatatttttacctcaagtaacaacactgatctac

SEQ ID NO: 31793 - DNA, 584 bp, Arabidopsis thaliana landsberg
  unsure (1)..(584): unsure at all n locations
ctcacatgcgtttttgctaataacgattcatatcttatatattaatccagcttaaataagcaatgtttagtgtgtacattgttgctaaacgtcaattttaaatataaaaaacaaacaatatatatgctactaattacttacacacatttgcaatgtaaataagatcatttgtagtgatcatcttataatatacacaatttcatagaatttataatctcttgttgtttttttctctcaaaattataggtacgagttaacaatattattaatcccaagctttttttcttcaactgcttttagaaaggtgatcatcaacaaaacaactcaacgaggaaaataattataaaaaaacagagtggaaaataataaaacaaagtaaataatatcatatttatctctctctctctctctctccaccgtcgnttcccattgattagtttctctctctcttttcctttgtctccagagccgatgataaacgatgttggttttcaccggaactgagggaaattaagctggtaaacatggcgggtgaagatgtttcaagcagtttccgagctttggtggagaacgcagaccggaaa

SEQ ID NO: 31794 - DNA, 618 bp, Arabidopsis thaliana landsberg
gtgaatgatttatagttcaattcgagaaatgtttgaagttttattagtagtttagttctacatgttattaatattcgtatttttttgatataaatattggcttggttactaatgggaagaaatcaagctttggaagttcagaagaagagtcggtgatggttgattgttttgattagtaggtaacatttgactggttggtctcacgtgttttctttggctttgttctgatttggcttggcttgatgactatctcgagaatctttattgtttccttgtgatcggatcttcgttttctgtgtgtgtgtataaatactacctctttgtcgccaattcatttaaatagtgttttttcttgcagaaaatggcagttgggtttttcttctgaattattctttttgatgagtaggcatttgaggatctttttcatgtggtaaatataatattgaattttcagatagaagtgttatgtctatatgaaattatttgaattatctttcattgagactaggcaattaaaaaaaatgagtcttttttcctgggaggcttgattaacttacttggagagaagattgtgatcatatctgaaattttgtaggaatttttttatttataaaagtc

SEQ ID NO: 31795 - DNA, 1022 bp, Arabidopsis thaliana landsberg
  unsure (1)..(1022): unsure at all n locations
gcgaagaaaaaggtcatggaattgcagagtttgtctgcagggaggcatggctcgaatgttgaggttatgaatcagacaggtggtgattctgacagtgatgttgaagaagatgggaaagatgatttgttgtgtttggatacagatgcaagtatgttcaaggaaagggtaattgaaattctgagaacaaatgggttcgaagagaagagaccatccaagctttcacatcgtgagttgttacatttgctttctttgtttaaccaagctggaatttttttccatgatattacatcattacaaatggatctacacgaataatgataagttttctttaatgttttatgtttttggtcgaaccctttgaatttatttttcttacaaattggaagattaaagtaaaagctacttaatgtagtaatttcggtaggggaataaaatcgtatttttgttctcttggcagctaaacaaaattgtatttaaattaggaatgtgagaattccccgccatgatcaaatcatgaagatattcagatatgataatttctgctattcagaaatgaatccatgataacatctggagttaaaattaattagatactgtanaatattttaaaatccatatctgccgccggcatcttacaaaaaaaggtgacaaaatctgagaaaatttcctcgattttcctctgctaatacaaaaaaaatagcagaaagaaaattcaaatggaaccaaaagaaagtgtttcgtcggatacaagcaataaaccctaaaacacaggttttgctcgatctcggctgaaaatcctaatactaaccgtagatactataacctggatatggatattggtgatggtaaggttgcatcgctagtgactgagaataataaggcggatgctggcgagagtaacaattatcactcggccaataactgttgtaagatggtggctggccgtaataagagtaggagttgtaatgaagattaggttcatgtggataatgatgctgatgatgatgatgatgtccctggag

SEQ ID NO: 31796 - DNA, 687 bp, Arabidopsis thaliana landsberg
  unsure (1)..(687): unsure at all n locations
ttagtaaagtatcgtaacatatctcctttcaggtcgaagacatgtgaagtattctgaagccaaaagaaaaattcacaagtaaaataatgtggttattatcttggtcattttgttttcacattttttttgttctcctcgtcattaaagtcgaagacacacctttattttgggcaattcttactagtattcacacttttcattgcacatttgcactacaatttactttttaacaaaaataaaatgttttgataagattaaaatatggcaatttactttttctttaatttttttgggacaacaagtgaaaaaaaaagaagagggagatgaaatcttgatatttcagttttaaactaatattatttattaaaaagttaattatatgtaactgaaattccgaatttttcaaacacattgtctttcatcgtatcattaagcacatacttcatacccgcataatcagagaaaaatacaaacatattatatcaccaaaatggattttagtgcatgtatttgagtatatatagcctagtcaagtttatacgcttagcctagtcaagtttacacgcttaattattaaatccgactgattggatgggttcttcttctccttcctttgtcatgttatataacagnagactcaaaggtgatccgaagctgagaaggaaagagatggtaaataattataag

SEQ ID NO: 31797 - DNA, 1197 bp, Arabidopsis thaliana landsberg
ttttaaaatattaaaacaatttcgccattctcccgggcttgtgttccatttactggggccttttccattgttttgggccgatatttttttctttttatctactgggccttcttagttattgtgcagattatctggaaactttttcttttcatttactgggcctttttaactagctagtacggcggaatcgtgaaaaccgcacaagccaatttatctaagattttggattttgccacccacccaacttatcgtgaaaaccgcaccagccaatatacacactcagccaactattaatatacgatcgggaccaacaggttttaatttgtacattatagttcgcagattacagaattagaacatgtggtagtaataagagtgggttttggtcaagttactgtgggaaatgccacgtagaaaagggtcaacgagtatgtctaatctccttccatcaaaagtgggggtttgcttttaaggtgaggaagagacgaatgaatgcgaaagagttctgttttagtctacgtaaaacaaataaaacaaagttcctttgcatgatttagacggtgacctatgcataagccaacttattatctatcattattgcagacagcaagaatatcaatgatacacaaaatacatttcactatcgatcgtttcaatggttaatgccaaaaaaaacaaaggtgagcaataaaaggataagcaagtctgtgtaccctttattagctcctctttcgttcgccacccacgttttcttttccaagttttgttgtggtacgtaattaggtattttagacataataagacatgcaatagaatatagtgagcaattagcaaaggtggctaatttctttttatttcgtctacaactcatatatctatacatctttaaagttataacgcatctctaacgaaaaaaatcgtaaattcatcttagataaatccgtaacttaaattaaaattgagaactgattgttacctatgtattacgatttacgattactctcataagtacaagatttgtgattccttgcttgatgcttcaaaccgaatttaaccacagttcttagaaattatgatataaatcatcatcactaccaacaaatcatatacgatatatcatcatatgctctttttctttttatcatatgattacaccagcaaaataaaccctaactttaatatctattaaaaaaaaaa

SEQ ID NO: 31798 - DNA, 1080 bp, Arabidopsis thaliana landsberg
  unsure (1)..(1080): unsure at all n locations
ctacgaacatcttctccggcaagtatttttcagggatagttgttcattgtaggattcgaactgctcatgctgcatttatgaaattgagaaaatatgaattttaacattttttttttattgtatcaaatgtgagcgttgtctgaataaacaacaagacttaccatttatctacaagaacaaatgaacggagttcacagttgacaaatctgcaacacaaaaaaagaatttgagataatgacaacataaataatagaaaatcatcaaaagagagaggaggaactcttactttttagaaatttcgtttttcacggatggatcacaatcgtttccaaatgagtttaatgtttgatacaagaacccactatgagtaacaaccgcaatctccttttctttccttgtactcaacctgaattcagtaattagtatatcaatcaaagttcatgccaagattatcatagaacatcatgcacatagagatgttaagcattgcatatattcaccagttaaagaacttcacttctctggtcgcaatatcttgatcctcctctgtgatggggggcttccacaagacatctacatcagtttctatctgtatacatggatatgagaacatgtgaaaacataagaaaaaacaccaaaacaatcatagtttctatagattaggtacttgccaatgaaaaatcaatcgcagggaataattcacggtacttggtgatattgcttcttctgtcacaaggatgaacaccctgaaccaagaacattgcaaaagttttcatctcaagaaaatgccattcatgcaaaaggtagaaaagtaaacataccaaatgttctcggcaggattcaaccacaatgaacggtggacaatttaagcttgatatagcaggacgatcgctgttcccagcacctgcggtcataagcagaggtgtattaacaccatctttgtaaccttccccaccaaaagttccgaccgctgtttgcaaagtcctaaaacaaacaagtattgaggtaaatacaaaactgcttatcaaagaaagaaatggcttaacacatatcaatanggacgtttaactcaagagacta

SEQ ID NO: 31799 - DNA, 239 bp, Arabidopsis thaliana landsberg
atctattcaaaccaaaccccaaacctaaccttgactcatttaaacaacacctctactaaactagacaattttttataaaattcaacttcacccacatatttacttataactttaattataacatttatctcaaagataatatccattactatcctataaataatgactatattctatctatataatacaaacacatccctctaaacgaaaaaaaagcctatctaactcaacacatctac

SEQ ID NO: 31800 - DNA, 579 bp, Arabidopsis thaliana landsberg
  unsure (1)..(579): unsure at all n locations
gtcatcatcatcatcatgacatggagctcactctctgtctttcatttaatttcactcccttcctaacacatggcaaatcctcaacatcattattcaccgttgattcgaccaagtgagattgagcttggccgttagatttgagtatatcctagaatgagaggaacatgtaatgcaaatgtggaccctttatgtcatgtttttatgtttcttacactatgccaatttcatttcaaggactagtcattttactttttccacatgcattgtactaaaataaccaaacaacttaaggtgagtaaatttagcttaagcatgttactgtcttgtggtttaaattaccgtgatgattttcatatgatgaatagtatatagatatttgaacctaaaacctatggaaactgttttttaatataattaacaacttcgtagaagttttgaagaaatgaagatagttttaaggttattaaagttatataatcacatagtattaataatcgtcattatgtcattttttaaatctacaaatgcagnaattagttaatcttcactttccttctcgagacaagatgttttttacta

SEQ ID NO: 31801 - DNA, 995 bp, Arabidopsis thaliana landsberg
gtccgttcttgcacatccagctcacagtgtgcagccgcaatttcagtttccgcgtatgttcgatacattttaggggcatgtcccttgccgccaaacgggttgatcaggactttaagtcgcttataacgctgcgcattgccgtatgcaagagctagtagttttgacatccattgctcgaccctcgatttctcttcagcggcgatggggtattgcagagcggtaacggcgatgtcatctttgcctgcgggctcggcgtaggtaatggtcaggccagctgacgatacgctggtatcgagcacgttatacagagagatggagtgtgtgaccttgttcgctggaaatagtcagcttaaacgcgcttttgtgtacgcctcgtaaatggcaaaaagtcgcgagcaacacgtactaggtttggggaccattccacaacatgtgcggtccgatttgcgcatgacgcgctcatctacaaagcgccttgattagtccagcagacgaccgcgactaccgtacgttcacataccgacaataagaagtgagtcgccacccaatgtgagggacactgattgtcccaccatcaaagtcgaatcatgaccgagtaaacgaaggtgagaatcggactgattcgtgcagggagagctattgaaggccattttttcctaggagggacaagaacataggagagagagcataggatttaaaacaaatatccaatgcgatcattcaggggtagaaatacagcgttgagttgtagaaaagaagaaagcaggagtggtcggggctgtgactgaaagatgaccactgcctaggtaaagtcaaccagagacaaaaaaattcccggttttagcggttgatttccaaccgaacatgaattagaaatcttattttatattaaagggagtaatgtgttgcttccagcctatatactccgtctagtcaatcgtagactgccactacaaaagtaacggcacatccgacggctccgttcctaggtatat

SEQ ID NO: 31802 - DNA, 1282 bp, Arabidopsis thaliana landsberg
gtaatagaagtaaaaccatatgattgaatataatatgatataaaatgtcgtaaacccgattactaaaaccctaacttgaccaataatctatctcctaggagcgcacacgatcggaaaagcacaatgtcgcaacttccgatcccgaatttatggagattttcaagtgacgtcagccctaaatccagtttcggagacgtacttggcaagtcttcgagagatttgtccggcgagtagcggagaaggtgatagtaacgtgacggcgatagacaatgtgacgccgaatctcttcgataactcgatctaccacacactgctaagaggagaagggttactgaattcggaccaggagatgtacacgagcttgttcgggatacaaacgcggcgaatcgtgagcaagtatgcggaggatccagtggctttcttcgagcaattctcgaagtcgatggtaaagatggggaacattttgaactctgaaagcttggctgatggagaagttagaagaaattgcagatttgtgaatacatgattcatcaacaacgaaactaaaaaatggagaaaataatctatttctgatctttatttatataagaaagaaaaaatttaatttgatgttattctttcccttatttatttctacatttttaaaactatagggttcttgaatgtttaaaaccttattctaatgattttcaattgatctgagtctgtagttgtttttttggtttgactttatatttatggttgtgcatgcaacaaaatcaataaaataattgcactatatatgcaaaaactcaaactccaatattgtaagttcgaaagaagaaataattcttttcaaaaaatgtatattgaaatttaaggttgataaagagacaagcaaagcaaaattctgctcatgtaaaagatagagtttctaagaatttagcatggaaacaggctaaagacgtcaagactcgatctcacgtacttgatactggaagcaggatacgacaaagtggacaattttgagattgttgcatccagtcttcaatgcagaaagtatggaaaacatgagaacaagaagaagtaacggttgcttccatcccaagaaagaaatcttcttgacatatacaacatgtgccaaacaaatccatgtcagggccaagcactgccacacatttgttatcaggatgcaatcttttggaaaatttggtgaaaagtagttggagtttttcacccatgtcaccaaacgattaatatatgaatccgggaagtgagtaaaaccgaactcattcatcacacc

SEQ ID NO: 31803 - DNA, 754 bp, Arabidopsis thaliana landsberg
cccacgcattgatgcgatttgggtggagagaacaatcggtaccacattttcattccacatacccatgccttattcaagggggtagacagaaaattcatgatgcaattcctgcaaagagaaaacacacaggattcaaaccttatgtgagtttggctaaagtatgactatattcatctatgctcatatttccttttagtagatttttttcttgtttttatcctttttggcaatgaacaatcttttgtgttaagaatattgtagcttctacaaccctttttatttaataagaattcacatattaatctaaaaaaaaaaaaaagagggtgagaaagagagtgagagagagaaagagagagagacacacatagatcgagacagcgagagagaaagagtcccagagagagagagagagattactaggcaaatccttgctgggtttgtgattcaagatgttgatctcgctaatggcttcatcaacgagccaagtcttacccagaattttgttctttaggtaatggtttatcacttcctctcccgtcggactaaatctatacccagtcggatctttcatcatctttttaaaatagaaacagatcgaaaagaaacaaaatgatcaaaattcccgggttcccgggattagggtttgagtgaagttttttcggcttctctctctctgtgtttttctttcttaatcaaatacaagtaggaagtgattgatgaaagagatagcgagccccgctggtatttatagaaa

SEQ ID NO: 31804 - DNA, 595 bp, Arabidopsis thaliana landsberg
tggactggcttgcaagccaagatatcaaaatatcatattatttttttccatcggggccttacatctaccgtacacgtgcacaggcgcacactaccaattttaattcacagaacaagaaaaaaaacaaaattaagttgtggtgataactaaacctttgaagacgtacacttatatctataccggaacaaaccaaggaagagcaacaggttgaggaacagtatcgcaagaaagcagaccggtttagggaatttggtttagaatatgtcattaaatttaactaaaccggtaaaacttagaaaaactagtaaactaaaaaaaataagaaacttatatatttcattggtaacaaatttagtaacgtatacttgattacaaatcaagtatacaaatcccatttgtctacttgattatgtactcttcccaaaaaaacgaagccgtgtgtattattgatcatgtagagaccaactgagtaagagttataggagatgaataatgtgcattatcagccaacataagatcgacgatggaccgagcagcagcttcagtgggatggccataacgaccccaaaaacatgtttggtctgtctgacataac

SEQ ID NO: 31805 - DNA, 1513 bp, Arabidopsis thaliana landsberg
acgattgcataaagctttttgtccccttctgccttttgttaactcacacttttcctctttttaccagcatttttctctgagtgggtttttatgttgcatcgtattattaacaaagtcctatagatcgtttatgtttttactttgcagatattatttgctatcacatcattttgcctataagtggatgtcacgtcaatatttcatcatatactacgctgtacaaagtcataatctcattctcaacgttacatcttcgtgtactcatcgatggttcactgtcacaatttcgaatattcataacttagagatgagatattgaagctaacaaaaaaccatataaccagaaaattccaatctttggaaaccaatttttatatatagaaaaggtttcgactagctgctaacaatatttcttcgtacaacaaaaaaaatcttccccatattattagatatcgtatggttttacataaaacttggagccaaaaccggaaggttcagtaatcgaacccccaatgcaacaaaaactacctaacgaacgttggcgggatatggttttagcggctggctgcaactaacgccatgtgttctatcaggtcaaggactcggttgctgtaacattacaagacccacgcatattttagtctttgggtattgtcaaatagaaaatgtgatggtaaagaaatgagagagactaactgttacctgtaaccccattcgttgtcataccaggagacaagtttcatgaaggacttgcttaatccaatcccagcttagcatcaaagatacttgacctgaatttttttggcaatggccacaaccttttgagtaccaagattttaaatgatccgctacaagatttaagagtgacataccttgaatctccaagaaaatcattagagacgacatcttcttctgtatatccaagaatgcccctaagtggtccttctgatgcaaacctgttagagatttcaaatcaaaatcatgagatgttattacaagttccatgttttattcatgtatagagaatggtacgcaaattagttgaacaggttttgagagtaatactttatggctgccttgacgtcttcatacgatgcatccttctcaagtcgacaagttaaatccacaacagaaacatttggtgttgggacacggaaggccattcctgttagttttccattgagttccggaaggaccttaccaacagcctattgagacaagtaaaaaagtcatggcttaaatatgattccagatgctatgtttatatataactgtacaaatttgggtacctttgcagcgcctgttgagctaggaatgatgttttgacttgcgcctcggcctcctctccagtccttcattgatgggccgtccacagttttctgagtagctgaatattcaaaagcaaagaataagattaaaaaaaacacatagttgagtctcgaaaattcagtaatatacagtgacatataacaagagggcacaaggatcaaatacatgtggtcgcgtggactgt

SEQ ID NO: 31806 - DNA, 527 bp, Arabidopsis thaliana landsberg
tatgccctgtcaattttaatttagtatcattaatttgaataatcatatatgtatatatttattaatctaatttttattgtatcaaccaatttttgttgtgtgttgttttttcagaccatcgtattatggtgtagtatataactttgtcatcaaagtctccaaaatttttttttttttttttttttacataaacttttatactacttgtactaacatagttgagtctgtctacaatcagtctatcattaagattgcttgcatttgggatttgggaacacacatgaaataattcgatttcttttataaagaaaggcatctatattatgatataaaacatacctctccatctataatactctacagcttgcagcttgctgtctgcaagtgttctgtacaacgttacaaatacgaatccacattcatttaaatttttttataagttcataaaacatttctttgtttaccaagatcaaattacaggaagagatttgatattttgaacctgagattcacaatctaattagtca

SEQ ID NO: 31807 - DNA, 832 bp, Arabidopsis thaliana landsberg
aacacaaagctttctggagctttagaaatgtgttacaaaatctgccaaatatcataaatttagttacaaaatcctaatctacaacttcaaaatcaaaagaatcctattgtcgtttaaacatcatcgatgttcaccactgtcaatttcacatcccggtgttctctaaaacataacgaggagacataggaaataaaagagaaattaagtagttcaaagaataatcggttattagtcccttattactcctaggaaaagctattctaattttttttaacaaaacatactccttataattttgtttattactgacttacacaatgacgaatcaatgagaaacaaatatttcgattgtaaaatgttttgctaaattgtggagatatatatatttgttttctatgaacatatcatttaatatataatttagtttatttcactaataaaaaaaattacaaactgcaaaatagttaaaaacaacattatataaaatgaaattttacaaaacgaatttacaattaaatagtaagatgaaccctccaaatatctaatcctataatagaacataatacattaacattataattaaatttggttttgttaaaggagaattgaatgtcttactgcttactagtttagggaaggagaaaccgaatagggaaattaatgcagccgacatttttgacgtcgaatagttaattggttgtattgtctcttaaccgtgcattgttacaattattaaagtattttaacattttggaatatggaacacctttcttaactaaaccaaaaaacatggaacactgattttattttatttcttcagtcgacaccattg

SEQ ID NO: 31808 - DNA, 987 bp, Arabidopsis thaliana landsberg
gctttagagtcagtatctgcgatatccatggtgggaatggcttgtacaaagtgcacatcgcatgcatcgatgcaagtataagacaaacctactgagaaagaagtaaaacaaatcgaataatatggttttatcaattaataagaaaactgaatgcactcgcatcgacactgtctctaatttgaaaactgatgttctcaactacaggatttaatttggaggtaaatataaacgagcatttaagtacatgtcatgtttcgagaaacctaggatacaagtcaactgaacctacctttaagaaaaggaatcgcgaaacgctaattatatgtgcttaagcgtaccgatatataagaaaacagatccaacttagcctaacattttctgtaggtttgattgatcacaaataagaaaatgagtaaaagtggagacgtgggcacgtagagtagacgagagttaatagaatgcatggcatgcaggaaacatgagacagacatcgtgaaggtcccatattgtctggtcgatccaaaccttgacatattatcacaacactatctatctagtaactagtgttcttcgtattgtcgtagtactttatcaattatcatctcatcacattgcaattaactaattttttttatataatattagattttgattttgttatctagctagttgcaattgtatctggacgtactattatcactttgattttgtacctttcattagatctctcatcttagcttgcaacttagtatccatcatcattattttctgcaattttaaaaaatattttctatgtacatgtagttaatacattagaattttatttatagctcataccccaaaaactacgcacatattacatatgtatattatattaattattaacagtaagctacataaaatttgtggatttgcgaattagaccaaccgttattacgttaataacaatattggaacttttgtttcaaaacaagagaatatatcatc

SEQ ID NO: 31809 - DNA, 406 bp, Arabidopsis thaliana landsberg
taacgataattagtgagtttatcagtaaatacataggatcaaaatactaaatttatatcaaaagaaatttaagtttttaagtaagaggatacaacttggatataatatttttctcatagtataagtggaatgactttggtctttgggttctaatattaaacccataactttaacttaagttcgatcttttggatataatatggaaagcagattttacttgtggaaacaaatgaacaagcaatagatcaataataatgtctccaatattcgagtgaaattgtgtccaaactcgatttcaacaaaaaaaaatattttactatctttttaatatatatatttaaggtgacataaaaatttatgtgatcatcaaattttactatttttatatatttaaaaaaaaaaattg

SEQ ID NO: 31810 - DNA, 1178 bp, Arabidopsis thaliana landsberg
cgatgtcctcttctgctaagacttcattcagttccaaaataagcttttgaaccaaaaaatggatgatagatacacgttgaagaacaaaaaaaatagggacaagaatcgaattgatcattagagatttgagagtaaccatacaagataaatttagttagaccttaaagaacaaaaatgacatcttagttataacaattttttgcttgtttacacattatttcaacaatgttatctctaacatttttcagcgtaagtttcttttccaaaacttccatatatgttagtgatttctatttttaaaatgctagttttttagtttcaaaaggaattgattattattttttaatcaatgtggggttgacaaaataaattagtatatattaatatgcaaaatagtaagagtgattaaacataaatgggaggaaaagcaattaaacatgtcgaagaaataaactaattgggcttttggtaactaaaccaaattggaccaagaggaaactaaaaaatataacacgtggagtgagacgtcctcttcgtctgcttagtttggaaacaagtgaaagctgacaatgattccgattcataaccagtatcacattggcttcgtttggcttccaactaagaaccgtacggttatgcgtcgtttccaagagattttgtaattgttagtttttttctcggatcgatttggtgttggaggttggtaatcagtgatcggcacacggtgctccggagaagtcgcaatctaatacctattcgatgcaggtgtgtctcgagctcttgatttgtttactttattggctcacttgattcgagatgggtttgttttgattaatagaatttcttgtagagcttacgtatctatattaaaacactccttcagtctttcttctaatttggtttctatggagattcgagtgtagtgtttttttatatcgaagtataggttttgttcatgaacgcattgtacaaaatttctttgttttctccggggccttattgattatttggttatatatctttcatgagtcaaagaagattgtacggcgaggcaactacgtttttaaaatccaaggatttttacaagttttggtcgagtaaatgggctatactttggttgggcctaggccaatatttattttgaattttgatcagtgacgtggaaaaatagaatgata

SEQ ID NO: 31811 - DNA, 516 bp, Arabidopsis thaliana landsberg
aaatatcatccatataacttctcacttactttttaccatacgtataattgaatttacttttcgtgtttgtgtttgtctagcttcatgtatgcatctcaatattaacaacagtggttatcatattattatttcttttgtctaaaaaaacaaaaaatttgtcacttttttctttggctcggatcagaagattttaggtctctctttcctttcctatatatagtagtaccccttacatagctttttccacttgcactcctctttttctttctttctttcttgttggtctctcttacttctttcttattcatctaaaacaatttcgatccatttacacataaatatatgtaactggccgtagaagaaacacattgaaggaagagatggctcataggagattaatcatgacgatgacaaagatgatgatgatggtgaccatgatgatgatgatgatggataaaacatgcatatgtgcggacatttccagaggcagttttccaaagggctttgtctttggaa

SEQ ID NO: 31812 - DNA, 609 bp, Arabidopsis thaliana landsberg
  unsure (1)..(609): unsure at all n locations
cgtggcttttatggcatcaaccttggaagcaagacgaagcagagtgcaaccaccaccaacaacaatacnnnnnnnnnnnnnnnnnnnaagaattaaaatcctgattagttatagttcacgagtatgcaaataacacgcttctcaagcctcagaaatacaaaatcacctttgttgcattaagagcatcttcaactctcaacttcttctctttgagttctgtctcagtttgtgctccaacctttaaccaatacataacgagcttaacttaatatctctgaaacacatcttaatcagacaaaggaaacttaaatagtttttggtttacctgaatcacagcaactccaccagagagctttgcaattctctcattgagtttctccttctcgtaatcttgctccgcttgctgcacaaaccaattaccattgcaatgtaactacactatccacaaaaagtaaaagaggtcccatatatgctatactctnttactatacctcaataagatttttaatctgtgtaacacgctttttcactgcatcctgtgtgcttccatcacccactatggtcgaggtctccttcgtgaggacaacctttgaagcattaccaagaacc

SEQ ID NO: 31813 - DNA, 840 bp, Arabidopsis thaliana landsberg
tattaatgcagctatagtttcatttaatcaacgattaagaccttatcccttttcagcggtacaaaaaagaaaagaaaagcacgaaaatctaatattcagaaataatcaaaactaaagatctgaaaaatagctgtctgataactgtatttcaaattttgaaaataggtctataattaagtgttatccgaatcttttgtttgttaagatttctgcttttcacataaaaaccccacaatccctacttaatctccattttcaccttaatatttatttcccttcaatataaaaaaataatcgtccaatactttatcaccacgtggcacaaactaaagtattttggacaaatttttgattaatttaaaaattcaaaggattttaacaccgtaaaatgcgagtgtatgtatttgcataacagaaaagattctattttcttatcattttctcatcattttctcagtattttctctccgatttttccgttctttttctcgcttctctaaatgttaagagtgtaccaaccatcacagtgaccaccacgcataatagaaaaacactaacctccatttttttccttactttgtcttattcctttccgtcgcttcatttcccccaaaaagccatgacgaatcagtctcatgatgatgacgatgaccatgaccagcttcctcgttcgctatttagactcgtttctctttcccaaaaaaccatgacgaattacacttatgatgatgaccattacgatgagcaactttctcttttgctaaccttgggcttaacatcgtattcctttcacattcggcctgtgaagtcacccggttctattagctcaccaaccgaatt

SEQ ID NO: 31814 - DNA, 567 bp, Arabidopsis thaliana landsberg
  unsure (1)..(567): unsure at all n locations
tgcaattatgaattttaatcaaatttaaatctaagcacaatccattaattattaaatcattgattcttatatatagtgttgctataatatatgtaaataatgcactgaaaataaattttaacaaaattttattgatataatatatggaaatcttagtttattcaattaaaacttcttcaaattcattaaaatatatagtggtatttcaggctgagaaaatttccaagcttcttgtagatctaatcatttgaaatatattccaataaaaatttcatgaataaattatatattggagataaaatccaaggtgtaacacaccaattttagaatctatagagtaattaagatgaattcttataaatgttattaaatcattgatcatacgtacgtgtttattttgcctcatatactactnttttttcccttgaaaatgtcagaatggaagtgagatcttttaataatgacatctttttaattaagaaagtcgattctatagtcaaatacaaattgagcgaaacaacgctctttctttctctctaatctcagatcccttgccatcaatggatt

SEQ ID NO: 31815 - DNA, 627 bp, Arabidopsis thaliana landsberg
  unsure (1)..(627): unsure at all n locations
tgaagattacagtatgtattcgggttatggtggttatggcggttatggagcctacgcagggaactccatggttaaccctgctggtttttatggttatggtggtgggtatggctatggttatggctatggaggtcaaatgttcaacatgggctatggagctggcggttatagccatatgggtagtggctatggtgttgctgcggctgctgcttatggaggtggaaaatctcatggaaacggaaataacggctcaagtagtggcaaaggaaatgggactaatggttctgggccacatcgataccatccttatcaaaagtagaacttccggctgttgcaaagactcttctttttgtaaaaagatgttttttctttttttctttatagtttgaaggaatagtcaagttaagaaatagtttgggatacttcaccaattcttcacattcaactgttgtgacttatgagattatacctagttgaaaaacgtttgtttcgcaaaggtgctgtttagggcaaagcattattattttttattgaaattctttcataacgttngtatgtgtgattattattgaaaacaattctagtagataatctcaacaagatatcgttatccacaatgtgacaaaa

SEQ ID NO: 31816 - DNA, 685 bp, Arabidopsis thaliana landsberg
atgctttgctcttgtattttgaaaccatgttagcacctactaaccgatagggcaactgagtacggaagatattagtgataatagtcggctttcacctactaaccgttaagggatttggaagtaattcgtatgtccgagaatttggaagtaaacaaacctaaccatgttatcacctagatcgagatctatacattatttattgaaccatgacatccggaaaaacccccgaagacctaacgcttttctcttattgtgtaacgtttagtttagttacttgtcttttattttggttactcgttgcatacaacaacccccactcttttattttggtcctagcttcactctcttgttaaggatttcgttgatctacttctctccttgtggattcgatcctaaaatactactccaatatactctgcacttgcagtagtcgggtggtctttcaagtaaaagcgtgaggcgaaataaaacatgcatcaagctttttggcgttgttaccggggagatccactacaggaaaagtgggtattaatagtagttgaagatagcgttttggtagtatatgctatagttttggtttgaccagttcaaaacaaacgctatcctatgtccagcggcaaaaagtagtttgtcacccgcaaaaatattttgtttatcgatagcatatgcataattaaaatggtat

SEQ ID NO: 31817 - DNA, 1198 bp, Arabidopsis thaliana landsberg
  unsure (1)..(1198): unsure at all n locations
gaccagagggcagcaggaaagtcaaaatcagcataaaattctagagttacaataatcatcctatttgactgggatacgcttttccacaccaggcatggaggcataatcagaaccttctctaaagcagattctctagtatgattaacaagattttaactcaccaaaaggaaaagacatagcaataaggtgatctaagcctctctctctctctccaccaaaactaaggaagagtaactagctaccttgtcatttaccagagtttttgacttctcaagaaccaaacaaaaccaagtcaagtctaattcctttatacaaaagatttcattcacaaacgtacttagtctgcaaagttgccctcttcacaatgaaacaaagataaattacacaaagactcactaagggacatcaagaatcatgagcgaccagtaaatgactagagaccggctggaaaataaagaaaaaatagctaggaaaccaaaacaacatcttaaagaaaggtagaaactnttccacattatgcattatttcaagatacctgaaccaagataacacaaaaataaaagagattctctagtacagaatttctaattttcaactcagaaaaaagctttaagaacgagaatgtgcattacaaattctcaaccaacaggacaacacaaatcaagtgtacaagtagagttcactcataaaaaaaggctggagattttgtactagaatcctatctaaatgaagaaagtgtctcacaattagtgaaacaaatgaaaagtcaagtgaacgaacattctcttactcaatgaaataatcaaaaagattctcttactattatttccttggacgaatgtttcaatcgattcaattcaaaactagaaatcaaattcaacgattaaacacagagagaaaatcgagagagggaaacctgaggagcgaataagaaaggagatggagatcgagcaggacttccgggaggagaactgctcatagagtctgaagaaggacgacggtgacgactgcgtgcagaaggatcgccgccattagatctcgccgaggacgaggtaacatctgcaccaccgctaccggcggcggcgtcttcgtctttgccgttcgcatttcccattctgaaaagcccaaatcacagaagcgagagagacaaagagaggagagagattgaggaaaagattgaggaaaagagagagaaaac

SEQ ID NO: 31818 - DNA, 502 bp, Arabidopsis thaliana landsberg
  unsure (1)..(502): unsure at all n locations
taagtcattcatttttgatttcgaataagaatactttatagcaactcggaccaacaaaaatgaaattattatttctaataatgttttcttacaatttggttatataatttggcacacaaagcgaatctcatgcacatttgtcattgatgttgctagtaataagcccatacccttcaataagacttcttgccgctattcgtgattcccatatctaatggattattgattattgcactttgcaactcaatgcgcacataagacgagggtgatttgtcttgaacaaacaagctcaaacaccatgtagtactttaatatagatctttgctgatatgttccgattgcattgcatgtaataacacgaatttgaaacaaatatttaggcaaactatagtagcatgactttaaaagaaattattaaagatgcgttaattaaatcataactctaagttatgaagganagatgggtaaaaagtttgggtgcaagaaccaacctggatttaat

SEQ ID NO: 31819 - DNA, 596 bp, Arabidopsis thaliana landsberg
  unsure (1)..(596): unsure at all n locations
ccctttttaagaatcttcaacttcattattattataggtaataaaaacacttcaaaaatggaaagttgactatcttctcaaatatctactagaaattataaagtgtcgtttggatttttttttttttttttttgccgtcagnnnnnnnnnnnnnnnnnnnaaattcattaataaatatatttttagttgacatttatcagataattgtatatagattcaaatgatttgagatttgtttctcgagcaagatatgtcacagcttattatacctggatcatactttaaattgatcctttgagaaaagcgagtagactttggactttggagtttatttttattttgtgtaacaaactttttctctaatgcatatagattagacctaagatattttgatcaaaaaaaaaaaaggacctaaaatattgaggtaaccgaattatagattactagaagccattaaattttcgaaaaaaggaaattggtatcttaatttttcaaattgacctagtaaaagtgttattagaaacggagaagaaactcacacaaaaaaaaggaaacataaaggcttcgagtgagattgtgcgatgggttaaaataaa

SEQ ID NO: 31820 - DNA, 781 bp, Arabidopsis thaliana landsberg
acgatgtatataaatcaaaatttaaaataaaatataaacatttctcctttttactgaaataatataaaatagaaatgataaattacctttaaaagtaacgttcccaaaaggttgaaaatctgtaaatgagatttttttcataaatgtgttttgttttattttattttgaggcttgtcctacttgttctatttcctaattaaaattgaagaaaatgaaataaatctttaatatgatgacccaaaacaatcttttatacattatttacctaatatagttttctattattttctatataaatatatagcgattagattgttcatattttctgtatatcatctttcatttggatttagaaaaaatggattttactcgcgatgacaactcaagtgatgaacgggaaaatgatgtagacgccaacaccaacaaccgtcacgagaagaagggttaccatcgccacactaatgaacaaattcataggcttgaaacgtaagatcttaatctaatctaattaatttatattactttttaaaaagttagcttcgtaattcgttgttaatattttttcgatttaaggtttttcaaggaatgtccacatccagacaattctcagcgacgtcaattgggtaaagaactgaatctgaaacacaaacaaatcaaattttggtttcaaaacaaaagaactcaagccagggtaattgtttttgtcttatctatttttaatctagtttagtttataatacagattgatttaatcgagttaaaccaaataagagtgattta

SEQ ID NO: 31821 - DNA, 997 bp, Arabidopsis thaliana landsberg
  unsure (1)..(997): unsure at all n locations
aggcccataatgaaaagaatcccaaatgcaaaatcaaaacgcaaagaagttttgtcggttgcgattgcatgtttcttccaaacagagcttaccggtagtacagaccaatatagagagaaagaagtgtgagagctacaagtttgaagaaatcgagtagagagagagacagatctagattcttcttcttcttcgtcttcttcgtcaacctctagaagactcgtgtaggtacgtagctttgaatctcttcttctgtaacctgaaattttgttaattcctcttgagagtgaagcattatcgagtttgatcttcgagaaattgtacataaatcgcttgtttctctcgtgttctttctttgtactgatttcaaaacttgaatcgcaaagaacaagcgataagatcaaaatcaactaccaaaatcactacagagagctatttttctttggattttggttttaaacatgtgtttgattacgattccagactgaaatttgtatctgagtcagtggattttttggtgttgccttgttgattcgttcacgttgtagtagtagatnacagaatctcgctttttttgctangagnnnagcttaggagtcggcttttaacagagtttctatttgagcagaatcgtaaaatagaatttgatgtctgccaagtgtttgatgaaattcctctgagaaatgaaccttaattaattctagtgtgtattaatggacttcttctttgttgttcaggttattgcgatggaagctgtgaaggaagctgtgaggaagattaagtccttagtcataccacatgcagatgagaaagataatggtattgtttttgagatcaagcttaatgagacagatcagagagtagcaaaatggggtctcaatccttctcctggatgtattgtcttctactaaacttggcaacatttttatgttataagagttttctattgaatctactatgtccttcgtttgattatcttgcattattaggaattttttcg

SEQ ID NO: 31822 - DNA, 525 bp, Arabidopsis thaliana landsberg
tcactcccgataggctccgagagcgctcgtcggactgaaggagtgtgggctcgacctcgtcgcacacgaagtctcgcaggatgggccaaagccgcatgcgaaagaactccgagagtgctcatcggactgaaggagcgtgggctcgtcctcgtcgcacacgaggtcgcgcaggctaagcctcagccgcgtgcagaagaactcctcgtagtcggcggcaccgcggacgtgcgccggacctccacgaccagcagctccgacatgagctcgtagatctccgcggccacgaccagcgcgccgtgcatcgcctccagcgtcacgtcgagcgcgccaagctcaacttccccaaggacgcgcccctctacccggtgtccacggtgggtgcggcggcgcctgtcgctatggcggcctcgacctccccacctgtctactccggtggcgtccagggctgacggcagcacgtcgtgtcgccctccatctccggctactgctgctgctccgccgcacacttccagttgcagcagcgaa

SEQ ID NO: 31823 - DNA, 1058 bp, Arabidopsis thaliana landsberg
  unsure (1)..(1058): unsure at all n locations
agagtcatttaggaatttgaaagttaactattatttatggaaagactgaagcacaaagttaaggattaggcagtgatatgttttgcttgttttgaaatcatgtaataatagagagaacatgttgcgaaagcgacgcttgatgaagcaaaaaaacccaagacaaaggtcttaacaaagtcatcttttttcctttggtttgaaaaaaaaaagttgcttcaattttctagtggttcatttgaaaggtgaaacacgacccaataaaagtgaaaatgggaccataaacatgtcatcttcacatcaccactctgtttctgagtccgaccatcacggacataaaacatggtccaactaatttgatacagtcagttcccataacttatctctctctacgagttactcttactatgtatgatcactttttaaaacactttcaatacttgcgaaactgtattttaaatattgggaaaacagagagaattagagaggaaacatgttctgaacattatatttattaccactcgtaagtcactttccatttgcattatttacttatacctaatggtgtcagagggagtttgtgtctcttttacaacagtatcgcaccttctacatccaatagacaactaatgaaagctagaatcaatcaaaacagatttacactagaaagaaaaggatgataccacattgaaaaattgatgaatgtatgaacaggatggtaacaatttaacttagattcgaaattttggtatgaaatcctctgaagtctgaagagttttaggtttagttgaaaattagagtactgtagtagtttgacatcctctagacgaagcagaaggttccatcaaattctatttgtttcgcgggccaacccgcaagcccgatattttatggacatatgtagagttcaagcccgccctgtgatgatgcttattgnggcaagctggtgggtttgtgggccgcttgacanaagaacattaaaaaaagacacatttgatggacaatcatgattgctgtggttagtatacatactnttgaggatcggatcatgcaatgagtga

SEQ ID NO: 31824 - DNA, 1285 bp, Arabidopsis thaliana landsberg
taaagcactgggcgagaaatccctgcggcgcgccacggcgactgtctaagatttttgagaaatggcgaatcgattctgtgtagagtcctgcgtcgagagcggcgagtgcggcggcgcgccgtcgtaaaagtagcttgatgtgagataacacgtgagcgatgctctcggatcgtggctgagatgcggaagttacgacgacggaggagggaggagaggagccgccgtcttcggaggagaagagaatgaagctatcgtcagaccaacaaatactctgacggcggaacgcagcggtggctaagcgtttaccggtttgaagaagaaccattgcatcctccattaaacctaaatggcaacaagcttgacccaaaaccaaatatctgtaacagaaagaagaaaaagatccgaatcaaaaaatccgggtcgggtgaaaatcagaaatggtttttttgtagagtaaatgacctccattgcccttgttcgtcgcagtttttagtgagaccagccatgactttcttcttcaaatcagagacagagaagcatttaaaagacgagtcatggtgatgatgactaggcaaatcgttgagaagtttgacagattcacgagaagaatgagtaaaagaaagctccgatgaaccgataccggaatcttcgccggcggctaatttaagactaggaatgtaatcctgaagcatatcggcgacgtctttgtatcgacggaggtaaagaagggatctggctttgagttcgagagcgagttcgtaacgaggagatacagaaagtgcagattccagaagatttaagctgattcacgtcgtttggatctgactcgctataaaactttgcttctttcatgtacttatcaccgttgtatgaggcagagagagataaaaaagcaatttgatgagatcgatatcgaattcacgaaaacaatgaagaagacatccaaagatggagactgaccttcttgttgcggagccaccaatgcttcttctcgccgtaaaccgccattgtcgtaaaacttgtcaaacaatcagaagaagaagaagaagaagaagaagaagaagaactttttctttcttctcgatcgatccggtgaagaaaaaaaaactaaaacaaaatatataatatatatgagagagaggaaaagtcgaaaacacgagagaagagagagattttgaaaaatcatgtgaagaattgaagtgtctaatatgtaaaaaaaagagagagagttgtgtaataagaagaagatgaatgctaaaatgacggattttcccatttaatgaac

SEQ ID NO: 31825 - DNA, 5507 bp, Arabidopsis thaliana landsberg
cattcatgtgaagagtaatcttaattagcatttaccaataaaccatttattcagaggaatgttagcttaatgaagtgattaagaacaaacatacccatgccaagggcagtcaattcaacatcattgtactgctgcatatacctctgaacaaaatccaaacaacaaaactttgttacatcaatcaatcataaccaaaaaaactaatccctaaaccaacccaagctaaaatacgtattggctcttcctaattgaaacagtaaaatcgtattaagtaaggagattgccataaaaattgagactttggactggattcacatatttgcgattgaaaaagatcttagattgcagaaatttcaaagcttagattagaagacgagttccattagcaatcgaagaataaactgtgtatgtaccttggcgagattgacatagaagaacaatggtttcttagtgttggaaacctgaatccggtttttcttctgcgaatcggtggctaagttcatgttgttcactccatcggtgatctcttccatgcttgctaatcggaatccgtaaccctaatttttctcgaggtaagggacgacgacgagtaacgaaattaaacaagacagatacgcttgtgaaatcgggtcaacccgcataaactccttacccacaatccggtctatccggttatggaaatcgggttgtcggcttgaagatttttctttgtttggactttggtgacatatgactatattagcccaatactaagaaatagatcagtgatgttgagcttatgggctttcaatgggtttggtttgggcctagagatttccaaacaaatgtgtttgttcatttgttgtttgtgttctctaaatttgataacttagcgcgtatacaaactctcttttagttaattagtatgaatccataattcaccttacaagatcataaagatttcttaaggtccaatgttgtgttgaataaacgtagagcttggtgatattacttgatcttaacttgcatgcctctgaacctttgtttacatataataatcacgggctcaaatgtaaaatggtttttgaaatcttaagaattgttttttggtgtaaaatgtgatatggactataactagaatattatccaaaaccatgggaagagtgtggtccatcagcatgaagggatcgaaattatatttaaagcctgatcatggatgggtgatgggtcctcctagctatactcttctcttatagctatttccaatttgatgttaacaagaaaaagaagaagcaatttccagtttggtgattttatatcttaataatttagaatgactactagatttatcactatgtaattgcttcagatcaatactcttctatggtgaataaattatcagcaattgcaaagtcaatgagttggattctgattaaataaaagaaagattatcttattggaaaaacctgcctctcataaaatcaactaacaacatattgacgttttcgaaaaatacgatatctaattatggtatcatgtcttaatccgacaccgtactgtatatgccacgtttcatccaagaacaaggcattgatgccatcgatgggtcattggaccaattcttgttttatatttatgcaaatgattaatatactactactatattagtatattgttacttatactattttatatgtcaaattatatgagaatgctagtgcaccattcgatggtctgatctttaatcaaagcacatttcgagatttactatgatatataaaaaaaacatgagatgaccgccaattttgttttgttaaccaatttcgtgtttaaaatttatgtatatttttcagcaatgttgtagtttttattttaaaccattgagttttgtaagtgtcactttattgaccgccattttttgtgaagagttacttgtgattgataatatatgatggaaaacaatgcaatagtatagctcatagaatctgcgtcaaagattaccattaatggttgataggagtagcaagtaacaacttataaaatatttaatggacagaacaatttaggagtaataataaataataaatgacatgtgattaaatttatgtttaggtagcatccataaatagacgaccagctaaaagtcatgcattgatctaatcgcatcacttatttaataatactatacctaccaaggaccataagaattgattacttctaatactgtgtattagcttgtatggagtactggagtagtactgtggatcttcgatccatatgtctgaactgtagtttataaataaaatgtatttatatgttagtatcaagaaaaacgacaaaagaattcgagttgataaattgctttggttaatgggagccagatccaaaattctagaagcacagatctaaaatgcttgtgcatgatttattattgtgtatatatgcctaaacgaggatggagtaagtcacacatccacatgcatgtgtgcaagtactcaagtagtgtaagatatagaatgtatgaatacattcacccacacgcgcacacattacgcagcgtgtgtagatggaagatattatgcaactcttgtaacatcaaacttgattgtatagatcaaggatgcgagaggcacaccaatacggcaatacatacacttccgctttactagattcattatgaaaatctttgaattgtaccatcatcattcatatatagttggtgtcaaaaacaaaaacaaatcacagctatagagtttgagtacaagtgttacgtatgtattgatgcctcatttatgggagttttgttctccaataaatatgtagccaactcaacaagtctatttcctcgcaaacgaccaaattctcattcaatgattcaaactttaacgctatctaaactgtaacgcatttctattttataatagaaatcttcaaatgctcattcaatgatccaaactttaacttctagttttatactccatatttgtgcaaaatgtatatgatataatattacaagtagtagaagttttttgttttagtagctagtagtagaagattaagcagagtaagttctcattagatgacttaagcatacaaatatagtattacaagtaggggttatacacatgactaaaaatgtttatagttcttttaaaataatttatgtttagcactaacaaattcttataaaaaccaaagtttattttcgggaaattatgtaagtaacaaatgactaatttggatcatgattcactccatatgggtaggttatgggtacctttctttttgctccaagccctttttcgtaattttctcttagcacttttagttaaaatgatgacattgaaaaagggaatggcttgcggtgttagcaatgtctccgagtctctcttttctctttttacaacgaaaaacctttttgtaatctccaaattttccctctctctctcgtttcggcggttaagctgccataatctctcacccacctcaagcaacataacccacaaaaactcaatctttgtctcttatcttcaaaacccatctgatcattcctccggaatctttctcaagaacagagcaaatgccgcttgttaggctccaagttaggaatgtctacggtttagggcaaaaagagcttcacacaaaagtcgaccgtgaagaccccaaagcgattctcgacgacgtcgccgtttctggactcgtcgggatcttgcgtcaactcggtgatctcacagagtaagtagtactttaagtcaactctgtttcctctgtttctttttttttttataattgacttataaatgtttttaaaaaaaaaaaaatcctaagtaaaaatgtgacaatatggagtcagtgatcttctttgattctctgtaaaatctttaattttgctgtgtttggtcttcttcatttgcttattttatggttctcagccaatcttacttgtcctgagtttttatgttaaactcacattgtttcagatttgcagcagagatattccatggaatacaagaggaggtaatgataacagcatcaagaagcaacaaattgaagatgagattgaagcaaatagaagctaaagttcctacaatccaaaagacagtgcttgcacaaacaaatcacattcattttgcatacactggaggtttaatttgtcttgtttctcttgtcaatcttctttaatgtctagattcacatgtttgttctttaatcaaaaatttatatcctgttgagtttattgtaggccctagctcacatgccttttgcactaacttcttagcttaaaatactcttttttgagtttagaatttgatgatgaatgatactagtagtctttcttatggatcttaattaaaataagtcatgatctttcactatttgagttctttagaaaatttaagtatagttaatgaacatagtgtttacatgctgttttaggtctggagtggcatcctcgtataccaaatgtgcaaaatcactttatgtatgacgaattgccaccgtttattatgactccatatgaagattgccgggaacctccgcggttacacttgcttgacaagtatatacaccttttaactctcattttcttttttgttattactgtttctgctatgttttagactgatgataataaatatgatgctgattctttgcggtttttgtcagatttgatataaatggtccaggttcttgtttgaaacgatactcggatcctactcatttcaaaagagcatcaagagcttctaaaccttcagagattaaggtttgtttagagattcagtctgttaataccatgttttgtagagtttcttctttttcttgtttgctacctaaacttgtatggatgatgcagaagaaaaaatctatacaacgcggtcgagatatatcaagacttgcctctgtggctaaccagagtgacaggtaatgacatttggatttgacattgtagagatgttttcaaatatgactcaaaacatgaatatatgatatgatgttcaggaagacatgtacttctttaagcttcagtggacgaacctctacctctaaaactgcttcaacgattgaaattgagtcgaaatccgacttgcaagagcatcgttctttctctttcgattcaagaagtggtggagagaaaccgaagagggtatcttcttcttcaaggtttacaccgggttctcgcaccattgcttcagttctttctgaaagtgaaagtgaaagtgatagtccttctcaagatttaacagctcgtggttcttctagtgttagttggcacgagaaagctgagatagtggaatgcaatgttctgcagtgtgcaacagatgaagctcctgaagtaatggaaactaactttgtcttggatgctgaaccggtatcaagacttaaagaacattcagcggttgaagcggtccaagatatcaaaccgaaggaactggaaatggacaatgaggatgagactgaaagcgaaggggatgattttgttgatgcactttacaccatcgattcagaatctgaaaatgatgaagctt

SEQ ID NO: 31826 - DNA, 4229 bp, Arabidopsis thaliana landsberg
tatttagtactgtaaataccacactttttaatattaatttaatgtcttttgtaagaatcttaccatttgaccccaaaaaatacttgccaattatttgtaaacttggtggggataaattaattaatgattgctgatatacatatatgtcatgaaaaaagtaatctttttagtttaattgcagtgatttgtcccacaaaagcaaaagctttttacatgcaagtaaataactaattaaaataaaaagtgtttcaagaattatttggaaccaaaaatagataataatgattgttgatggataaattaaaagttattgtattctttatgtgaatgacagatattacaaaataaagttaaaatgatatatatgtcatgcaaaaggtaatctttttagtttaattttgctgtgatttgtcccacaaagaagcaaaagctttttacatgcaagtaactaactaactattattacttgcataaagaatttctgggaacagaaataaaataaaaaattaaaatttgtttctggattaagtaagtagtgcgttgtttccaagtagtgatatcaatatcaaattgtcgaatttacacgaagaacaaaaataaggaatcgagagagagagagagagataggcgcatatatgggaagaaaatgagagaaaaatggaaactttgaccgccattgaacactcacgagatctcttcttcttgtatttcttctctctcctctctgtctgatgcgtgttcttgattcatcggctcagatcagtcaccaagtaagattttgattacacctgcgagagagagacctaattagggcttttctttttccggcttcctttcaaatctggctggagattcctcgttttaaagtttcctcctttttttggatattcccctgtttaattgtgcattcatgtttagatctcttttcttcttctttaatttctctcatcttttaacatttatatgcaatctatctatcttttacatgtgtatctcttttcagaatcctctgtttattgctgttttgcatgccgattcatttattctctgattacaagatcatcatcattgctttaaaccattatatatatagattctcaggtttcttgttcatcttcacaatcacacttattgaagaaaaaaattgttccttttttggctctttgcagatagaataaatagcaaacaagatcctctgtggaatttgatacatagagaaactgtctagtgctgtggtgtcttttgagattttcttgtggttctgtggattgtttgttggttggttgcttcttggataaatggcagaagtccataatcaactagagatcaagtttcggttaaccgatggttcggatatcggtcctaaagcattccctgatgctacaactgtttcggctttgaaggaaactgttatttctgaatggccaagaggtcagtttttttttatgcttatttactcttatggctaataaattgtaatatccttaggcactgtgttttgagattgtaaaggcttgaatcttcttggaacaatggttttgctagttatgaaaatcatgtcccaatactatatcttatgcaaaagaaacttcacaaattttttgagtagatcaattcgcacaatgttactcaccatccgtagagttgtacctgttcctgtgattgcttacttgttctgttatccgtgagcctaacatgaacctgtgttcaactctttgtactgatcatactacttgtcattttgttctcttgtgtttgactaatgatagagaaggagaatggaccgaaaacagtgaaagaggtgaagttgataagcgcagggaaggtattggagaacagcaagacggttaaagactaccgaagtcctgtctctaatctcgcaggcgctgtcaccacaatgcacgttatcatccaagctccggttacggaaaaaggtaaaacattctttagattattctcttgttttcttagctccttcatattcaaagagacagcagcctctagtgtaggatcaaaatctgttgtggacctcctgacagagagatggtgttgtgtttgaaacagaaaagaagcctaaaggtgacccgaagatgaacaaatgcgtctgttcagtcatgtaagagagtagcaaaatctcaagagagactcatcagatttctggtccttaagtttggtctttcttgtggttagtatagattgtttactaatacagatacacaattaaagagtattgaaccatttttttttataataataaaaaaaaatagtataaatcaaagctctactctagcttgttgcaagattgaaagagatcatcaataaatcaaggtattggtgattcagttcctcttaatggagtctctgttttagctctatttctcagttcctctgcattgggaacaaaatggacctgaaaccctctttatcatagaagagttccagaatattagtattgtgagactaaaactagaaatatctccaaatcatcggtagagatgaattaagtagactgttgttctctgttggcagagaattgtgagactgaactctcaacaacagatgaagaaataataatgtatcatcaaagatttagaattgaaagcaaaaagagacaaataaaacaagtttaaagcacatataaagcttaaaacattaaaagtaacagaggcgatctgtcctgctgttgcgcaggtagacgactagcaggggaagaatcaacgagcatcagagaatggtatggaggagaaaacacattgaggcataggttccatcttttgggtggtgagatcatacacaaatatttggacgccactgaagtagatagagttccttttgatccctgggacgccactggggacaacagtgatacccatgtcatagatcaatgcttcatcgcccaaagaatcgactttcaccaatttgccacccacttggtttttcttctagatgtgaaaatataatgttttgctgtcttgtactatacttgataccaccaaaaactctccggatactgtgactgcaatgcgtgtcctggagcggcgtatcaatttccaatagagtttttgatctttttgctgaagaaaagggtcaaaatcgtgatgattgaacgaataccaatcaagagacagaataccaatcaagggtccaaatagtgacaagagaattggcataacgaaggtagagcttttgatgagtgtagacaaaatcttcaaaacactccaagggaaagtcgtgccacttgttatctcctttcttggtaaacacacgaaagtcgtactccaacattacaactaggtaatctttggttttattgtccatccgaaaacaagctcggtcgtatcttaagtaactccttaaatatggcttattgctatcgggtagatcaatcctctcaccagctaaaggagatccatactaagaggtttcaacaacaagagccagctaccacaagtcgtcagacaacgactctggtctctggggaaagtcaacaccaagttctctacttctgtaaacgttgtcttgatcctccggaacgtacaacacacaactactactgtgtttgttggattcctccttgggagagaagagaatcagccatggaatctgattttggtcagggccgcagcctctcgaagcagagtgccactaccgatttagctcgattaagagatatcaaactcaatcgtttgaaaacacatcgcagcaagtccggacatagctccgacccgtttgcttcctttttcttcttgtctcccacgatttgctttttttttttgctcaaacaaacatctattttgatagtgaaaccctaagcgctatataaatttgttgtaattatcaaaaatgaagacgtcaaatataaaactcttgatgaaattggttctgatatcctctacctggttatcacacttggtttaagagctaataactaaaccggttatcagctggttatggaaaactcgaggtcgttttgagctaaggagcaagaagaaattgttggattcagctgcacgttatttgtttggcgtagagtgattcagctcaattcttatataccggttaatgaacgatggttagttgtagtttgattagacttggtttgatcatcaatgcgatcgcctctggttggaggcaatgtctgcaaaactttagtaaatacaatgctttatccaacatggaagcttttacttgtttctggctatatatatccttcattacaaggcccttcg

SEQ ID NO: 31827 - DNA, 713 bp, Arabidopsis thaliana landsberg
tggttaacaaaagcaatcatatttgattatctaagaagatttgtttttttgtttgggttttcaggttgtgggggaatctcagaagagagaagagtatctctgcttcccaggagattactgtggatgttattctttcttctatgatgttgtaagcagaggagagcaccaatgtgtaagattcttaatcagaatgcttccttttctgtttagagattttgtatcaatgttactgtcttgttatattctacttttctcttttggctagtgtaaacatcaattggctgcgaggttggcttcttctttgggtacatacaacgaaatcgaggtttctgatgaccatcttgccttgatgctctcaaagatctgaagctttcaatacaactacatgtcttaggcttataagtgccagtaacctgggaatgatctgtgtctttgagaattatatggatcaagattcttcacatgtttgatgaacaatgttgcttcatcttttatgtttaacttgctgtatataagtcttgaactgctatattttcaacttcttaattcagtggaagaaaactatgaactttgtaaaagtagtattcatgcataaaacttttagtgactcgtatacaaagattaattaatcaaaaaagcgtagaatggaaacaaactcaatgatcaaagaaaggaacaagtggatttagagttagtgtgaagaagggcgggga

SEQ ID NO: 31828 - DNA, 496 bp, Arabidopsis thaliana landsberg
tctttagtttcacactgaatcttttatttttttgaactttctttcagagataatggaaaatactcaaggttgaagctaacaaaattctatgttaccaatcttgtgcttaccattttctggcgctgatttaaagcttgcagcttatgcctttcatactcgctctttctcccttctttccgtaactgtgttgtagtaaaaggtaaagttagaatctaagaggctttgggaattttgaaagaaaatatcaacgaaagacttaagtaggaagaaaaaggtaatgtgtacctgcaaaagttccttctctcgggaggctttccactgtcgaaactgttctgcttcttgtttcattctgtgctgcagttgaacctagaaaggcaaggaagagaatcaaactaatgcactttcaaagagaagatatgacatgagtttatatgcaaatgacatggtctagatgcattttttagagtaaaacaaaaagatcatatttatacctttt

SEQ ID NO: 31829 - DNA, 341 bp, Arabidopsis thaliana landsberg
attgttttttgcttctactcaaatcctcaattatgtagtttttactcaatgaggctcgactaggcttcatcgactttaactcatcaagactagccataactgcaatctcttttttagataccacagttctgttctctagggattctaatgcgttttcatgcttcttcttcttctcctcctcaatgtcctcatggccattataaaggcaacttgcacctgattctacagtataactatggttctttggatcggttttgattgtcaactctgctaagcatttggtgcacttgatgtagaacctgtggatttttagacctacgtacgtctcggtgatgacgttt

SEQ ID NO: 31830 - DNA, 1065 bp, Arabidopsis thaliana landsberg
tatgtaattcggtctaccacaccaaaacagcaaaactgattataggacatagagagtttagatcgactatacgatcaacgcaagtgggagttttatagataaagaatctaaaataagataatgagagaaaatgtagagacctcgttttctatgttccagatccaattttaaggttacctaaaaaagcatagttcagttttaccttactaatacgaataatgaataataacaatattctactaccaacttgcttgagtcgggatcttcaacgcttgctcattatttccttttttttttttctttttgcatctcgttttgattttgctttttacctggaagaaaaagtaaaccaaatatttgtctcccatatgtatattttttataaagcatcttcatttctgttcctcatacgcagatttgtggtttagccgtcaaaccacaaatctcgttttcgtgactcgattgatgatgagatcaaaggtcgtgcagaccatgcgcccctcttctcctttccaactctgcaactgagtaaaacctaattttatagttgattttgcctctccggcaacggtttcctttaccggttgccggagagggcttctctctctcccttttctctctgttggtcatctccgtctctcctctgttgctttggtagtgctctgtccttggatggcttttcgtctcttgttggtggtgaggcggcgtgtggcttcgttcgacgcacggtgcaagggatagtgtgcctgctctcttagtgtgctcttgtttttggcgcttgtggacggtgctgttacagagcttcttctccgacgagtttggcttccgatctgtccttgtgtgagtgtccctcgtcggttctggttgtggctctggtgaggcgataggtacaacggtgtagctcctagcggcgggaccattctcctttttgagttactggtggtgcatcaccgcttcttgaaaatcgtcctttacttttgtgggatgtgctctacgttgagtgctcagtgagtcggctctactattctagggtgtctcttcccttatttaactccagctctgggg

SEQ ID NO: 31831 - DNA, 972 bp, Arabidopsis thaliana landsberg
aaacatattgccctctctgttgttatactatatgagccacacactcaccagtgatttgcacgcgcgcttattactgactgagactatgcgcgtaccgtgatatctgtgttccgcgaagcagtgtattattttcaccatcttcttcgttttcctttttcctcaatcgacgacgatcaatctccaacctccaccgcattgattcctctgcttccggttcaatgtcgctgctaaaccaactcttcaaccgtgggatctttggcgccaaatggtttcttcgtcttcttcttttctcttatacgttgatttgggttttgattgaagctagggtttcttcaataatttgatgccatcgattactcttttgcttcaatttgaaattagagtttgttatgctcttaattgtccataaaactgagaaattgaagtaaatgttggcagcaagacaagcttgaacttggcgatagctcgaatgaaattgctgcaaaacaagagagatatgcagcttaaacatatgaagaaggagatagctcacttcttgcaagctggacaagaacccattgctcgaattcgggtttgatctcattctgatttctgtatgttacttcttacaatcaacatcaatctcttatgttcttgtctgagatttaggtggagcatgtgatcagagaaatgaatttatgggcagcttatgagatattggagctattctgcgagtttatacttgctcgtgttccaattcttgaaagtgaaaagtgagtctttttggttttatttgtgatcaaaggatagatagtggtgggaggatccataatgtgtttctttggatttgtcaaattgaatagggaatgcccgagagagttgagagaggctattgctagcattatctttgctgctccaaggtgctctgaagtacctgatcttcttcaaataaagaatctgtttggtacaaaataggaaaagaatttgtcatgg

SEQ ID NO: 31832 - DNA, 6432 bp, Arabidopsis thaliana landsberg
ctctcgcagcttgtgttgagcactggaaccggtgtccacggatttacactggacccatctttaggagagttcattctaactcacccggacattaaggtaatgggaactagtcaacataatgttactccctttttgtgagtttctcaaggttcattagatcttcttgtgtacagattccaaataagggaaacatttattcggtgaatgaaggcaatgcgcagaactgggatggtccaactacaaagtatgtagagaaagtgattaaatctgattcaagtctagcttgcttgatatattcatggttttcgttttcggtttcggtttcggtgtaggtatgtagagaaatgcaagtttcctaaagatggttctcctgcaaagtctctgagatacgtaggaaggtattatataagatcctttatctattttaaagctctgtcatagtaaatagcatatgctttggtccctttttggttcatttcattttgttaacagtatggtagctgatgttcatcgtacactactttatggaggaatcttcttgtacccggctgacaagaaaagccccaatggaaaattgcggtaagcttaagataaagctagttcaaatacataatcactaaaaggttgttctggttttgagatcgataaaccgttaaaccccgcagaaaacttaacactgtttaggcttatatatgtggacagagtctcgtatgaagttttcccgatgtcgtttttgatggagcaagccggaggtcaggcctttacgggaaagaaaagggtatacattttcctctataccctgattttattgtcacttgacagaaatttaaagattttctatacggtttacgtttcctgatgcaggcgctagaccttgtcccggagaagatccatgagcgttctccgatatttcttggtagctacgatgatgtagaagagattaaagctctctatgctgaggaggaaaagaagaactaagcttctcattcttcttttattctcttactgtctctgtctctcttatttctatatacagtatcttcttctgatgagaagaacaacataactcatttacaaaaggaagatctttctttatctttaaatgcacataaaaatcttctttctttcatatcttcaatttgtcttcagctaattctaacatccaattttagatcattccaagcttgtcttttgattattgatcccactttagcactttatgtcacaaagaaagaaagaactttatttcaagttttttaaaaagctcctattgatttatcagaagaaaagcagagatgaatgaagccttattaaaggaggtcactattgaggaaatacgtgaagcacttttctccataggagcaacacgagcaccagggatggttttaacgctgcctttttccaacgctattatgagatagtgggagaaacgatagtctcaaaggtcaaaaacttttttgcaacttcagtaatgcaaaaagggtggaatcatacaaatctctgttctccatagctgtcgatcttactctcacgtagtttccttgtttgaagctaagattaagagctgggaatgggcagttgagagtatgaaaagtttacatgtacagaaagtgacttttggggccaatacaatggagataatcaaagtccttcataaaccaaaggactgaccatcacttgtaagtcatattttcccactgttatctatggctgatgggatggaagattggttcattttatttgaacctaatgggtgtaattagggggcctataaaatagctagaagtgttacttctgatataagagtgaactcttatgtggctcaaagttaccctaggtggatgaaagcttttttaatttaggagaaaagtattgccgatggttttaggtacttattttcattataggtttttatttctaggggatttataattgtagattttcttatttttctattgagttaattaggttttaggaccttcctatattttatatatctcagctattatcttgttagctgtaatgttggaattgtgaatcctaagatttaatcctgcaacaagaaaagcttcatgagaagaagagaagaatagagaagaagcttcaagagtgaagaaggagcaaaaggaagaagaagatgtcgtgacaagaaggtcaacgacacatgaagaggaaagaacaaaatcaactaaaaagagttggtttgttttgttaagttgtgttttgtaataatgggccaaacggattattaggacccaactaggtaattatgttgtctcttagactcaaggttgatgttaagtgtctaaaaggagcaaaacatggagttagagtcccaagtgtagttagaagtgtcaattgggctgtccaaagcccattggtcatgtccacttggaccatttttttcattggttttattggttggtctttaatggacaatggtctgaaaatttgtccaagaccattaaagaccattgtccaatggtcagcccatggccagcccatacaatgatgtttatatacaatgcattttcacacaatctcgttaaaagctctatttataaaaccataacatcaacatgaaatcaaaccaaaatctgtcatccaagttgcaaccttagatcggataccatcacaacctataacaatctgtcaaagacatacatcatcaaatcagccatgtactgagaataataaacacataaccataggctcagagcttaagagaacagccatgtacctgtttcttcccagtcttgaaacgtttatgcaagggtggtgtttgtgtcctcttgaccttggatctcatcagtttctacaataagaaaaaccgagctattaatctaaaagctgcagtccaaaagccatataagtttactattataaacgagttcaagatgtgaatattaccaacttcttgaaatccacgaaaccagtttctagtacataggagggcttgcacattagtaggtaaaaggcagcttctatatttgttaagcacacgactacctatactaaaagctgactccgatgccacggtagtgatcggaatgcttaagatatcacatgccatcgatgacaattctttaaaacgcgagacattgtttttccaatatgcaataacatccatatctctaaaagagaccatatctaacacaggctcttccaagtacatatctaatggtgattttccagttccatttctttcagaaaagtaagagtaaaacccctgaaatatgaccaacaaaacaaaattctcactaagtataagaatgcattttcagaagcattatgctttaaaatgctttgcatagtatcatttgcagaagcattatctacagttaaagtaaaaactttcttctcaattccccaatctttcaacagctcactaagcttcattgctatagctactccagaatgtggaggcgggaaagcacagaaagataagatcttcgttttcagaacaccatcaacatctacataatgagctgttaagcaaatataactttcaacagttaaagctctccacaaatctgttgttaagcatattctacccgggattatagctaacttttccttaagcttaattttctctctttcataaatcttgtagacatcagaagctacagtatttctgctccaaaattctatataagggttagcatatgtaaaggcttctctaattctttcatattcgacaaacgaatatggaagattatgttgaactaaagccactgcaatcatttctctaaagaccatcatatccacctttctgctaattctaggtgtacttccaggagtcttctcacaagatctcatatgacgattcatggtattaggaccatttcgtctcagattcaagtgataagtctgctcacaatatttgcatgtaacctcagttttcccattaggatatttctgtcctctatcgaagtttttccagcatgcagcacgaaatctacttacactacttttacctctctcaactgtccctgaagaagcagtgtcatgaggtagtatctgatccatttctggatcttcatcgtccatttcttgatcctcaagattaaagttgttttcatcaaccaagttttgagtatccaattccatatttctgacacaaataaagacataaacacgtttagcagtgataaacaaagactgaacagagggtcaatgggctagctccattagaaaagtacataacaagagggaatatcttatccagtatggataaaaaaaaggagaacaaggatccttaaacaaaagcaataatctagtgtttaagcaatatacaattcacaaattgttaacttggttgactaatccaaatgtgaccacatcatatactagaagagctaaacaaacataaaaaaaacctgactttagtacctcgattagacaaaagagaggatatggaccacgatgatctgaagaaaaaatcgacagcgtcgttgtgagccgcattgttggcgatggttgaggaagtgggtctctgctggacccctccaatggcttgtttgcctcctttcacatctccagataaacaacctcccattctctctctctctatctctagatttaaaccctaaaaatcccaaatttggagtcagatcaaaccctagatgaattcgcaaaatttcacaatgcagattgtaatatgattaacacaggattctgcaacttctctagctctgtatatatatatgtatattgaaaagggatacgcgtaaaagaaaaatagaactggaaaatctgaagctttttgatttaaaaaagcaaagaagattttctcaggaaattggttcgaccttccaagaaatcgaaacggttggttgaatcctttgtttggatatcaaaacgcgttttggttttcgaatttaaaggaaacgtctttcgatcatttaacactttaactagaaaaaaaggtttcaactttcaattcaacctaaaagttttctcgtttctgcgaattttccttctcctattctctcataaatttccttttcgcgcgaggttgtttgtgctaggaatataattagaataattaaaaatgaagctaataattccaaaattttaattagactagatattgtttgaatattaacttacggttaataatttaagtattaaggattaggtagtgttttacaattttgggtttagagtttagcttttcaactctatctttttagttttttttagatatttgatttagattattatgttaattatagaaattaaaatctatttttcttaatttgatatgattatcatacttatgttttgtttatgacattgtgtatctcgtgttttttttttgtttctatttattttgactcgagtcttgtttgttgttcttctacattggatggtcgttatacacgtgtgaaaattcaaaaatgttgttcctatcttgcacttttctgccgccaacataaaagtgttatataagagactaattcaactagaggtggcattttctctgagttatgcagtgagttcccaaaaaattccaaggaagtctaaatagcctacaccaaatattaagcctaaaagagatttgaaaagtaattgaaaagtaatgagcagtgacttgcttgggatttcagtttcaaaatagtttgtcatatgttttgttttttccccatgaattgttggatttagtttgtctctcgctgaatcaataaggtttgctaggaaaatcgaaatcaaacactaatttcagcacggacacaacaaacatttggtttctaatcgagataaattttaacatcaattccgacatcaataagggactggacaacagctctgattttcccttcaaacttgtcttggtcccttggcgtataagaagccgtgtacacatcagcttcttttgcacgctcagacaagatcctccctatggacatacatgccgggatatcacatcttgacctcagaacagcttttacgtctttagagtttgttcccgcaacagcaacttgcctacatgtaacacggtgcgtgagagatgccgaaacaaagcgctttgagatgaagacatctagagtgaacggctccatgtatgcaactgttcgttgcttgaacgacacatgcttgtctggattcttcgactttttctctttttggtatgtgtatggccggcttgtgtcgtcatccacgtagtcttctacaccaaagaagcttcttggtgcaaaaacagtctgtcaagaatggtaaagccaagtcaaaatagaaacagatacaaaaagaccaagaaacgatagctgaaaagactcaatacttagaacagagctgaacttaatgattgcaaagtaggctcagtaaatcttataaaatccagctattgcatactgactcatctaaatggccagactaaaaatattagcacaatcaaacaccaacaaaccattgagaggtggaacgatc

SEQ ID NO: 31833 - DNA, 1135 bp, Arabidopsis thaliana landsberg
taacatatttaagactccatgttcgtagatcgtagtcgtaggtgaagaagtgttcatgtttacaatatttattatggactagatatctgtatacttgtctatacaatatttattcgtgacatgattggttgatatttgttagaaaagtccaaatatcatgttataaaatacagtacgaaagccttcaaatattaagtctttgtttttcattttgggctaaaatccaataattgcaattttttaaaaacttttctgctggtgtacagtataaataaagactttgcggttgtaaaatatcaaactatatgaagcaaagcaaaacaaagcaagaacaaaaaatgatggatgagaaagatattccaaagaatttgagggaagaagaagttagagacgataatgtagaatttttgaatgtagtggtatgtagaaaaacaattatccagtctaaaactcttcaaaaattttggatgcatatcgagaagatgacactagaagtttttgatgtaataagaaaaattagaaaagaattgtaacgagattagagctttaagaaaagacaaacaatattatattcatattatattatattatcgtagaatgtatggttaaaaattatgattattaatttatgatattattgggaccatatttttacatagagattttaaaaaaattattatcttattatcttatcgattttggttaatttttacattgacccgacttgggactgacataatttattaatttatcgtgtttattaatttatcgagtattaatttatagagtttctactgtatctttgtacccagtggcggatctagaaacaaaatttgtatggggcacatattaaaatttccaatattaaacttatactttaataataaaatattacgtgaatataatttccacccttaaaaaatatttaaatttgaaatctaaaaaagacactaattttaaagaaatatatctaaatatacttaagtacatatattagaaatatttgattttgaaatagcatagttacaactcataatagaaaatgtaaattattaataaaatattacttaaagtttacaatatctaacaatatcacacagtttaaagtttatactctaaatcaagagtattaata

SEQ ID NO: 31834 - DNA, 1233 bp, Arabidopsis thaliana landsberg
atcgggatactgattaataaaaagacgagaaatgttttttattttactttttttgtaaccgaaagaataggttatatgttacaatttgatagatcatatacacagaaaaaagtaaattaatatgcatacatactgactatggactctaaacaaatgataatgtatgcgtcagtatttacgtcggcgcattaaattgatgacatttttaaccaagcattttagcaagcgaaatattcgatttttggacaatcgttttattgatatttttttttttcctcttctcaaaagtaaatttataaaagtttggatttttcgtttttttttttgtttcgttcagatttttaacgtcaatggtggagaaaacagttatattggttggtgacagttttgtttctctaacggtgatgaggtgtggttgttcctccttctgaggcgagttgtgtctaactttacggcgactacatgcatctttctagtcgtaccactggtttagggaacaccagaggaaggacttgtcggaaggactgttgcaattggctgcagaagttattagcgccagattcgtcggatatgaggtggatgagtgtgcataacgacagttagggttttatttaagctaacagctctaatcatcgccacatttggttttgtctaaccagatttgaggttgtggcggtcacggatgacgcttgtgttggtttcagcgctggaggtgagggttcgatctaggttttcggttgcttgagtggggactagattaacgagtcagttgtttatgttgaggagttccatgtcggctctgacgttggcttccggttagtggcggaccgggcgggaatcgataactttggtcagatcgctttagtcgggtaggaacatcaacgaaggatcttttgctatcgccggagttggagatggagccggtgctaccgaattaccactttttgttatatttccgttctagtgttcactaattttttttttttgggatcgattacactgtataagtctaatattttaatatctttaagaataattagttaaaaaaaagatatttaccaatcattttcctatatatttcttactattggtggctagcttggtaaaaaactcattttaacaagatcgatgcctttcctgttttacataacgctcatcactatcgtgcaactctgtagaagattggctcattgtcgccttaccacggaagagaccaagttacaggttatatag

SEQ ID NO: 31835 - DNA, 889 bp, Arabidopsis thaliana landsberg
taacacatatgccgatgtaaagacggatgcgactgcagatattatcttactgcaatgcaatactaagtattattactaaggatatcagggagatacggccaaaagtgtaaggaaaaagagaaatttagtttaacctggattgtcttttgtagagctcagattctttcttcaaaacaaagctgtaatcgatgatgaacttaattaatatctaaattatgtaaagctgagataaacaggttgcgagatggacacctatactcatcactgacaccataggcaaagtgaatatcctcaaactcctcgagaacagccactgcacatgaattcataagtttcagagcttgctcatcatttggcttctcaaattcatgaacgtcagaaaatctatcaaaatccaaagcaagctctatgtttttcacttacaatataacgatagtaatcattcaagcaataggcaggcgtttgtttgtcaaagctgtcaactactgttcttatatgttttctaagttccaaaaagtagaagcattgcctaataaatcacaatttaaagcacagcacaaaagcaatcgcaatgtaagaaataggccgaccatagcattcagaagtgtataaacttgtaatatagcattatagcttaaggaaatcgtagggaacatatgtatattttttaacaagtctaaggcttccatgcaagacacattgtctaacaatgaaaataaacaaagactaaaaagcatattacctgtgaaaatggcagccatcaatcctaaccacaacccaagttaaaggtaataatctactctcaaactgaaacgacttaacataatctggttcaattttgccaatgtcttttgcaaaatgtccaagatctttatgaagagaggagtgc

SEQ ID NO: 31836 - DNA, 548 bp, Arabidopsis thaliana landsberg
  unsure (1)..(548): unsure at all n locations
tgccctggtgagttttattaactggtaattgagctcatttttcgggcttactgatcaatattacaaggtttttggcttgtgcaggctgcagcctcaccagttatagcgacacttctgaatcaatcgagggataagaatgggaatacatacctcaaaatccatggagttccttgtgaagcagtctacatgttcattaggtttctatactcttcctggtatgttctatgtgttacaaatgctttcgtaatgcttgtttctcctttgaaccatgcctgatattaaaacctacagctacgaggaggaagaaatgaagaagtttgtgctccatttattggttctgtcacattgctactcggtcccatctcttaaaagactttgtgtagagattctcgatcaaggatggattaacaaggagaatgtgatnnnnnnnnnnnnnnnnnnnngaaactgtgacgtgacaaggatttgctttgtatgtctttccatggtcatcaaagacttcaaatctgtatcttcaacagagggatggaaagtgatgaaacgctcta

SEQ ID NO: 31837 - DNA, 572 bp, Arabidopsis thaliana landsberg
ccataaacaatgttggggcgtcaggatcacgctatcgtaacctcttgcaatggtttgaactgctttaacagagccttgtaaaataattggaaaatttgcttttgataatagctaattagcaaatggaatcagtttgtccataaatatatatgtaatgtcgtaaatcagtatataatagaagaaaaaaaataagaaatttgatgatggcaaatactttgagtaacaacacaattggctatcgtgtcaatttttgagataaattaactaaattacattgatacatagtatacagtattatgaaaatgattatttaagaccttggattaaggtagcgaacgtgcggtccacgagggaatcacgtgggagtctccctcggactcggcggagcaagcgggtcacaacttttcatgtcctcgtaacttatgatttctatttctttaatagttttgttttcttttcgtaataaggtttcgtaatctaagttgatcaacgtattacactatttaaggttttacattacactttttgggaatcgagagagtcgagacgctcacgtgcttaaacgcgcttat

SEQ ID NO: 31838 - DNA, 732 bp, Arabidopsis thaliana landsberg
caaaaacaatagatatgaagagaaagatgaagttatcgttattagaaaacagtgtatcgaggaaaacaacattcaccaaaaggaagaaagggatgacgaagaaactaaccgagctagtcactctatgtggtgttgaagcatgtgcggtcgtctatagtccgttcaactcgatcccggaggcttggccgtcaagggaaggcgttgaagacgtggtgtcaaaatttatggagttgtcggtgttggaccggaccaagaagatggtggatcaagagacttttataagtcaaaggatcgccaaagaaaaagagcagctgcagaagctacgtgatgagaaccataattctcagattcgagagttaatgtttggttgtctcaaaggggagacgaatgtgtataatcttcatggaagaggtgttcttgatttgcatgtcgctctcaacgagtatcactatggtgttattggtagggttcagatccttaaggagcgcgctcagtcttggtcatctgtacctcctccagtcggtgtagctccttgtgctgtgaatgcctctgtcccaagcggttttgatggttgtatgatgcgcgttctaagccgagttcgtcaagagccggttctgttccaataccaggctctttatgatctttatgatccgcttacaaaggcccttagccctttagcatgtcaatgaatatagaaaaatatcaaagtatgaatttggatcctaatgatga

SEQ ID NO: 31839 - DNA, 973 bp, Arabidopsis thaliana landsberg
cataggtatttgatcgatatctcccactgagtcttaccctgattatgatcctctctattgatacgatgagggggaatggatccagctttagtcattgccctggagctaaaagattgttggctctggaaatgccgggctagaggagaacccggatcctgcaatacctttaacaagaagtttctattcatgtgtatcaagttaagagcatcaagacatgcttttgaccttctaggtgatgtatcatcatcattttctgagaagcccttggtgtgtctcatctttgggtcaaaccaagcttcctcatcatcactcttctcctttttcttgaactctttgtcatcaaaatctgatttgcttccatcagtgttatcatcaacttgaatgttgttatctactctaaactcttcactgtcactgttgcttgattcctcagacatgagataaagcgggttcaacgaaccaaccgcgggtgaaatgccaaccgtcttgttaaagacacggttacgttcatcaccatttgaagagttcttatctgaagatccaacctcactcaatgaatccttctcttttgtgtttgactggacaggataagtacagctacggtggtgacggcctttcttcttagacttgtcctctattacaagtgccttgatcaaagctttcacagaccttttgatttcagaatgtgtttttcttgacctctcttctgaattaagtttcttggacttctcctctggattatgcttcttttttgttttctctcctgagttagaagactctctggactttactgcagaactaggcttctttggtctttgcccagagtcctaaagcaatgagtcccattggtgagagagttaataagaatataccataccgatgtaagatgttaagtttgcatcaacttactacatctgttttatcttccagcttgatcttgggtactggaataccatctggtgatgatggtata

SEQ ID NO: 31840 - DNA, 998 bp, Arabidopsis thaliana landsberg
actaatttatcacatcgaccaggtggttctccattttaatttggatttttagtgttgtaattacggccacacgttgattaaatccactttcggtgtcaacaataattaagttgttgataacttataaaaattagggacgattacgtaacgatttcttagtggttaaattttcaacattaacccttcgatatatctttgaattaaataatattatatagttttataacattcacgtaaatcatgctaatcaacattctattagggcaatataggacaagcattccctctcaaatccaaacacattccaataccccctcgtgagtttttattttgttggtcacccaaagttttttttttttgtttggacaaagttaccaaagttaagtttacatcatagagacgcaatgattatatagtcggttagactaacaaaaataagtgtaatcgtaaaataaatcaaatgaaaacactttaatgaaaaaatcgttattattaaactgtagaaaggaaaaaaataaaatcaaagttactaatatcacttgattaaaccgttcaggtgtttaggtatttacggtattttgctaacaatttatgagtgataatctgatatgccttttcactcggatgataagagtcgaagaacacatgagtcgatgcatccgaacatgtaaaaggagtaaatttattgcacaattccatcaactcaatttttcctgtaccacaacatcctttatctgccactttaaatcctacatgaatccacaaacatatataggatgttaatattaacattgatgtacgtaaataaataaaaactatatgaattcatgtaaattaccgtaatttgtaggatttttaattatatcgagaagagtatcgtaaacgtcgataaatattagtctgctgggcagttctttctttagagtatccaaactagaagatagctttgaattgaaatgaagtgccatgttattcaacttttcataacattttctttc

SEQ ID NO: 31841 - DNA, 1047 bp, Arabidopsis thaliana landsberg
  unsure (1)..(1047): unsure at all n locations
tcataccttaactctacgaaattgtgtaaatggctgttttgtttattttgctccaaaactattgcaatctcggaaggtgtctttctctgctttgcatttaaggactatattggttattaatctatctatgtttcttacaattgacatctctctaaattttcatcaaccataatatgtctactcttcacaagaagagatttctgagaagatagaggtaatagtttgggctcttcagcctctaccatctcttgtaaccaaaagggtgtgtgtttgaagttaggagttgtaattacatcaaaacgagtagttgcgatccgtaagctccaaggtaacaaacctccaaacattgatattggtgggaagagatgtccatttttcaaaacggaattgttttttttttttaagtacatttctccctgacggagctagctctaactttatctcagtagtatcagaagagatgaacgaagatctgcaaaaaaaaaaaaaacagtagagaagaactctttgtaaggtttcaaattacttttttttttctaaagctcttacaatggtgttcatacaacttttatataattattaatcaaactcctaataggttaaccatatgtcctcgatctagccacaagcaaatgggcaattaggcaattaggtgtaagacacaacatcaaaggttgttttgatggtctagttttcctttcttaccattcatttaaatgcaaaatacctcaacaaacaatgcaggcgcatttgcattaggatccctttcttctgcaatagagttaattggactgatagatcagtttaatgttgtccagtaaacaagaaacggaacaataaaaagcaaaaactacgggaaaataaaaagttgtctctttgttcgtgcttaacagaaacaagaaacagaaagataaaaagaaagtnggattatgaagagaaaatatggatcttggttaataatctattatttggtaaattataatctcattcattggcattcttaaattttgctcttctttgatttcataaaacaaaaatttatagtat

SEQ ID NO: 31842 - DNA, 592 bp, Arabidopsis thaliana landsberg
tgtggctagatcgcaggatagatggttaacatcttaggaggtggttaataatcctataaattttgtatgtgccaccattgtaagagcttcaaaaagaaaaaaaaagtaatttgaaactttccgaataggctgtttttttttttttttgtgcagattttcgttcatctctatatgatactaatcatataaagtcagagctagctcagtgaaaagagcgatgtattttttattaaaaaaaaaaaaaaaattccacttaggaaatttccatcgcattttcctacgaatagttttcgtaggaaatttcttatcaaattcctacaaaaatatgttttttatgggacactttcctataaacatttttgataggaaaacggtaaaaaacgtctgtttcctacaaattttcgacacttttcgctgttgaaaaactgagtttttcttgtacaatgtttggaggtttgttaccttggagcttacggatcgcaactacccgttgtgataacacacaagttgagtcactattgtcaaaaccattatttacttggattcattccatggttgtgagaggaagtgaaccttagaagaaaattcaacg

SEQ ID NO: 31843 - DNA, 542 bp, Arabidopsis thaliana landsberg
  unsure (1)..(542): unsure at all n locations
ggctctcagttccatgaaccggtcccgcagcaggcggatgacctcatagccgtgtcgcggctcctcggccagtaggcgcagcaggtacaaccggagccgtccgtgacggaaaaccgggctcatcgggtctcgctctccattcccgtctggtcgcgcaggtcctgcgcgcggggcccactagtagtacgtcggggggtctcaggggggttgtcccccctgtcgggcattgtgcgtcggccggggcagcgcagcagagtgatcgcgccggacagcgtgctgaccgacacgtgcccggtaccggcgcctacgttaccgaacacgacgcgggatgccggggccttgcggacttggagggagctgaactccgtcgcgaccttgcccgacaccgtgttcagccgtacggccgcgtcgctgtcggcgggcagtcgcagcgtcacgtcgcccgccacggtggagaccgaggcgcttcccgtcgagtccagcgtcacgtcgggcgtgacccggccgctcacgctctncgcggacaggccggacagggcgct

SEQ ID NO: 31844 - DNA, 1001 bp, Arabidopsis thaliana landsberg
ttgaagccaatttagaggtacctgtttggttcctggacgagacacccaaccaagtcgattgcaaatgcgatgcacatgtgtgtctacacatatgccttggacatcattccatgctatatgcagaatctgccatgtagagaacagaagagaaatttgagaagctttttgaaaacatttcatctaaaactcacaagatataagtaataatatagtcgaattttaccagatgggccatcttgggaccaatccctggaagagacagcaggtcgtccaaagagcttggaatgtctccgtcatatttcactagacaaattctagctattttcttcatataggtagccttccttgtataaaatccaacctgaaagaaaaggcaaactgttaaaccaagattttactaagaataaggcctttttatgagaaaatggcataaaattagcacatcaaggggctcatgttagaggcaatgacgtgaagaagtaagacggcacttggataacataccggatagatcaattcttttatggttgattcatcagctttgtcaaccgcttcgggagtaagaaggccgttttgatgaagacgatgtattgccgctgcatgttgaaagcgtctgaatagtaagtatccatgtacaatcatgaacttgtaaatgcagatgatttgagtgtaaactagaaaagtgaaataagtgtctcttagtagcacaaaacgcaccgttattaacttgatcttttgtctgacttgaaagaagtgctcctagcacgacagcaaatcttctttcctagggatagcacaaaactgcctaatattaaggcatgaacaatccatccctctgtgtcaagcgtgaccctgttttcatgagaaaacaaccaagagaaaatggtgctttctcgaacagacaataagaatccttccgcaagccattcactagctataactacatcaaattttatgcgatactcaaggacacatgtgctttatacggcaaacatataagc

SEQ ID NO: 31845 - DNA, 923 bp, Arabidopsis thaliana landsberg
aaaaaatgcatgccaaatttaacaaaaaaaagttttctctctccactaaaaattgcttttgaagaatttactggttttcaaaagttttaagttgtgaataacctaataaaatgtatataacataacttaaaatttattcctctcttaaaagtgtgaaaattttaaaaacagtgaaaggaatgaataatttattggcttgaatattattgtctatgtatatacataacaattttaattttatttctgcattattacgttgactcctgaattttggcaaatattttttttcttaacattttgtgctcgtatattatatgcttgaatattgattgtcaggtgggatttaatagcaggaagagtcgtaggaagaaaggcaaatgagattgagagatactggattatgagaaactctgactatttttctcacaaacgacgacgtcttaataattctccctttttttctacttctcctcttaatctccaagaaaatctaaaattgtaaagaaatcaaaataaaagctttcaatcataaaagtagaaaaaatcttgaatgtcttctcatcatataaatgattcagaaattgttgaatctcttcgcaaaacaaattagaataagatcacctattctaattcagtgctcttcattttcacttagtttacgggtaatttatatggttcaccatcgttgctcatagttaagaatcatactaattggtagtccaagttatatcaattatcaatcgttaagttgcagcttacaacacaatataggaagtgtgccatttcaaagatattgaatgaaagaacaatcaccaaaatgttaaataaagcgatttttagtgtatacagtcgacagcaacattaaaagataaagattcttacagatgattaaccattctcagaatacagattgaacactcatc

SEQ ID NO: 31846 - DNA, 1897 bp, Arabidopsis thaliana landsberg
gattttgttctccttgtgcctatcttgaagtgcgttaatggcaggactcaagctgcaaaagtttgattttcatataacgaatgacaaaaccacgtatcagatgttttaacacgcttcactaaccagtattcgatcaacttgcacatggaggctcgatatgttgatgtgttgtgaatgaaagcaagaggatgaactcgcccatttctagagaagaaacagaaggagctttagcactaaaatctctatgattagggtgtggaaaccatcaattgaaaaccttatgttaagctgaactgattgttagtacgctgctcgttcctgcctgaacagtactcgttgcaggcttttaatagatgctaaaggtgaattgactggaagaagggatgaagttggcaaaacatgaagtgggacttcttttctaacataccccgcaccactgcacgtaaattcctaagcttagtaattacgtaattgaaaaattgtagtgttcataagcctagaagcgtatgttgagaaatacctggtatctaaatttgaacggagcattgctttgcatactttcagacatgtccatcaagtcaattcctattgctgtgctgctgagattgcctgatttgtgagtttcatctcttctggtgttgttggcctaatattgttgaaagaaggccccaaaatctgaaacgcgtcctccaccctactcaggcacacacacatacaaggctcagacatcaatgtgtatatacatatcagccaacggttcagtcagaaatagtaccatcattgtcttaagaattcgaaaaatgagttgtattatgcacaaattgtaatttgacaaaattgaacataagctcgagtaaaatgctatagcttttggaaaaagagaccttagatccggaagttgtagctgtatcacttgtgtcgagctcaggattgtctccccgagcagaagacgatctctggtatatcgagtccgaagaactaaatgaagattctaaatcgataacagaatctttatttgcaagaaccaggctcattgatttaggaatactattcggctttccatcagaagactggaaagcgataacttggattctgccaacctggaaacatcaactaagcaaattcagcaatatgtataagctgaagagaagtatttttgaaaagtttcaagtagctaatccactcatagcaaatactaactaaccttgttagcatcttcactaaaacaggaaaagatgaggccaataaaaccagaatctaaaagctgatacatagcttgtgttcgaacatctgcaggcagaaacaggacataaatatgaggaacaagataaaaacatcgagaagttacaatgatgatgatacataccgacatgggaaggaagaacggtaatatgaggatgggagtggtaccatccaatgacccgtgtagttctgcccgttgatatcgtcattctgtgtcgaaattagtgaaggaagactacaaaacactcttgttttaaccaaaccataactaaaatacacatagaccatcaatctgaaaaaagcaagtttataaaaaggatatatcagcctgagcagaagcagcagccagttgttcaggattggtttcaactctatccttctgccgatcagaccgtgactgaggcgatgctccccagatcatagctgtggcacttcccccgtcctttgagtactaagtcagtttccaaaaccacaacgaagagttaacataaacacaacaagatttgaatcagtgattgtctaggaattgttcaagccttgtataccatcaaaaacagagattacagagaggcaaaagccaaactctttctttggactgaattgagatcaattcaggtaactaagaatctgagcaatatcgcctctcccaaagatg

SEQ ID NO: 31847 - DNA, 566 bp, Arabidopsis thaliana landsberg
atgaatctaagtatatgctaatttcaatgactaatcaataattctgatggtacgtcgtatagtatagaaaaatggagcaaaaaaagacatttgtgccaaaatcattacgtttcgataaccttttcttgaaatttgcatcaacagctacgtcattatattacacttgattagtttgtttatattcattgataacaataaaaagaagctctgttatgattatgaactacaacagagaaaggatataataacctttttgtttggtctttcgtttgatttgcttacacagcattgcaagcaaaatcagtgtacaagaagaattgggattggttgaaaccagaaggagttgagctaaactcgaaatggaacgaagcagagaagtatatatgcaatcctttatctggtgaagttcctttggagtgtttgtcttctaaaaccctaaattcaagatctttcagaaacttatccaccaagcatgctccactcatgattttaccttctaattataatcttaacattccaagaacggttaatcctaaagttagaatcattcatgaggattctagatc

SEQ ID NO: 31848 - DNA, 849 bp, Arabidopsis thaliana landsberg
tttttcaatggaatggaattaccattgtgacataactttttgttttttgtcaaactgtgatataacttaaaaccattaaaaaaaacatgtgtccctcctttaataagaagcacattgtgacaaacagagcattctctctctctcacactctcctctgtctcgctacctctgtctctttctcgagcactcactgttttatttaccagaaattgtgttgtatcattacatgcatgcataaaatgatggtggtggagaaagaaagaagcatagaagaaaggcttttgcagctcaagaaccaaaacgacgattcagaatgtcgtattactgcttgtgttatccttagtactttcatcgctgtgtgtggttctttctcctttggtgtctctgtgagtttcttatcctcatcattcttctttgcttagttttttcttgatatagtaaaaagaatttttttctttctttctgttgtcaacttattgtattaattgggaacgaaaaaactttacaaggattattacaaccacatatcttttctctttaaaaaaagaaaaaattacaaccccatgctatgggtttaacataaaaaaaaactttaataaccaagaaagggcagatttagattcactatatttctagagagtattaaacccgagaccggagtagaaaactcttatatcttgagatttttacaactcctacaactatggtttaagccatataggaacatttccggcaacgctttataaattccggcgggaaagcggatgtatagatagtcttcctgtcgttatttaaggccaccattttaagaaaaactattaaataagccgcatgcatttatataacacg

SEQ ID NO: 31849 - DNA, 1351 bp, Arabidopsis thaliana landsberg
atattttcatgaataatataaattttttaagttgattacattatttatcaaaaacagtagttaccaaaaataatagtttcatattaaattttacacgttggtcatataggggatttttgcgtactgcattctgcattgcatgtcaacacagtatatcagcatgtgatataattttactataagtagagcattcatcagtcgtgaattttcggaatatatattgatgataacgtcggttgttaaatgacacaaaaataatgacgtcggtttgagaaccgtcgttacatcgtccgacgcaaattatattggcttcagttaatcaaatgacggtaagttttacgtcattataatttgcatcggtttaatgagtttagcgacggttttcaattttgacgcaaaagtcaaaagctcatgctttgtatcacttctacaaccgacgcatatccactgtatttattttctatttttttccgttttctattatttctgtatttctcaatacaataaaaattcaaactaaccaaggttcagaaaaaaacagtatattatatatataatcaattgccgcccaaaaataataatctgttttacaatgaatataactgaacaattatacatatatctagcaaatctatctcttggcatttctaaaataataatctccattgaagagctgcaactttgtgtttgctaaaactttttcacctgcaacaaaatgagtgtaatgggagatttaaaaatcaacatatgcatacaaaaatattccagaaaaaagagagagataataaggacaacaaattttgagtcacatcatatttgatgtgatgggctccatcccattgataaataccttaatcaaccgattgtcagctgaattcctcatgctaatacctaactatacaatattataattgccatatactagaaaactagcagattacacaacaatatagaaaagacacaaacataagaaagaagcctacgcgacaattactacagatagagtgtatcttttcgggtaaacattgtaacgtagtgaaagttgagagtgaattgcctaacaaccgatagaatgaaccaaaaagaaaaaaagaacatctttctaacgcccaaaaaaaaaaacctaggttttttttatttattaggtacatattgtcttttctagtactaaaacaataatgactaagtctcatcctcacacgcaagagattaaggttgataatatattgtattgttgttagcataaattaaaatggatgaaaccaatttctatcaaatacatatttttttttagcccatttagagtacattggaaaaacaagtatttcaactaaattactctaagacaatt

SEQ ID NO: 31850 - DNA, 2526 bp, Arabidopsis thaliana landsberg
atcaacgaattcagaaaaatgaagaagatgaaaaaagtttgttattcttcttaattgttctgttacatgaaacactctttatatagtagagtgttccggtttagtaaccggtttacattataccaaacaacaatacaataaccgaatttatggttaatatcttaaattagacctatttcaaaacaagcctaattttcacaatagtcaatttttttttgttgaatatttggccgagaactagacttcaataatggggaagaataactaaaatcggttctttctcctctcccaaagtcaactagattcaccaagaataactaactttggttaatgattacatgttcttaaagttatggatcttttgggaaaaatggactatttggcaaaaagagtgtgaacataaaaaatacaaatggggcgttccgagaatcgaactcgggacctctcgcacccaaagcgagaatcataccactagaccaaacgccctcaattgatatttcgttaattagataaagcatagctaataatacaaacttgaattggtcttgcatttgggccgttaacaggccttgctaagtcatatgtggtgtgtatttctccatctgctattgatctcagtaaaaattacataaagagagccacaagcttactgactctcttgtgtatcgctctctccgcatttccattaaccctccaattttcccgcctttgtctcactctcttcccgccttgcactcgccggggactccatggttcagaagcagcaagcctccgccggtccgggtaccgagcctaagaagcgtcgccgtgtcggattttctcccgccggtgagtcatttcttcttcttgtttgttttcctttactcgcgattaccactttcccagctccgatttcgtatttttctttaatccgttgatttttcttatgtgcagatactggtgtcgaggctaacgagtgcatcaaaatttatctcggtgcgtatttgatttaaatcatttgaagttgattttggggatatagtttcgtacgaaaattagggttacgtttcctgctttcgacctttttggtgaaattagttggccttacttcaatttttctagtttttggcttttccggcgaactttattgctttcaaaaggtagttttcagttattgaacatgtagagcagatctgtatactgagtttctgttgatttatgtgttttatctttcttccaattgatatttgttcaatgagttgtaaaagtattttctgtgtgaagtgtcttaggttgctgtgacataattttgttttctgttttggtaatcgtgatgggtgatgttctagtttcaagcaaagaggacgttgattcctctgatatttccagcgtgaagccagttgacttgaatgatttctttgatggagatggcaagatttatggttaccaaggtttgaaggtaatgtggcctcctaccattagattattttgctctttcttaaatttctggtttcgcattgttgtggttctgttctgacatattcttgtccacaatttattgatgtcagataaatgtatggatcaatagcatctcattacattcatatgctgatatcacataccagagcaccattaacgtaagtgttgattgtatttgctattcgttggattggttttatacggcttttaaagggactaatcatcactatcctgttactttctgttgtgtgtttgaagggagacaaaggcatcacggacctcaaatctgctttacaggtaccaatcaacttggacacatgcttcttttgctctcattatattattctgattgtctgtttcatttcacccacccagaacatatttgctgagaccattgttgataccaaggatgagtttctgcaaaccttttcgacacagagagattttatcaggtgcataactgcataccttctggttgctttcataccatctcaaatttgttcccaacttaattacgatagatctctttgtagtctctgaatataatgttgaactttgtcattgattgttgttctacaaatatggtctcgaatggagaggtaatgcatgctggagcaacagatggaagcagcaagaatgctgaagtggttccttctgatccccaggtagtttttgcttaatatgattcacgtatcctatagtcttaataagtttgagcaaattagtttgagatgttttcagcttcaaatagaacttataaaggttgattatcctcaggttatacggatggaaattggttctccaaatgctggactcctctatagccgattggtaccccttgttcttctttttgtcgatggtaataacccacctaccctttaagtcatcttgaatattttatttctcttgttagtaacttagtactaacgagatgccggctcattcttttgatcaggcagcaatccgattgatgtcactgatcctgactggcatttatatctcttaatccagaagaaagaggaaaaagaagatcctttgtatcgaattgtgggctttaccgcgatttat

SEQ ID NO: 31851 - DNA, 271 bp, Arabidopsis thaliana landsberg
aaaaaccatgcgaaatccactatcatgagacacaaccctgtaactgattacatttgcatgctaacgccataacatttacgtgatgactctatgttacacaatgatcctgcgaaagatcatccccaccacaacagcataaacactaatggcacaaccgcctataatatgaggtgcgcaaagaacgcagtgcccaactcttaacctcccgacaacacaaaaggatacaatctataccactgactatcgttcctatgcaaaatgcgttcttact

SEQ ID NO: 31852 - DNA, 385 bp, Arabidopsis thaliana landsberg
aaactcaaatggatgcatcataggtgaaactcctttatctgaaaagaccttcttgatgatcagcattatctatggttacctagaaaagcacccaaatagtaaacctctatgcgtgcttcctaaatgggtgttgaacttttggaaaacaaagtttggtgaattgaagggcaaggaccttgtgttgctagacttgtactcggcaaaggcgagtacccgatcttagcagttagaggttctaaaccgatggattcaaaacccggagtataatcttcttaggcgccaaacaatttttcaacataatatctgataacagcggtgcagaagcttcagatttctggagggaaatactcttaaacattcctttggtggatgttttcgacagagg

SEQ ID NO: 31853 - DNA, 605 bp, Arabidopsis thaliana landsberg
atttagttctgtggccttattgattatccacttggtttgttctgtccgatttaggtccggttatattctgctttatctaggacaaataggtttagattcaatctggttcagttttttggaatatgttttgctcattttggtttctttcgatttggttttggatatttgcctaaccgtagatcatggtgaatccatccgcagtgattgacgaaattggtgtcaattgtgtgcttaacttaatcctacttgttccttgcatcccaatgtttatcataagtttgttgtcgttctcacacatgagcactgtataaatttttagtttgtacattgtgattgagacaagtcttttcatggctttttggtgaattacaaaagcatcatgttactaaatatctaatgcgagttttgattttgaattaagtaccggtctagtgcaaaagccaacgatttagacatgtatgcaccaaatgctttatttgaagacccttttgacgcatgctcaggggtttgtcaatctttcaactaaagattctttctttttactattgcagagatcattcactcactttgaaattattattttgaccctggcttttcagagtgaa

SEQ ID NO: 31854 - DNA, 803 bp, Arabidopsis thaliana landsberg
gattatttttcatgtctgattggttttgttttgttagtgggaattgatgagcttttgtgtgcagttcggcgaaacggcattctttttataatttttctaaaaataactttaatttctttttagttattaaaagcaaccacttgcatagtgtcttcggacattatcgtcctgtccaaacaacaacttcggacgttatcctttcaaaaggaaagacccgcataaaggagcaatactgggtgatttcctaatcgtttgataagccttttcaatacttcgatatgtgatcacgattcacgatgaatacgaaaagggaattcaaattcaattttgtaagttctaacatagaaagtgatttgggtaattttgacaacgtaattttcaaatagaaggtttgcttaacttcactattgcgccattactcgttaaaaatctatttacaaatcgcatctgcataatgagatgagataatattgtatggaagatgaagtaaggatttaaaaatggatattatccaaagctcatggagtatattttaatgttttagctggtcatcatcaactcgatttaagaaaactgaattcataaacttctagttgactacttaactggtgttcgttgactagtccacttatttaagtttttcttagtacctgacctagaaagaataaaatgaaaaaaaatctacctaatgttcgtccaaatgagatagcaatgtagtactagtcaatagtttgttttttaactcttatagattttgatcaaatggcttttcgactgatacaagatactttcttcaattcggt

SEQ ID NO: 31855 - DNA, 568 bp, Arabidopsis thaliana landsberg
  unsure (1)..(568): unsure at all n locations
gatcttgagggcgtcgtaaatggcgggaatcgcgtcacgcgggaattccacgtcgatgacggcgccgatgacctgcacaaccttgccagtgctcatgtaatgaccttctcgctatccacgttctcgcgccgctggagcgaccgcgaggatttcaaaagtttcagacagcggctgcgccgccgacgatttccgccagttccttggtgatgctggcctgacgcgccttgttgtactgcaactgnnnnnnnnnnnnnnnnnnnnnggcgttgtcggtcgccgccttcatcgccaccatgcgcgccgactgctcggacgcggcgttttcgatcacggcctgatagacctgcgattcgacataacgctgcaacacagcatccagcaattcttctgcgtcgggctcgtagatgtagtcccagtgctcaagcagaccttcactctgcgacgcgaccaccggcaacaactgctgcgcttcggccttctgcgtcatggtgttgacgaaggtattgccgactacgtagacgcggtcaaccgagcccgtgcgatacgcatctgacagcaccttgatcac

SEQ ID NO: 31856 - DNA, 903 bp, Arabidopsis thaliana landsberg
tgaagaatcctttcttttttgaagtacataacaaggaaccaaattttgattaaaaattttcatatatatatatataagagatgataaaatgaattcatgagcttccaattgatccgaaaagccagcaaagtaacatgtgtgttttcgaaaatcaactgatcataatcttaatttgtctctatgaaaattacgaaccaaggtttattagtttttgacaaatattatattatttcacaaaatcatcataatatcctaaattcaactcatcattttaatgaaattaaaaaaaaaaagaaattttcaaaactatgttattaatatccaaataaccgaactcaattataatatgatgaacctgaaaagttataactctacaattttcgtttctttcaattgtactatttattcttattgaaaaacatgattccatttatctttctttagtatttagaacattgatcagatattttgtaattattccgtaatctcataccgcttctttactatctcttatctctttaaaatgattcagtgatcatacacttttttttctacctgcaagttttttttttttttttgcatcactaattgggaaccatgaaaaaaagaacaaacaatagtggaggaaaaaaaaaaataaagataggaaaaaaaatatagagcaaatggattaaaagctctgaaaatagacctgcaaatgagaattcttagagtagctgttcggaccatctcccccactcataggacgtgagttacgaacaatgtccacttttcccattatactttttttgattcgcgactatactttggctatgtctcgcctaacatttatataggccatgcacttaccacggagtgctggataatatatttactttaacaataattgaaacccttttgaat

SEQ ID NO: 31857 - DNA, 1185 bp, Arabidopsis thaliana landsberg
  unsure (1)..(1185): unsure at all n locations
aaacttgtgaatcagtctaactttaaatttctatagcaaacattttctacagattctgtttgaaatggagtactcattcgcttatgcaatgtttgattagcaattactcgtctatctaaatctggataaaaactactaaactggtattaaggtatcacccaaataaatatataatgagctcactgacaaaattgacccaaacaaacaacaaactatatcaaatttgtttccttaaattatagaagagtattgttcagctatactccatttgtatacaagtatggttcatgctactttgttttggtaaaaatggttttgatactttttacacaaagtttaaaaaatgatatgctactatacccttgcaaaatttaattgacttttttgaattttattctattgatttgattacataaaaaaattacactaaactttacaaaaattagtaaattactgctaattttgaatttattttggaatattgaaatggatataatatatataatacagcaggggcacaagtggtgtctacatgaggaataataaatggaatatgtatatctaacttagatatattaaccataaataaaagaaaaagagaggcaaaagttcaattatttgaaggaaaaaaaaaaaaaagtgagtctggtttaggagtggagtgtgtctataaaagatagatgcgagagacgaagcttgctccactttttcttcttcttcttttctcaatctttctctttctctctctctctctgttcttgcactcgcaaatcgcaatggattcgtttgnnnnnnnnnnnnnnnnnnnngagaaagccaaggcgttgcggcgtttcaaccgcttctgtagaattggccgtttcttccgtgcggcggaggtttgcgtcgctctactcttcatcttttggacattttcgcaacttcctttcgtcgttcaaatctccggagcgtttctccgccgtatcgccgccgtcatatctactcctctgttcgttttcctcctcgggaactccatcgtcgttgttcttctcaccaagtcttccgatcagacaaccaccgccgtcgcaagcgcagaaaccgaaatctaccaggcgttcgtcagatctgtagagaatcgttccaaaccgtccgatgaagatttgacggaggggattgtctacgacgacaaacaggtgatcgttactg

SEQ ID NO: 31858 - DNA, 584 bp, Arabidopsis thaliana landsberg
gtaaacagttctggaccatcacagtgaaaggttcacatctatagaatacatatgccaaagactcaagatttatttatacttttattattttctaagaagctttctatctacacctcattgctacaaaacttctcatttcatattaaaaagcttctctcacactcttttacctctttataaagcgcgaaacctctcttctatcataaaacagaattaactaccaaactattcttcgtcttctatctctttctcagtatattccaatttttctctttggctgcaaagatgttggacatagcgtttgaattgatcggagatgccacgtcgaattcgcttctcatgttctgtttctgcaacctcattattgtcatgatctttactggatcattaaaacctggtttgaaggattcacaaaattccacatttgttaactctgtgagctaccgctacgatatgggcaatatttcttctgatgatcattattgtggtgatgatgatgaaaatatgaaaatcgctgctgctattccatctgcacaagatgaccctttgatcgatgactcgagttctgacgaagaagaggacag

SEQ ID NO: 31859 - DNA, 829 bp, Arabidopsis thaliana landsberg
ttggtgaaggcttgaatagagaggagtaagctaggtaacacactcgctcaaaccaaacataacttacggtaacaaattattcattccattccgtacatacgatattaactacgacgaaccaaaaacataaaacatacttattggttcacactttaagtcgaaaagtaattattataatttagttaccagatcctgatccagctctagagccagcaaatgaaccggcagatgaaccagctgaaccacccgaaccactagaactcgaacttgatgacgagctggagctagatgatgatctggaacctgaacctgatccagaacctgcaccagcaccggagcccgacccgccgccaagaccaatccccaatccaacgcccaaaccgattccaatcccacctaggtcaatccccaagtcttttcttgcgagtcggctctcggttaacataactaaacttgaaataactactaaaccaagaagaaaaagaccttcggccttagccattttggaaatcttcgtgtgttaagacttgccgatagatgtgtttgagtttatagtgtaacttgattaggtacaaaaatgaataacatgttcgtgtatttatagaagctttgggattgtgtgagccgctacgtgtatatcaccataattaatttaacctacgtacatttatcatatttcgttttgttatagtttagagaaattataatggatatgcatagaagagtgaataattaagtatatatgcatgtttttttcttaattaggtaggtaagatagagagtgatgtttttatatttttacccttgtaagagaaaagagttgaaaatg

SEQ ID NO: 31860 - DNA, 377 bp, Arabidopsis thaliana landsberg
gaagcttcggtagcgtagcaacacttgtgtagaattggggattgcaagatccggagatgtctttttttttttctcctaacagcaatcctgcagatcggaaagaacaccaacggcgaaagcactctgctgggccgacactgacactgagagacaaagctggggagcgaagggaaagataccccagagtcctagccgaaacgaggaactagcgctggccgatcgacccggcaggctgagctaacgcgtaagaatcccctgggagacgccgcaagaagaactaaagaattgaccgggcccgccaacggggagcatggggtaattcgcgccaacgaaaaacctaccgggctagacacgccccaaaacccctgaaagaaagg

SEQ ID NO: 31861 - DNA, 1018 bp, Arabidopsis thaliana landsberg
gtagattcccctcctcaaaaaaagaaaagtaaatagaaattcaacacacgttactctttaaagtttaaagaacaaagaatccctctctgcctctccccctcaccaccagctcgcataagttttcttgtccccatactcatatggaagaagaaggttatcagtggacaagaaggtgtggaaacaacgccgttgaagatccttttgtttatgagccacctcttttctttctgcctcaagaccaacatcatatgcatgggctcatgccaaatgaagatttcattgccaacaagttcgtcacatcaacactttactccggtccacgaatccaagatattgcaaacgctctggccttggtcgaacccctgacccacccagtccgagaaatctctaaatcaacgtaagtaattgatatttatttttttaattacaagaatacatctctttgccttatgtttagtatagccctttaataataagtactgatcatgagttcctttatatttatgtatagagttcctcttttggaagaagtactttgagcaagtggataggtacactttaaaggtgaagaacaatagtaatggaatgtgtgatgatggatacaaatggagaaaatatggccaaaaatcaatcaaaaatagccctaacccaaggtacatatatgcattctccgttttagaattgtatatgcatatcgaacttctttggttcggccaaaatgatacgtattaaaatcaacatatggaagttttatttagtatacttagttttcggtcacaagcctaatgttactatatttgtgatttatgtctaggagttattacaagtgcacaaacccaatatgcaatgcaaagaagcaagtggagagatcaattgatgagtctaacacatatatcgttacctacgaaggtttccacttccactatacttaccctttcttcctacccgataagacacgtcaatggcccaataaaaaaacgaaaatacataaacataatgctcaagatatgaacaaaaa

SEQ ID NO: 31862 - DNA, 466 bp, Arabidopsis thaliana landsberg
ttttttttgctcatgcctaaaccagctaagccagggggggaggccctcccctaaaccagggagtccctgatcatcctactcaccaggtgatgagagtgaatacccttcatcgcacacatttgaaaacatcgttggttacaactttttcccatcccatatcttgtgatcaaaaggtattagttaatgcgggctttctcatgctcacaatgcaaaggacccaacctttattcccggcttagggagtggtagaaagagtaggtaatttatgcatcaagggaagaatggactttccttcgtcgaagttttcctggcacgaaaggtctatttctgagaagtcgggttcctgcccttcttccaaagctacagttttccggagaatcggatccctcttcccctagcaaaaataggtaatggacaattcatcaaccaggttggcttaagggtgtgccaagttttaaccatccat

SEQ ID NO: 31863 - DNA, 615 bp, Arabidopsis thaliana landsberg
gttacattacatattttctttttgttaaagctgttatatagtacatatttaatatttattctaattaagatggctttagggatacccagatgatttagacaagtaatgaaatcatgtaaataatatattcttggttaaaataataagatatttgcaaacgatagaaacaaaccaagcaagagtcataaataatttcaaaaatttaacgaattttttcatccggttttttactagcatttagtgtatatatactctttatctattacaaaaactcaacaccagaatatgttgataaaataaaagaacaaaaaacgatcgggatccgatgcctatttttgtctaccactatgataattaaggaggccatagaagtcaatgttgcagcccccacaatgtgtttacgaacaataaaaatatgcataaaaaatgaaaaaataaattcaaattattgggtggcgacttggtgcttacgacccaccacccacacacacatcagtggctatataacgactattcaatcttatttgttgcctggaggatggtgatcatattatacgatcgatttatctttccaaatgctatcgcacatgctctcaaagaattcttagatgagaa

SEQ ID NO: 31864 - DNA, 935 bp, Arabidopsis thaliana landsberg
  unsure (1)..(935): unsure at all n locations
gaattagtggttcagagacaacacagtggggaaaaaaaattgattgttgatccaaatgcaaccagcacttccgtggtcactagtcaaactatggttgacagatcaaatcagcagcagcctgagaagctaaagggaatctcaagctcttgcaatcctacagaggaaacaagagtggtcaagagaaagaacgaggctgtaatggctgagaaacaagtcgttcttgccctgaagaagcccgaacatccacagacacgtgtaatcccagcnnnnnnnnnnnnnnnnnnnnnncgaacaaccccggacctgaacttgccaagttgacatcacgattgacaaaggagctcttagaaacgccggagacaataacctctggcctcttccttccttgtattttgaggtggacgtcattagtcctggcgatgccgannnnnnnnnnnnnnnnnnnnaacgcatggtttataaagttgtctgtattccagtttggctcttattaagttagttactctatttacgtgtcctttttcaaaactctaatgtataaagttatgattttacgggcaactctttacttttgagtaaaaaaattgattgtccgaaaatttgatttcggacgataatgtaaaattgatgaaatacatcaaatgactacattaatccttttgacacaatatgaataatcaattttaattaatattattattacttgtaaaacagtatacatatggctcattacttcacagattctcaacactctctcattctccacaatttacgatggcacaccagctccgttttgccgccgcaagagaacccatctcagaagagtatacggcggatgctcttcctcatccacgttgcatctccgacgcgtgtcctccaccgagattcataccatcgtcgtcgcccttaactaattactcattcgtggtcgcatt

SEQ ID NO: 31865 - DNA, 2521 bp, Arabidopsis thaliana landsberg
acgtttcaattattgataacttctattcccctagttaaacttcttgtccagtggctatcaataacactcctttgtatttaccagtcaaatgtgtaccatcaactacaataaccctacgaagatatcgaaacccatcaatagatgcaccgaatgccaaaaataaatacaagaacctgcgaaatccattttcttgaatctctgttttgatatttgtaactgtaccaggatttgcaagttttaaaacatacaaatacgcttctagggacttgtatgagtcatcatcaatactaaacacctcttccacagccttctcttttgctctccaacatgtcccatacaatgttgtcactctcaaatcctcaagtaccatttgttgcaaatccaaaggtacaggcccttcagagaacttactgaacttggctttatagattgatgctataactcttgaagtcgccatcttcatgtactgtctccttgtttcaatgttgcatgtgtgctctaaatcacccttccttatctagtagtaaccacacgtcttcatctcatgggacattattctccactgacagtttcatcaacacaagttatcaaaaagtaatgtcgcttggtacgagactgcttaaagtaaaattgctcctttatagcgcggatagctaagcttatttggtaatcttgtttacttgcatatacccttcctttgtagatacctttctcatcatcttcaatatcaagattcgggatttcgtctctttcatattcagtatcataaaaaaacggaggaatatcaaacccctcatcttcactatcatcaagtttccttgtctctcgatttctctatcctccatttggcatggattcggagtcagtactactacctctgccatcattgcaatctttatcttcttgaattctagccactcgtggactaaacatgatctcaggtgcattagaaccagctaactcatcatccaaaaaatgaccccaaaattctgtatcataacctgtcggaacaacttcatgtacattttctccatcttcgacctcttcctcactattcccaaataaatcttcatattcatcactactgacactagttctacttttcctctcgctgccactgctatgtaattgttcatcgcctctgttatacatggtttctagtacttcaacttccgctataacagcgtcatcatcctgagttgtcggaatctttggggttttggaaccagcagttggtgcttcccatccaatgttatcatcacttcttgcaagtccttcacatgatgatgaaattgctcttttcttactcttcattacagatgaaccagcaacatcttcttctctaacatttttccgacgagaatttcctatttcaatcatttcgctgaaggtaacaaacaaatttaaacccttgttcctcccaacatctcatgaagaacttcaaacctacttcactagttatcaatatcggaggtatcttcttccccgtagtgtaatccatgatattagacggcaaataactaaacctaggggtcccaaatgtcaaatctttattcatgaattctttccaaacaatatcttccaaactagaaagattcatccctgcagtaattggaacaattctagacattagaattttgttaatttcaaaataccattcttgaatatccgagcattcccattccccgcaaatgaccatacaataactccccattggaacctacatacaataacatttcacaaccatcaacaggaatcaacaaccatcatcagatttaataaccgcaataattttttagattttacctcctcgctcatgtttctttttgggggagctaaaaaaaaacgagattgtcggcgctatccacacaacaacaaatgttctctaactcttaataataaccgttagatcgattctctctccaaaataaacgaacggctgtgattaaaaacatgttaactatagttagcggagcagctgacgtcatcaggggtagaattgtattgatttttattaaacagtagataacctccaaaaagtgcctactccctccaaagtgctctaaataggcttacaaacttgtaaagtgccccatcataacacaaccccttctatttatctctattctctctaaacacgtgcactttaactaataaacattatatctgaacaaataactttcgtttttgcctccagatcttgtccccgattggaaattctctgttgtgtatagatcttgtcctcgatttcatcatctttcaatattatcatgaatcccatatcttatccactaattgttacatttaagggtttcgaattttatttagatttttcaccatctattttggtctacagattagttgaacattattgtcttcatcgaccgatattattgatttttttccttctattgcaaaataacaaaaaagatcatgttataacatattatcttttctatcatttgatctgaatttgttatcgatataattctatcactcattcgatatgaacttgtgcccg

SEQ ID NO: 31866 - DNA, 3694 bp, Arabidopsis thaliana landsberg
aagcatttatgggtaaaactggtataataaagtcactttattatttctgaattcaaagagggcaattagtacctaaatatattgtttacatttaatttataacctaataatatataattagtctaaatctaataaattcaaaaacagacatgtgtaaattgtagaccatagattaagaagaaaataatttattttcatgtttataccactcttaacctactgagtcaaaacttaaccatggttaacttaaccatgattagtaaattttggatttttactttgaacaacttaataaatttcacacccaaatacattgtttttctcacattatatatttgaggtgttctcaagagagaaaaaaaaaaaaggaaaaaaaactaatatcaaagagcagggtttgtgagggtgtatctgaaaaaaaataaagtttggttgattcaaaaaatattcttatcctcggagttgcgatccaacgattggtatgttttctcctattttcatggtttcttcttcttctctgtttactttgtgccctttcgctttctcgctttatcactttatactagagaaaattggttttagggctttgaaattgcagtgatctataagggttttatgggtttgtatcacacttttggtgtctctgtgatggcgaaatttgggtttgattttagggtagtggaatttgtaccgtttgtgtgtagatccgtttgaaatgtttttgaaatggttacaattttcgcgggtctcgtactggtttgattgattgcattgaatgaaatgtgcattagttttttttttgggttcgtagtgattatgagatgcaaatggtattgggagttttgattgtgggtttggtgaattgtggtttaggttaggttagatagaatttgaagatctgtgatcgtagttgtgtttatttggctttgattggttttggttcatcatcagtgattatattgttgttagatttcgaggggaggcttcatttaaatctggatacacctattgttaagatgtttgattgcattagatgatagattctctagatttttcttttatgagccttgtgtatctctttaaccatatgttaagtttggtgaattgtggtttagtttaggtttatctcttgttagatagagcttgaagatcgtagttgagtttttgtggctttgattggttttggttcttcatcagtgtttaaatgttgctagattttgagggtcttcattttaatctggatattagttattgttaagatgtttgattgcattggattgatagattctcaagatctttcttttatgatccttgtgtatctcctggcccatatgtttgctttgatgcaacacaaaaccaaaaaacacaaatcctcacacgttacaggtagccacaaaccacacaacttactaagcaattttatattcatctgtttccacatgtccccaacagtatggacacctttccccggctgctaccttactcaccagctttctcacccttggtctctggttcggtttcaggttttggatcaggtatagcatcaggttcggattccagttcagctttggggattgattcagtttccatttcagtactggggtttgattcgggttccagttcagttgtggggttcatttcaggttccgattcagccatggcgtttgtttcgattttaggagattctgtcttatcatgacggaatttaacaacaatgcacgtgatgttgtctgcactgccacggctgaaggcagtgtcagttaacttgcgggcagctgcctcgggctcttcctcgctctgagcaagggctaccgcatcctgaatcagatgtagaaaatcaaatatttaaatccctcaaaccattcagaaacagatacaagggggtgaatttatttgagtcatacctcatttggtaccacatcccataaaccgtcacttgcaagcacaagcaactcggcctcatgatctatctctagatcctgaaaaataagcacagaagcatgttcacaaaaacttaaaactcggagatttcacatgggtgatactacagatgatgagaacaacatgacacccttggacaaaaacagtaagttgcagttagaagcggttacttgtatctcgggttcagcaacaacgaattgcttcagcattctgttaccaaaggcccgggacatagccaacaccccacctactctccatgttcctgacaagtaaaaatcaagatgatattattatcaagtctagggctgaaagaaaaatttagagaaggatgcttaatgggcatgcctcaggaaatctagtttttccctgacactgaatgtttaaagcatgaataaccctaacccgacaaatagaatgcctagataagatggtatgtgtgtcactgttccatctaaataaggagaaacaaaaaaaccaacaataatagtgtcatattcaatttcgcgaaggagatatcaagcattttgagtaaatcaataatgaagctagtaatctaactcaagagggaaatctgcgatctcactttgtcatgtttagaagcaagcaaccaattagggggacacaaacgagggacaatttcttatagatcagattacctgcccacatgataacaccaccagcactttcaattctctttctttcatcgcttctatttggcttatggtcatcagatagcgcgatcgctgcaaaacataaagcacgaagtttgaaaagagtccttatggaaagaacacaacaaaggtttgtgaccaatcataagaatccattcactattaactaaatttcaatgttctataaggatagtataactccaattcctaaactcattttgaagctctcgattttatctttaaatgatatgccacattgtattagatcacaacgacatactgacctttcccagctttagaaactattgtcctcgagtctccaacatttgcaacatacaaatggttccccaccaacacagcagcagatgctgtggagccatcatctctgtaagtatccttttcggactcgaggaatgctacatcagtttgtttatatgtttcatctgccaaattaaccaacgtaagaaggaaaccagatgacttatgagcttcatacttcttagattataacaagatcttatgtcaagagatatagacgcacttaatgccagcttggtgtctgtcaaaaattgtggatgcttcatgagattgttaaacaggtgttccttcaggtattcagcagcacgtgaaccaccatggcctgtgatgattaaagcttcagatattagaagaggaaaaatagagatcaagtcaacaatctatgattctgtttctgagtattatatgaacgcatattgctagttcaagtgcactgcaacctttaatttcctaaataagtatgtacaaatacggactctaactaaggtaattctagatctttcttaactgtcattctgcaaatgaagctggactgtgttttagctcagccatgtttacattgcgataatacaatagtaataaggaaagttgaaaactaggcttcaaaacagatcaaataccttccccaagtcacactaacacttcgtattcgtctataccaaaagaaaaggaaggaaacatagaatctaaccatcaaatattccaaacatgcaaactgcttggccttcatagtggagctttgatatcatagaatcttcatcgag

SEQ ID NO: 31867 - DNA, 1067 bp, Arabidopsis thaliana landsberg
attttttcggcaggtgcggccggaacttgggcggccatgagcgtgcggagatggtctgcgagggcggcacaacccacgccggccaagaggacacccgtttaggaccgggcgcccatcggtgtctgcggtgcttctgcagcaaaatctcggtcgaggttgcgaccctcgatgttctgtcagcgctcaagccgcctttccaaagagatctgggcgtcctctcccgtacgcctgcggttgagctctacccagaggtcgtcagtctgcgcaccccttacggagggtgagcgcagagacgtcgtcgcctcgcgttggcgccgggttgaccgaggcctcgacctggtcgaagtagaatgtgccatgtcgagcagccgatcgacgtcgtcacgccactgcttcatggcccccggtgaagccgtggagctacaggggtggcgtacaactctctagccacagacagcgctgtaggcgtgccctcgacggagtccgagatgcttgcgctgccgtgcggcatgcacagcagcagtgcctggcactgggcgattgggaacctgcggtgtggaggaagtagcttctccctccaccgcaaaatccaccaaagtctcggcgcggtgctcaatgatctgcaccatcatgcttggacaaggaaaacaagcaaaaaccaaatgcctaggcccctacctggcgcgccaaatgtcggagagcaaatctccgacctggtggcggagtgcacccaccctaaatcctaagatgaggaggggcctaagcgttttgcttgttagttggaaaagtgggaagaacacaagaacacacaaggatttagagtggttcgggccaccggagcgtaacaccctactccactgtgtgatgtatagagcttgtatgaacttgtgagcctgagctgggtctaagtgtgtctgagtctgtaacgttgcgtgcctccccctttatagctaaaggggggcaacgtacaaaggatgctgagccccgacatgcgggccagggacataacagatgtaatacttggagcaactaatgctggttgccagcgcaatgtccttgcgcccgga

SEQ ID NO: 31868 - DNA, 834 bp, Arabidopsis thaliana landsberg
gatagaagcagaggaagtgttgacagcgtgtatggagaagctaatggagagaggttttaatgagtccatgagactcagtcctggtggtcccgaccctcgccatcactaagtcttattctcgtagttttgaattcgaggatgtatattttgttcttgatcgagaaccggtttagaagaaaacatatcgatcctctttgtttgttttttttgccttgtttgttcgttcggtgtaaccaatatattgatgtatctgtttcgttacacatttatgatttgtgcatgctttacgtaccttatacattccactatatagtagtctagtagagaggaggactttgcatataaattgttatataacaagaaagggtaaagaaatatagtatgataagggaggattgaattaatttaatttatcctgttttttcagtctctaatggctcgtgtagaaaagtatatattatatatggactcttttgcctcatcgtccaccaatgaaatatcacataaagagagaacgatagtgattgaagtttttcaaaaagaaaaaaaaaaacaggggaaaacagagagaattatactttttaagagcgaagcaacgtctttaaatctttaatttttcagagatcaaacccttgaaatgctgctctttacgaaactcatgttccaaaatctctttttcatcactttccgtacaaattcacaaaaaagttaccaagtcgtgacaagcttgagcttaagtatgtgtatgaatagtgtgacccaaattgttttgcaagaagatcaagttaccttggttaccaaaagaaaatggattcaaacggtaactttaccaaa

SEQ ID NO: 31869 - DNA, 981 bp, Arabidopsis thaliana landsberg
cgataaacaagatataataaataaggaaagagataccatcatcctaactcataaattaagttctctttgtctactcaatatactggagacagatactttaaggaaagctcattctcattataacacaagcaaacttctaagagcctctaccaaaaagtgccacattttaacaatacattgcacatcggactaaaaacaatcagaggaagaaaatttacagcaaactcttcaacactttgcaatgcagcagctaagtcctcaagatctttgacttcttcaactagcttgaatggagtctcttccaatgggagaggcttaacaggtctcatctcacttagatttctatcaacaaagtccatcacagatagttcctcctacaatacgagaacagagatgcaaacaaaatcacatacagaaaaaggtaacctaaacaaatcaaagattacagttccacactcgagatattacattatacagcttttaatcaacttcagagacaacgaaactaaccagtggatgaatgaaccgaagaccgtcttcactcttctccaacaaaacatgctcaaaaggattattagcattgtctaccaaaatcttatactcctcttgaggcttcgttaacgtcggtatatgaaacggaacctctgccttgccaaatttcgcgaatcccttatcactctcagccactttcacatcgattaccttcttcgaatcttcctccatctttcgattcctcttgaactcatccatgggatcatcaaatctcatcgatttcttaccaccaatcgtctcaagaacagactgcgagctccaagctaactcatcgatcggacgcttgaactcgtcggacttggagagagaatggaaatctctgttcgtcggaattgtaagagaagacgaagatagttttgagagattcttcggagactttttcacctaagcaatgtgatcttcttcactcatttttggattctcgcttag

SEQ ID NO: 31870 - DNA, 972 bp, Arabidopsis thaliana landsberg
gatatccaaaaatcaatactcaaatcataaggctacattcaaatttcaaagctacaaaatcagcttaatttatagtaaccacatacaagttttttttctcttttatgaaacataagtcataacataactataaaaaaaaagagttgaattaaactaaaactaagtgatgttattttaaattacttatttataaatgaagtaaatatatattccctacgtattaaaaagattgattttctaaggggttttttctatcaaaaagattgattttctgtatacttttttataataaatgttataaaattatgaatttcaagaatcattaattgagaattttaaaatttgatgaactactattggttaataattatgagaaatagtttaacataacaaatattgcatgaggactctaactgagttaatgtgagctaactctagctatactacaaatgcctacttagattttatgggtgcaaaaccaagagagaaaaatatgcttgcagctaatataaaccaaaataagtaatattttaacaattttctgtctttcctccctctaatgagtgattttgagaatatagaagaaagtgaaagaatataagaatttcgaaaacaagcaaagcaagctgtgaactcacatgtgggaaggcttgatatatctgcagagacagcacaaggtatccccaagttggagaggacacctctaatgattccacacgggaaatagaggtacatgctcaccgcttgtgcagctttgctttcccctggagtagaaggatcttcggtttcattctcagatgaagggtcaattgagacacgagacaaccaccggaacttgttgtcttgtaatacaaaagtaccctgaagagaaacattccatctgtgaataacacacacaagaagagttttggtctttgttcaggtaaaatcccagttatcttaccccgtgatttgtctataaattatcaatct

SEQ ID NO: 31871 - DNA, 1174 bp, Arabidopsis thaliana landsberg
ttaaagtcgggcctagtctaaaaactttgatttgttctttagtttacttggcgaatttacgtacgtctccatgccagaatggtcaaaaaaaagagaagaaactattagtctaaagaaatgaagcattcacaatttgactagaattgacaaaagcttttgctttgtttcagagattcaggaagcaagaaaaatttagaaaatggaagaacaaaacctctcctcgtacgcaatgatcttatcaagctcttctgttcttcccatggttcttaagacagccattgatcttggtctctttgacatattagctgaatctggtccttcctctgcttctcagatcttttctttgttgtctaatgagacaaagaaacatcatgattcaagcttggtcaatcggattctgagatttcttgcgagttactctatactcacatgctctgtttctactgaacacggtgagccatttgcaatctatggcttagctcctgttgccaagtacttcaccaagaaccaaaatggaggtggatcgttggctccgatggtgaatctgtttcaggacaaggtcgtgactgatatgtggtaacatcattaacaacatcctcactctttcgtcttaaaacgttatcatctttgacttgttatgcaatctgatgttgtatttacctataaaaaggtacaaccttaaagattctgttcttgaaggagggcttccattcaacaacactcacggttcaagcgcggttgaactggtaggcagtgattcaagattcagagaagtgttccaaagctccatgaaaggtttcaatgaagtattcatagaagaatttctaaagaactacaatggttttgatggtgtgaagtctttggttgatgttggtggtggagatggctctcttctcagtagaatcatctctaagcatactcacattatcaaagctattaactttgatttgcccactgttatcaacacttcattaccttctccaggtacagatacaagttcttgaatatattctgttgtatagtaaatgatctttaatgtcataactttttatggttgtaggaattgagcatgttgctggagatatgtttacaaacactcctaaaggagaagctcttttcatgaaggttaaaaattttaaaagctttatcaagtcttaacagaatcatatactta

SEQ ID NO: 31872 - DNA, 1102 bp, Arabidopsis thaliana landsberg
  unsure (1)..(1102): unsure at all n locations
taacctatttacgtatttaaagagtgctgtctttgaatcgaccgaactttgcaagttatatgtgtacaacaacctatgatgatttgatcgttattgaaaaggtatttgcaagaaaatcatttaaaacaaaaattccttgttatttgtttacacaatcattcaggtcaactttacttctttctccttcatcgttgattatacgtttgataccattgttttattaggtaagatcaatatgttagattaattgaattggtggatttttaattgactttagtgggtgaatttcttgtgacaatgagttttaacaaatatgctggaataaaaaaccgaacctgaattgaaaccaagtcgaggtttgattatttcgatctaagttttggttattagaatagataaatcgattgactaaagtactactataaaataaatttggtcatttcatgatgtcaaataattgaaatcaaaattcatattcacataagaaatagaaaagattgcaatattttttttttttttgcaacccattattttattaaattatatatggagattattcatagatttcaaataaatatcaattttaacaattgaaactgcagaggcaggcctgatctattggatcgaatccaggtggtacacacaatccttgaactcctactcttttatacttggtaccacactcccagttacactgatcaatttcacagttttctgctttaatataaacatgacatgtacgatccttgcgtctcctccatcaccattcctaataatacatatttaaaatatatactaatcatttcaattattttttgttataaaaatattaaggtgatgaaaagaaaaccatcaaataaaaatatgtgaagaaacacggaatatttaataaatattgaagtgtagagcataccaataaccaaaacaaccataaaaattgtaagagatgtgtttttagtcatctttgatgatacaattataataaaagtaatggatgtaattgtattgtgaacaaagaacaatatatatagattaattgaatgcatacatttatatttacaaaaatatcattaattataaaaaaaaagtngaaagaaatcag

SEQ ID NO: 31873 - DNA, 432 bp, Arabidopsis thaliana landsberg
atcggtagatggtgcatgttcgccatcacagtagataacctacctgtagagtaccaagccggtgggtttttcttcagcaccacggaaacagtctctttcgcaaaagtctctgtgggtatcggctttatgttttgcgacagaaacgctctctcacggatagcgtcctcgaacggtttgtatagtttcaattcaggtaaattgttgaaactcgatatccctgagttagctatgtttgattgaatacctcctggtacaatgttgattacatcaattccaaatggcttaagctccaacctagacaaacacaaaacaagataaccgtttactgcttagatgattattaatcaatgctgatgaaaagagactgttgaaatcgaaaaaccttaaagcgttgtgtataacatgaagagcacctttttgatcattattaac

SEQ ID NO: 31874 - DNA, 2353 bp, Arabidopsis thaliana landsberg
tttcttatcagaagaagatggtttcggagtcataacttgagaacctgtgaaattaacatacaaataacttatttgttaatctctgtagctcaaaaacacataaatattcattaaaccaaaaaaggtattcatataatatatctttgtttatgtttaatattcttataatattcagaattagttaagttctaaaattatttcttgtaagcaattctaaaattattgatttaagcaattttgggtaattttaattctccaaggtagtaatgtagaacataagtttttctcaaactcattctgtattaatcaccttaaaacaaactcattgtttagttacttgaacgttagaaaaatagcaaatgcttaaagatatggcaaagaaaaatctagagttatggtgcttaccactagcggtgtgagaagcaacgacgttagacgaagaactagaaggtaagaccgtcgaatcagagaaaagttgaggcttacgagcccacgcgcctaaacccacgcctcctgttgcaaaggattgactcacttgaccctgcgaagacgactgagaaaccgcctgtggctgaggttgttgcaactgcgtcccacgaccaaagtgacccgacgatggtcccgactgactctgtccacggtctccgacgccgcctctacccacgtctccgacgccgtctctacccacgtctccgacgccgccttgacccacgtctccgacgccgccttgacccacgtctccgacgcctacttgacccacgtctccgacgccgccttgacccacgtctccgacgccgtctctacccacgtctccgacgccgtctctacccacgtctccgacgccgccttgacccacgtctcctggtgcaacgccttgactcacttgagcctgcgacgacgacggaggaacttcctgtggcggaggttgttgcaactgcgtcccacgaccacgaacatgaccacctgaactttgccctggatttacccaaccaccatccctatcttgaacaaagccacgaccacgaccgctgtaaccacgaccacgatctccgccgccgcctctgccatggccatcaccacgaccgctgtaaccacgaccacgatctccgccgccgcctctgccacggccatcaccacgaccgctgtaaccacgaccacgatctccgccgccacctctgccatggccatcaccacgaccgctgtaaccacgatctccgtcgccgcctctgccacggccatcaccacgacctcctcggtaaccacctcgatccatggtatttgactggatacggtcgggaagactcttgagtgacaaaagattgaactagaattttctttatgtgtttgctttcaaaacttgtgaatgtgaagtaacaaatcagagggctttaaatagaagaacaaaaggtgtaggaacagagaagcttaagtcgtagagtttgtaaagttgtcgtaatcttccacgaaaccaccaaaaagtatgaaagtacaactgtattaaacttgtgtcacaattaacataaaacagagtcagatgcaactgtaagacgtggcatttcattttattttatttgaaactctcttcttaattataattatgtttgtaatttatttaaggaaaccattaacaaagaaaaacaaaaatctcatgtttactttctttcatccacccacggtttttttcttgcgtccactgtctctctgtttcactttcgatcgaaaacgacattataataacccactagaggtgtcaaaaattaaggtttttaggcaagtaaataaagttaaagttttcgttttcctcttttggaaaaaaatttctacttctaataataataatacttgttatgttcttaataaataatattagttgtacgtgtgtattgtctttaaattttggtcatgataataacggtactttttaataatggacttattatatgtggctatatatttgatatatcatatactgatgagtattgtatacgcattagcgtgggtttccagttttctaaaaagaaaactttgattgtaaatttttctttttaccattttatgtaaagaatcttttgatgttgtattttccattggtttttatgtgtcttttcatcttttgaaaaacatttccctcacgcattgctatttttagttaagagattgatgaagtcaattacacaaactctcatctccaacagatcaacgatcacttttacttactcatcggttcgctcatacgcatactttttgaaaaaggtaataaagaagattggagaatcaattacgtatgtaacgtggtttacttagctcgagtcaaagatcttttgttttattattgatgatgtgatacaattct

SEQ ID NO: 31875 - DNA, 1102 bp, Arabidopsis thaliana landsberg
atcatcttatgtcatttatttactaaataattttatattttattcatatttaggcattttaattgtttcataattttattattatcatagatgtgataaactaaaaaatagtagatatattgtcccgttattttttcttatgtatgtattttactgcacatgaattaatcttctgaattttttattttttacttttttttttaattttggtaaaaggtgaaattttataccatttttgtttttgacagaattacaaggaaaactagaagcagaacaaaacaatttacagaaaataaaagaacaacattacaactctaattgcaaaggatcgccgatgagtgatcaaggccaagttaggaggagaaacaccgatttcgagtccgcgaacgtcggaaatttgcgttgttgccgcagtaccgaagtattggaatcctcatcctagttgccacgagcatgactatccaaagtccgtccacaaaacctcaaagatagaagtctacagcttctccgagaactaacgcagaaacgaacaagcaaacatgagtaagcctaatcttctgaatttgataattgaatttgaaattggtcaaatatcttaattaactcttatacattatctggatacattttttgtgatcaatcaaatggttgaatttgatcattgtcttagaacatttatgttgttggatcactaattagcattacgtaaatgattcagtctcgacgagactccctttctaataaaaatctccaacctccctctttgtatggcttcatcaaacattcaatactcgtcgaaaggattttgaaaattttgtttgtaatataataaaattagtgggctttcaagagagtgataaaccaaaagcccactaatgggtttagtatcaaagttggtaaactttaaaaaagtctacacaaaaacatagaacatcgatctaattctgtctaccctacgacaagatcatagtatcaccaagacattaacctctcaaaatacttttgttatgttttgcagaaaccataaatatcctaaaacctgtactgaaagttctcaaccaacagaataaacacataaaatcataatcctaagaagatctca

SEQ ID NO: 31876 - DNA, 825 bp, Arabidopsis thaliana landsberg
gatgatattaaaacaaattgtgatttttaattgtatattactatttgattgacttgtcaagcctcaccaaaacatttaattttacaatcatgccattaaaattaaattatttttttctccctctccatctccacaagctacatctttctttcttacatgcacatctctttttttctgtatttttattttcttttttgatcaacttaaatctaataattcaaatatttgtcaatataaatttttttctaaacaatttctgatccataacattaatattttttctctataatatgacatgtatcatgtataattgatttcaaatattttatatatacatagttatatatataacttattcagtgtactgatgtataaaagtgtaattatttttatttgtatagcatagtaattgtacaagtgtatagaaatatacatttatatatttttgtacaccattaaactgtacaaatacaaatttttatatttctatacacttggacaattaaaatgatgtaaggataaagttggatacatttttatttagatgtacacttaataaactatgcatataaatatgtatgtataaaatatttgaagttaaatatacataatgcatgtaaaattagagagagagaaaaatatagatttgtatggatctgaaatttttagaaaacaaatttttaataatgggtattttaatttgaagattatggagatataataaaaataaataaaagaataagctagaggtgtgttaaaaaataaggttattgtcaataatattcagtttctgcttggaaactatatttcatataaactcttcca

SEQ ID NO: 31877 - DNA, 651 bp, Arabidopsis thaliana landsberg
actttgaattaaatcaagcctacctgcatgaaggcggagataacagaaatgaagagtctgagtttttgtttgaacacatacttatctccagctgcagatagcgaactttcaagagctgtgatactcagcaccgacgcagccagattctcatctgtcttgctaagggaggataacgtttttgcatgagattcctggcaaatagttcaaaataaattcagttcgtaagaaaccaaattaattctaagatatataagtcataaggaaaatcagtcaaatggcaaagagaactaggaaaacatctatggtgaattaagttttaaaaatccacctcaactaataatcaactagaatattattatcagcatacaaatacggagaatactaataaaaccctacgagaaggtagcagattcatagatatgaagaagccaagtttaagagcaataccttcagcttcttaacattgtctttcaatgccttcttggcaagctcggcttgttgtgacattggtaatgtatcaacactagtagctgggccaatggtaggagcgacagaaacattcggcattggtgtcccggcatgataagcatacatctgcggtagctgttgtggcagtgtctgctgtttagaatgcaaaggcgcgccagtccc

SEQ ID NO: 31878 - DNA, 790 bp, Arabidopsis thaliana landsberg
taaacccagaagcaactaattaaattgaccaaaattccgttatacaaaatccatggtgatttacttattctagttaatgagctttgatatgaaaatgggaaaagtgcttcaaacttacactattctcttcatcataatcatcatcatcaataccatcagcaccatcaccataattttcataacaatcatcaccaccttgtgcttgagtgaaactctctgggaattttgaagctgccaagaaaatcaatatgatacttgtcagtcaagaaaccaaaaaagtgctgatgttctagctactttaatttaatggtatttacaataactataatgtaatatatactatatataaaacacataccacgcatagcccagtgttggctcggtttttctttgacctcagcaatgcacatagaccagtgttgaagcggtttttcttttacgtcagaaaggcacttataccagtgttgaatcggtctttctttgacctcagagacaggatattgagaggaatgttcatcaccagatccaccattatctggctgtccggtcaagtcttggttaggctggtcgtcaaatatgtctttggttaactctgtccagagttcaatactctgaaaatatagaaaagaaaaaccaaatcaaagaaaaattgtcagataacagtgatatgtaaacggtaagttttgacaatcgaagcctgttttatggaaagatctaactataatgaatagttctggttttcaaaaggattagaccgtgatcaattaggtttccatgaatctaataaaag

SEQ ID NO: 31879 - DNA, 3401 bp, Arabidopsis thaliana landsberg
  unsure (1)..(3401): unsure at all n locations
aggtgataaccagattccaattgggggaatgcaaaaatgccttttcttaaaaaattgggttttgttcttttcggaataaatcgaaaagaagctgtgaatctagacattgttgacggtggcgccggtggcatcaatgtctaactcttcggattctgaaagaatgtgcctaacttggtttgcaagatctgtgacatgtttatctttaaaccctgattggtatcaaagaacagaaaacaaggtttggtactttgtaatctgaaagactgaaaccaaagattactgagtaattggtaaaagttagtttaccgagttgagcaagagcctcttcgaggttgaagagatagtctctgtttggccctgaaggtcctttcgctttaactatctgtctgcgtaaacacaagcaaaacgcaagaaacgacttgtcaaatgcaatctttgaagaagctaaaaaaacaaagccacctacttggcaatatcttcaagaggagctggtcctaagtagttgttgttgctcttcttgtcaggtgaagctatatacctgagtaaacaaggaagatacgtatcgacattgttactcgtttacatatataccgacgtgatgtaatcgtatgcgtttcttacaccattactcctgccacagccggttccgaagcattatagtcctgctacaaacaaagtaaccattgccacacacacccaaagaagaaaacgaaacagagaacaaaatggactcacagtgaagaaatcaagatactctttctgatcatattgcttctccctcacttccaaatgctgacaacacaaacaaacaacataaatgttttttgtcatgattctaacaaagagagtaatcacttaccaataaagcatctcttttatcttcctctttagttatcttgtaagcaactccacactgtgtgctctccatttgcagtaaacataaacaaagaagttgaatagagtagtacttatcatcaattggatcataaagatacttacacaaacttctccatgagcagcttctaatgtcactgttcttcccggaaaatccggaattcctctatgatcagtactacctaaattccgtatttaacattactatacaacttaagatcataatcaagattgtgtgataaagatggagaaagatagagagagaccttgatggaagacacggcgatagcctttgatgaaaccagggaggctttcgtcgaaaggaaaacccgttttccatattaaagatccgtacccgaatacccacatcgccatttttaccggtgaggtagagaaagtgagatccgattggagaagaaagaaagaaggacaaatgaaccaattaccacatgtttctcacgtgtcatttactttaacgagttataaaacaaatccctctattttgtttagtatctaaattttgaccctaaacttttgagattataaatttgaccatggtgagagaaagtgagatccatcattaggatacgacagagacaagtgacccaattaatatatgtttcttgttttaacaagttacaaaacaaatataaaacccttttattttgtgtaatatccaaatttagaccctaaaattcttggattaattgtattttgactatttgttgtttgttttcgtaggcgtaattttaagagatacgttacacaattagtacatgtttcttattttagcaagttatacacaacaaaaactaacctctttattatgtataacatccaaatttcgaccatagtttcttggagttataagagttacccttttttttgttaagtaggctcaaattttaccaaatgatgcattcatcattcgttttggaaatttcaaatacaagaaagtagaagcagaaaatcattacataaggtaaaaagatactaaaagttaagcgtagatcgattagaaaatgtaaaagaaaaaacacaaaaacaacaagaaagataatcaaaacttccacctccaatgcatggagatgagatctttgtttaagtatctttcttctcttttgggacttggatcaggtactggtaaccacaccgttagtcggcgctcccgcgacatcgtgaccgttcgtttgtttgnnnnnnnnnnnnnnnnnnnnnncttggttcttggctactattttctcatccaaaggattcacttcgtccttacttttaccccataccacactgtatagtccaaccactatgaaaaccgccccgattatgctgaaaattacaatattataccattcaaaacgttagtaatgtatcacttaattcaatcttgaattataaagatttgattaacgtgacttttattaccttccaaggtgaatcttttcagccaaaactaacacgccgaggaaagcagtgatgatcatgcacataggactaaacgatgtcgtaaaaaccggacctcgttccctaatcacaatgctttgtatgtaatacgccatacccgaacaaaccactccctgatattaagtacttaacacttgtgagttatgaccatgattataaaaagattggtttagtagtaaacggtcaaaagtacttacggagtaaacagccgcaagtgtgcccgagtccataccgactttccatgcgcttacgtcgcgcaccattatgagcgaagcgatggtgtttaagaccgttcccatggcacaaatccacatcactagcgaaagctcagccggatattttttcaacgtgaacgactgaaaatatttcaatcttagtaccatgtaaaatcttatcttaaagcatagactaatttgtaaattatatatgttttttttctattgccactttgtagtcaaaattaggcatgggcgttcgggtattcggttcgggttcggattgggtttttcggatttagaaatctaagatccgttcgggtattttaagacttcggattcggttcggattcggatcgggtttttcgggttcggattcgggtaaacccggagtatccaaaattcaaaattttgtatcaaaatatattcaaattacttgaaaatatacaaaaatttcttaaacgagtattttttatccgaatctatcgaaaagtaggtaaaatacctaaaactatacaaaatatcctaaaatcctaatattttagatacttaagttgatgtaaaaatgattcttactaataaattatttctatgtatatatatatttcgaatatgttcggatatttgatcgggttcaggttcggataggtttgggttcgggttttgaagtttaggatctgtttgggtattttaaaattttgggtttagattcggtttgagttttttcgggttgagttcggtttgggtcttcgggttcgggtattttacccaggctaatcaaagcaatccccaaaactaaatgatcacacctcctttgtaatgtatggtaag

SEQ ID NO: 31880 - DNA, 1124 bp, Arabidopsis thaliana landsberg
ttgtatcatgaaattaagagttcttcgacatagattgttgttatcatcaattatcattatgatcattgtgtatatgaaactatacaacgaaattcagaatcataattagatagaagaatctcatgttgtttttcacattaaaaccaaaaaaaaaaaagaatctcatgttggcgcgtaaaagattaaaacgaaaataacggatttttctatataatttgcatggttattaaaatacaaaaatacaactgcacagccacaaactcgtaaccacaaataaaataaataaattgattaataataatctaggcaaattaattatagcaaaatacaacatcaagtttaaaaaaaaaagacgaattatacattcattatactccattgcacaaaagtaaaaaaagaacagacaaatcacaaaatctcaaccttatatgaatcattttatcgttgacgcttgtatttgcaagaaagaggaagagaatcttctgaagaaggtcccatgaaattacggatctgagatcggagtttgaagaaaacgtgcattatacttcctctgttttgtgaaccaatcgatttagcttcgtctttgttaagctcaagatctctgatgaatataggttttcttgaaaggatccatgaccaaccccattcccaccattctttcacagagcttcctgcttgttctcccatggcggaaacagatttggatctcgggaatctagctgcgatcgctgctggttggtttgagaggttgagtgatagagaagagagacgacggcggatgagaccaggctcatcgtcggcggtggctgctgcattagggcgttgagaaacggggagggaagtgggtttagatatctggagagtctccatcattgagatcataacttctttgtttttctttgtgttgatagagattgaagaacaagatgaatgttaatgtgaaagattaattagtatacacagttttaacacaggctggggttttattcagctttatttttgtggggtccatttttatttacgcccccagccaattacattcattttgttgttgctgaatgtttttgtaataaataatttgcattgatatgtttatttgttcatgtggatagttagttgttgtg

SEQ ID NO: 31881 - DNA, 572 bp, Arabidopsis thaliana landsberg
ccggacagatcggagacagctctaatgaagatatcacttatgcaggctgatctgggggaagggcgcctgaggtatgaactgcactcatgacggctcgggttatgcacctgctgcagtcttgcggaacggcggggcaaataacaacgacaactgtctatatccgcctttccgcaacagctgcaagcggaaattatacagaaactgttaccgatacatccgctaacgcggttacacaaagcctttctcttaccgggatagtgcacgcatcgccatccaccccagcaataagtgcaggaagtgcaacgacattctgttcgggcggatctgttgtattaacatcggatgctgcaaacggtaatagctggtatataaatggttcgctcatcaatggcgcttcgggtaccacctaaacagctgcgtccgcaggtaattacagtgtgcgtgtaacgaatggtaccagttgtagcagtgcggcttccccgccagttgcagtacccgtaaatgcattaccatccactccaacaataagcgcagtaagtgcgacaacattctgtgcagtcggatcggttgtg

SEQ ID NO: 31882 - DNA, 338 bp, Arabidopsis thaliana landsberg
cgcttgatgcggaaaatgcgtggaagaaagacgcacgcctttttttgaggagatgaggacaggcctctattcttcctgaaaaattcccataatggcattatcttgcaggcagtaatccctttattgttgttaaatcaatgtatatgaagttttgtaaatccctgcctgcgctgctggtagtaatggctgccacctttgcctcctgcggaaaattggatatggctacgcccgataccacaccggtgaacccaggtactccccagcaaccaggcgacatcggaaattacaatatacctggaacctcgagctatccgggagcacacagcgaacaccccatg

SEQ ID NO: 31883 - DNA, 1075 bp, Arabidopsis thaliana landsberg
  unsure (1)..(1075): unsure at all n locations
gaaccaagacattacaaaaaacaaaacaagaaaaacaaaacttgacttgacttgcagttgaaagtaaaaaataaaaacaggaagttgaattgctacggtggagttgtataaatatagcagagattccaatccatctccactcagcaaaagctgactcttcttctaactttctatttcttccaagaataacaaacttttttctcataagaaacaaaacaagaattctacaaaacttctcattaaacctctgttttcttgtttctcttctgctctgtattttcgataattctctctgttttgtatcctttcttattttctgtgaatctgtttttttatggaaatttaattcaaaggcttattagaggaagaaagaaagaaaaagaaaaaaaaacccactggagctatggctgttgaaggtaaacctaaacataaaatttgtttgctttttgttaagaaagtgggggaaaaaaataaaatcattgatgcaaatttattttctgggtttatgaaaatttacgcagacatgttatagaactgactttttgtattccttgtnacataaacagataacaagaacagtgaaagcaaaaatcatcaagaggtagagcttcataggtacgacttaggcctcgattattcatcatcgccgagaggtgttctcggaagggtttcatattccgacaacagcagcagtacttgcagctcttgttcctctgatgataaatcatcatcaacatcgtcaccattttcaaatactactaaaaccgtttcgtcttctcaccatggtcttcaatggaacaaaatgattgaatctatcaagaagaagtccatgagacgattctctgtcattcctcttcttgcaagttacgaactcacccgtaaaaacttgcgtcgtaagcaacctaagctaactccctctgagagtgctttcacctgtgaagccttctttatggctaaaccctcttggagaaacttcacttacgaagagctcgctgtagccaccgattatttcaatcctggtatacacaaaaacgcaaacccttcttcaatagattttggattgagaaatttgagt

SEQ ID NO: 31884 - DNA, 1106 bp, Arabidopsis thaliana landsberg
atgttatattggatattcatataatgtttacttttgtttaatacctacttttacatgctaattacagatttttcatattggggatatgacgggtaatcttcgacaaaacacagataacaccgaggaagctgatacaaatgtttatactgaaacatcaacatgggtagtaattcatagcggaaagagcaagaagtaaatatttagataactgctagtaattcatagtggaaagagcacgaaataaatatttagaatatttttcatttcctaaatatgattaactaaattttatgttcagaatatgtatttcatttttttttgaataacatgtatgtaagattatacattcatttcaacgaaaatcgccaaaactttgggatgtgatgcaacgttgtttcagattatataatatcgaatcccaatctctatactctataaaccagtgaagagaagagattatgaacgaaagcacaactaataaccaaggtaaacttactcagaaacatattgtgattaaatgcttgaaagtcaagttctatagacacaagaaagtgaagaggtgtatcgcgttaatattgatgatgaaacacgccctacaaatgagttcatcaacgaatatactcgccaaaattctccatcagtttatccaatccagatttctgcttaaagagttcacaacgaggttgtggaagacgtggaagtactttacaaagacctgtgggatatttatgtgtgactttgcaagtggctcacaaggaagtcaaagaaagcaatcttttgagagaacgctaacagatatgatgactggtttttgtgagtttcaacgccaaagtttacgcccaacttcattcgaccaaaaggatttcgacaagtgtcatctagctgtgaagatatttgaagaaatggattttccatccaacataatcttattggtcattcattaaggaatttaaagaagacaaattttggcataagtattttattgccagagctgacaaaccttacgaagataaaatacagtgtttacacactctattaggatatacacgcgatgatgaacctgtcagacagaattaaacacggttcaatcatttgagagtccgagt

SEQ ID NO: 31885 - DNA, 743 bp, Arabidopsis thaliana landsberg
tggcgggtacctgcaggggaaggttaccaacatgtgcagcaggtgtcgagggaggtcgcgtggacgctggagtggtcgaagttgtatgactcaaggcaccaaaagtagccctaggtcgatgttggcgtccctgcaattccttctctacaagcatagcaaactggaacaacttgttgacagtgttaaattctttgtaatccacaatgtcctaaatgtcacgccacaaacctgaataaaaacggcaaagagcatcctcatgtccctctactatcgcacaatgctgcaatcccttctgaagctcagcataataatcttgaacagatttatccccttgctctaaactcatcaatttcttacgcaattctctatgataagatgggggaacaaatctatcgcgcataactactttaagatcttaccaagtcgtaggtgctctaccatcctcaactagagcagtccactagacaatagcgaaatctttaaattcactagtggcttgtctaacttgatgtcgttcaggtacaaggtgggcaacaaatttttgttctatcgtcatctcccaatcaagatatccctcaacatcataatgacccgaaaaagatggtatagaaaatttaatcttagcataagggtcatcaggagcacgattgttattaccttgctggcggtgtggcataccttctgtgttttgatgaagacgacgacggaggcacaaatctctggtgcccgcttcatcataatta

SEQ ID NO: 31886 - DNA, 920 bp, Arabidopsis thaliana landsberg
atggatatcacctgaattagagatcaaaacggaaaccattagtacctcataaaacaaagcatcagcagatttagaaacaatttgcagaaactttaacataaatccatcagaatcaaaactttttagatcacccagatgctaaaatcttgaaacacacgtttcgacattaagaaaaaaagaggaaccctaatcaacacaaatttgcccccaattacaaatctcatctttttaaccccaatcgtgcaatacgactcaaacccaaatcatcaaaaccaaaaagccacaatattttttcatcatcaccacaaagagagggagagaaagagaaagagaccgcagatgcgaatgggggcatgaagctcgagaagattaggctgagaaaggaagatttgtctggcgttaacgcaaagttgacggatctcgacctccgaaagctgaacctgtttacctcctttaccttccaacaatcttcttataatatcatccaatactcctttctccaccatgccttccatactcgtcatcatcgtgttctttctcttcaaatccctaaatgttttcttaccaagaatcaaaacttgatacaagggtttgcgccagaaacaggagaggaataatgggtcgttgttggttttccgatcaatgaagagacgatcggagaaagtagacgaattttttccagagaaaatgtgggtcaaacaaagagaagaagaaatgtatgttgtcttaaaaatttcagaggaggaaagttatcaaaatggaagagataagaaaagaacaaatccgaaagaattaattataaaatggggaaatttaataagaaatccaaaacttttgaaagtatttcaaaaatctacattgatttatataagtgcaaatacacccaatcatatattttttagtggtccacttggcatttc

SEQ ID NO: 31887 - DNA, 667 bp, Arabidopsis thaliana landsberg
cacattgaaccacacatttaccactataccaaggtttctgcaagctcggagcggtataaatgttggtaaaagaatcttgaaatagaggatcgtgcaagctggttaaaccattgtcgtaaaaattatctccagtagaaatcacaaaatcgatatctaatttctctccgatttctcccatctgtttaaatttcgtgtgaaataatttaagcataaaataactaaaaacaacagtataaaagaaaacatcaaactagcataaaatttaccacattgagttcatctgcaaaacaacagtacaaacaaaaatcatatgtagaatatcttcgtacactaaagctgttttcttaacacagaccgaatctttcaagttcctctaacatgactttctttctttttatggtatcttataacatggtgttcaagaattagtaatatatattgaaattgaataataataataaaaaaaagaaaaaaaaagaataatataaaaacataagggccggcattaatatgaagaccagtaaatttgatcctcatatcacgtatgctcttgaaggcatacgcatatatatgtttacgtaatacgtattaattatcactattgaatttgcattatatatttatatatatgcgtacaggcgagaaatatagtaaataccttgtaaat

SEQ ID NO: 31888 - DNA, 556 bp, Arabidopsis thaliana landsberg
ctacattgcaatttacacaataaccatagatctatagatgaggctacttataacaacaaccactcgtgcatgtgtgtgctgccacgtgtctaatttgccacaaccttaaatctgattaaacaataatgagatagagagacagagagatagagagagagatactgggcaaagaaaaagacaaaaacagaggagcttctccttcatgttacggcacgttgcaaggtgcacctacttatgctccaccgttctatcctcatcctgcgtcgcatcatccagtcatcggaattcctgagacgtgttcacctaccggatcacctcatcacgacatttgcgttcatcaatacattcaagaacatcaaaccggacctggtaactaactctacgaatttataaagacctttgtgagagcgagccgggaatcttgatctttgtaatgaagagtttatattttgcttcgtctttcgacaaccctactgagagagtcttcatggttaactaacgatgaaactgagactatgcatgagcttgatactaaagtagcctctgattttcttta

SEQ ID NO: 31889 - DNA, 551 bp, Arabidopsis thaliana landsberg
ccttgtgtgtgtgtgttttagtatagctttgtgtaaatttagttttaagcacaaacaaaagttgaatgtatgagtttgtgcataggtataagttacaaatattctgtaaccataattacctaatttagtctaacaaatgaaaccatcaagcaaacttgattgtgtgatgatttgtattaatagttcatatactaatggctcaatgaatcgagatagataagataatgttgtataaacatttagattcgttcatattataatactgtaactaaagtatacaaggaatgaaaaatcaatcaagttcatacctccaaagtggtatttcggacccattcgacggcggataccaagaaaagaagtagtactattttaaaaaaactttttttttttggtcaaagacattatatatataacatataaatgacgcagtggaatatttaacaaaactaaaattagttaatgcaaaaggaaaataagttgctttattcccgttatcaagccggcgcgtattctatactcaactcatttataacatttttaaatttcgaaac

SEQ ID NO: 31890 - DNA, 844 bp, Arabidopsis thaliana landsberg
actctcttgccgaaacctctgtggcgcatgggggacattatcaacgccgaccagacccgtcatagtttgatatctcggaagcgtaactccacagtaggagtgaaaatggatttgggatcagggattgattacggaacggcgcagtatttcacggagattagagttggaactccggcgaagaagttcagagtggtggttgatacaggaagcgagcttacttgggtgaattgtagataccgtgcgagaggcaaagacaatcggagagtgtttagagctgacgaatcaaagagctttaagaccgttggatgtttaactcacacttgtaaagttgatctgatgaatctcttctcactcactacttgtcctactccttcaactccttgctcctatgattacaggtactttctcaatttggtaatggtgattgcattatttaatacatagtcaaaatgtgattaggtagattattaagaagtgatggtgatggtgggatttacagacattttaatggagaacaatttactgtttaaggaattgtgtgtgtttgagagttgagacaagatattttagatagattttggggaaaagtttggtggtcaatcaattagaagaagagggtcctctctttctctgtctctcttgtcaccatatcattgtctcttctcatcacattttctcacaactatttagagaattctttggggtggcatggattagatgcaagtgtattgcaagggagggtgaaattaaatgtgagttgagctataattcagcacaatacataaatgtcacttattgtatgactcgtgagtaggtttgacattgagcatacataaaatcaatc

SEQ ID NO: 31891 - DNA, 901 bp, Arabidopsis thaliana landsberg
tcagtgttggaaagatgtttatatcagacctatggatgtttaaccagaatctcaaaacaaacaagttggttagatctgctagctcaagtttttcacttaattagcttatttgggggatgaattcttttattagtttgcatatttgacgaaacgattatgttaacaaatcactgttatgcgtgattatgcgtgcttatgcgtgaatgatctcagtatatcaaacgtataagtcatcatttataactgaatatcatatagtattgcttaacatatgtggaaactatgtcggtaacatatatatatgaagccaattcaaaccccaaagacaattatttttataaccatcaggttacaacacgtcgtctactttaagcctcgtcattttcttcttattatttttaaaaaaacaaagaaagaaatcatttttaatattatagttcgaatataaatgatattccaatattacagttgaaatgttctattttgatgaaagtaaaaatggtcgtataagacaactatacacatgttcattgagagggactaatacgattcattacacacgtaaactcatatatatttcacaactgatcacaaccatgaatggttcatatgtcattgtataactatactatatttcaagaatttattacaaaatgaaccggacaatgcaggacaaggatagaaatgttcgtgggacaagatcataggaacaataaataaatgattcatattaagaaacatgattcctgggtatggaccgaccacgaaacttcatgtgcaacaataacgttcaagtgttttatcattcacgcttatgagctaatgggactttaagggtaccagccaagggccctgataacttgtatttaacccaaaggtacacacacactatattttcata

SEQ ID NO: 31892 - DNA, 1051 bp, Arabidopsis thaliana landsberg
atcaaaaacttggtttcaaacccaatcgagcgctggatacagatttctaggccttgttaatgaatttctttgcaccaatgtaatcgttctcagaaagttttctctctgcgaaatacattgctctttaagcttcttcccttattacattcccatcgttgagagacttgaaaacatgggatcttagtgactcaagaaactgaagaagctacgagggcgataatggtttttgttgctcaggcgatgggggttcacatacataattggtagtgatttcctttttttttttctttcaaatttactttttgattactaatttctcttcccttttatttggtttccattatttgaaacaatcaagaaataaatattgtctgtttctaataccggcaataaaacttgaattaaaagaatttagttacgaatcgtattcatatatattggagtagggataaagatataaatgcactctttttaacctactgccaccgctaaaatcattaggaataattttaactaaattattagtcatagcataggaaaacaccttcacattagattaataatttgtttggcaaaagcgatttggaacaatagaagttttgatttgtcgactcattattttgcaataatgatgttttaatataaatgtactaggaaatcaattggtcggtttatgataaaaagcttctataagttatcataaatcgtaacttgcaagtcattcttttcataatttaaccttattaattactattatctgtgatatcagattatctaaggtggtacttcgtttactattagacacgtacaacttgtaggttatacttcagattgatttccattatatattaagcaatgagggttggtatactgacaaagtaaatatatactaaatatactgacgtttatttttgttggtttagtatgagacattatgtaatgaaacttgataataaaatatattggtttgatatatatcgataaaccattacagaatagttgaaagatataaaacagttccttaaaaatattggaccattttgttctagtc

SEQ ID NO: 31893 - DNA, 530 bp, Arabidopsis thaliana landsberg
tctccggtgtgcttctttgccgagtgctatggtcattgcactctgtaatacccaaaatgtataagatgatactatattggatatcttatgtgccatatttgcatcataaaaatagcatacatataattaagagatgaagtaaaacaaatgataaaaaaatatgcatcatgttagagttatatgtttgtgcattaaataaaaataataaggataataataataagataataattctaaaggttggattaaatcctaaattaaaattagggttttgaaaataagaagaagagaaaggatataaaaatataaataatataattacatatatctaagaatatctccaaaaattggtactttttgatttcacaatataatttgaggataaattgggcacaagatttgaatttaaattttagatttgaaaataaaaaggacaaggaatagacaagaaaagaataaaaccaacctagcctaactgggccctaaccttgtattcagcccaatatgcaaataaccccgcacgagccaac

SEQ ID NO: 31894 - DNA, 988 bp, Arabidopsis thaliana landsberg
gggagcaaaagagttgtgatctatatgaaattccggttttgtaaggagaaaagaagagaaagactgagagtggtgtgccaaaaatcgggcataaagcaaaacttagtcttggaaacaccactgatctctcggtgagtatgaatctggtcatccaccaaagttttccgattactgctcacggtagcgatgaagagattggtagggtggatatccgtaaaagaagacgaagacatgagagtccgtcgcagcagtcgattttcatttcaagtttatcttgtaagagtgacataattacaagaaacgaggaaagcaaacacaaaggtgatcgctttgaggatttagatcttgagcttaggctagggactgatccaccaaaaggaatttgattgatggaccgatgaatctctaccaaaacaaaggtgaagggaagatatatataaatagttacatttcatatggtgagacaaaataacacatttcatatggtatgtatgtgaatgtgtatgtgtgtacttgaatttatcgttccttcgtcttgtgtgtataaaatgcagtgatgattgatttttgggtttcatttccattgttctattatgggggataagttgtatctaaagttcagctaaaaaatatggaaaaatctaaaggaagtattgagtagtatatgtatgtacacctgaggcttgagaacaagatttcatatacacttaggtatattgacgccctaagtcattttgttataattagtagtacatgtttaggcaatgtttccaggagtgaatcatacatatgcttccacataccattcatttctcagcttgtagtgtacgacgttgagatatctattctcagagaaaaaaataaagattggttaatggggtcagatgagcccatattatgattcattttctgggtcccgttttcgatatatatgatttagctaaaatataaaaatgtctatatgaactctgtagtatattatttagta

SEQ ID NO: 31895 - DNA, 632 bp, Arabidopsis thaliana landsberg
tgttttctgtctccgacttcggcaaatctgcgacgcttcttcttcgtctaaacgatgacacaacaacatattttcgtcttcctctacacacacaacatcattctttcatctttggtttgctttggatagagattgttcttatttctcataagatcaaatcgccaactaattaagtaaacaataactaaaaatgtattgaatgaaatttaatctctaagtactcaattgtctccttttcatttattttctttatcactaataatttatgccagaccaactcgcatacaatattaaataaaaggaattaattattcaacggtattgaataagttgcctaactagtagatttaaaaatcggacgtatgtggaaatctctcattggtctatctctttcactagattgattctctttacgtcatacatatctgtctcactctcttacccaaaatcgtattttttaactctctcctctccattcgtttatctacacgttttctaatttctaatctcacgcatactattcaacaaaaacatatttttccataatgctaacaacactcacgttagctaaactgatattttaaaaaactaatcaagtcaataaagcctctatagcccaaatatttgactat

SEQ ID NO: 31896 - DNA, 2050 bp, Arabidopsis thaliana landsberg
caactaatctgatttacagattcagtatacaaggtcgaaaatctaatgatacatatttaacaatggcatttgcttttgatcaatcgagacactatagttgaggaaagtgttggatacatacttaatatagcttggtttgatcaaaacagagacatcattgttgtgagaaagtgttgtagccattgcaagaagttcttcaaaacccaatgcatcaaggtaatctaccaagagtacaaccatggtttctagactttttgtacttttcagtagacgttccatgaacaaagccaagagattggactctgcgtgtttactcgccaacatcgaaatggtctcaagagagcccgggaagaccgagtcttttgatctccagcattgacgctgattcaagctatgtttacgcaagtagtcattgagatgcaattcctgtcaaacagaaaaatggatttcatcatgcaaactaataacttgtatacaaaaagagtgtcaaaaaacttcatcatggttcttggataaacactattttgtcatagttactatgatcatatatgtgaaggagagtaaaagaggtttcatggtaaagataccgaccgatatgctgctgcatttcacagtgtgaattgttagcttccgtaatccaggtgtgtaccgtagtagctttgttataccaggaataacagaccgaataatcatcgtttcgagagtcaaagttttgaccttgagcgtcggaaaaggtacaccacatagcgcggcaagagataacatctgaaaggcaatgcaaatatagttcaacataccaaacacaaacctcagcaaaataaataaccaaagcacaacaagacaagagccattgaccaaatacttagtaggtaatcatgaatctgagtatcaaagcctgatcaaccaatatctgcctatgcaaaaccaactgattctaaaagagcatgctatgtgattctacaacatacagatttctatgtgttagagaaggcagaaaaatggttaacgaacctgaagaaaggtacccccaatagtaagcttctctacattctgcaacatttgtagcatcttgaccacattgtgttgaagaaaaccagcggtaacagttttaagatcgccaaagtaaatgttcaagtcagcttcggttaaagaagagaaatcaactaaactacatggtatttgagagtttctcaaactcaaacaatgaagatgtggcgccacaatctgcaatggtcccttaaaccaaacacagcgatctatcaccaaagatcttcagattcagtgatgtcttctttttcgatctgttattttttttcttttttttttttgatatcagaaacaatttcgtgaatttttgaatagtgtaccaactaattatattgttgttactcaaataaatacatagaccgacgaattgctaaaagttctgagatagacatttacaaatctatgtgaaaatatatattcgatttagatagatagatatcccttcatgcacaaaatcatgcatgggtttcaattcatgagatataaatttaggcggcacagtcccacgataatgtaaatagtatataggtggaagttgaacatctcttttctgataaaaatgaatgtatattaaccattttgattgatacgatagagactatgatttgttcttaaaaacatctaatcaacttactaattatagacattacctaaaatataattaaggttcaaattatatagttgttagctagatataattaatgtttgtttattaatacataaattactaagatgtttacctgtctttatcgtatcagatttatatatatgcttcttgtatgcatcaatcatttatttcacggtttttgatttatgaaaaaattaaattgatacattgtttgcggtcaaaaccgaataaaccaattcacccacttttacaatagtccaagtatagagtgtgactaccactagctaagttgtgcaccatgaatgcgtcaggtgtgcaacaagttcgaagctatcaatggccattcaggtttgagctttatgtagggacagtttt

SEQ ID NO: 31897 - DNA, 471 bp, Arabidopsis thaliana landsberg
atttctgaaaaaatttatatatgaaatcgtgtatatgaatctgggcaacttttaaatagttgagattttgtttgggaatttttctatttagattcattctgttttatgataatggtaatataaagaggttaaattttaaaaagcaacaattttacttaaatttatttcatataatataatttaatacaattttgcataaagttttaaaaagaatttatactgtgaaaaaggggtcacaactaaaattatcattttttggtgagtttttcttgtcgtcttgtatgctaatgctggtttaattattacatgtctgggagtgtgtaaattatcttttaggaacataaaagaccaagattgatagatgcgttttcgaacgaaaaacagtttgtgttttaataccggtttaacatgagcgtaatttcagcaatcacaaattcacatcaccgtttctgctttttcgataactactac

SEQ ID NO: 31898 - DNA, 585 bp, Arabidopsis thaliana landsberg
gtttatatattcaaccaagaggatcatcaattggagttatactacctgtagttcataagtagctgttagatttcatctgacgtattagaaaatactaagatgactgtttaatagagttgatattttccaggaaaaagattgaagacatccccgaagagaggcgccaccatttgctgcaattattagagccaaggtcattctttctgaattcttatatcgatatttagctttgctgtcatgtggttttcttacgtctctgggaaaagattggattcatatgccaaagaagttgacatggaaaaagaacttacagcatgtacagttttcttcatgagagtgtatgtatgcaggcttatatctagagcatgggaaatagcaagcactcggtatgaagatccaaagttagctaaaatgactgcatccaagatattctctgctggaaatgcggaaattccagttgaatacttcagctggcgaacaagtaagggtaatccatttataggtctgagcccctacaaatataaatgaatgtgtatgttataaacgtctggttttgcattttgatgcgtatgttcttgacaacat

SEQ ID NO: 31899 - DNA, 964 bp, Arabidopsis thaliana landsberg
catgcagtttcatctgatctctctctttgtaggctaattatgatttttatggtatacataaaatatttcacattgtactaccatattcgttttgaacagaaaaataaagtttttgagtgatctttaactctattctacaacaacaaaaataagctacaagagtaaggcataagagaaaaaaggtatgatcgagaataccaagataggaataagactgacatgaaaaagataggaaacattctcatattcgccaagtaggttagaagaataagacgtttccaagaggtagttcaaggttatgagcatgggaaataatagaaatgacctccacttaaaaacaaccaaacttttccattaaggttaataagagacgacagatgttaattatgtacaaaataaggagccgtgtacgtttgaatctagaaaaatgcagagagttatgagagtaagagctaatcatcaagataattagagtaatggcctactgggtgggttcgatgagattcagaatcataaatatttgatcatatcaatacatatattaattcgttaaaaatatatatatatatttacgtatcgggcaagtgagcaacagaaatctgttttattcatgtaaatcgtagttataataaagtaactcataatttagctcaatatagaagcatacgttctagctttagttataattgtctaaaatctccatcttggattgcaaaccatttgtacaatgatttttcaaaatcaatataagttattctgaaaaaaataaaataatacttttttactgagaggaattaactaaatcaacgtacattttaaatataatatcatcttcctaaaagtatttgtaagtcaaatgttgaacttgaaatttttgataatcaatttaaagtttacgtaacaaaatgataatttttaaaatttaaccgcgcgtagcgcagaagaacctattaaatcataaatc

SEQ ID NO: 31900 - DNA, 4532 bp, Arabidopsis thaliana landsberg
tccccaccgcatcaggtagcttctaccgcctccttcaaacacaaaaggaaagcataaatatctagcatcaaatactctaaggtccttccgctaactgtataccaaccttttccgtgctttcttttttgatttgttgtcgcagatttgagtcagaatctcctcaatgtctacagcatcatctacatgcgttttcaacaaattgcagttatccaaaagcctgagttgatgaacaacactcggagcaagagaagtatcattttgtacccttttcctcgcgtgctccattagcacaagccctgcagaataacatactggattcataaggtcaaagatggaaagcttcacaaagcaaccctgatgtctaatcatagaagaattttcatgattgtgcaacattttgaaaagtctaaggaagcaagaagagaaccgagagatcggagcaacttaagatcaaatttgtcagctagttcttggtgaccacttattttggcgcgttgaatggctagcttctttaagctgatgagcaaatcctgcaaaacaagttcagcggatatctcggtaattcatcgatcgattaatgtttgcttgactgacggaagaagcagaatttaccagttcagattcagagagagagcaaaaccaagtgagatcatctgtactattgttcttcaagatttgggttaattcctccatcctaattgctaagagaggaggcaagtttcaaagattcagagattaaagaatttaactgcttaaaacaagtagaaccgaagcgtattaatactaaagtaatggctgaaggtaaaacctaagctaaaaacaagacaataagcatcattcaaaccataaacacatacttatctgtaatctaaaagcgatggggtcactcaccttaaaatgaatcaaacagaatccggcgaagaaattaagcggcagaacacaaaggcctacctatcccttacgagcaatctattgcaatgaaggccttcaaaagattcgagagatgtgtctgtgggaaacgagacgcgagaccgatgcaaatgataaaccctaaatttgctccgccaggaaattagaatcggaagggggttttaattttttatcattcactaattgttagtataaataagtaaacgtatagatgtaatcacctgaggatccgtggcgcaatggtagcgcgtctgactccagatcagaaggttgcgtgttcgattcacgtcgggttcaattccccgaactttactccggatattcttttttaaaaaatccagactttgcccttcgctttcattcgataaactaaacacaactgtttagggtttgaagaaagtaaaagggtgtttgcgatccgccatggattcaaagaaagagaaaacgggagggatcataggaatcttcttaacccaaaatgctgcttccttggcacgaagcttctacgccatgttgtgtattttgatctgaagagaaacagtataagagaaactaagtttaaaggaattgtatgtgacttatttaggaaactcaagggatttggatttggtccactcaatgatttagatgttttcccaaatcacattgagagtctcttgtccttgtaagaacattcaccgctcgatgctagttcttcatcattcatttattagattttgagattgtttgatgatgtctttaggttttcttgtaatgatttgtaattattccttaatctcaagatatttatcccagcataatacataacaatgtggatagtgcaaactattgttgtagtctgcataaacagagactgctctgtttctagcatttttcatgcgagccactgttgcttattcatattcaaaaacggacaaaatcaagcagagaatcacaatcaagaacagaacttgccagccatttgcttattacttctctggctttttatcatgagatccaatgagaaatgtcttggagaagctcaaggttgtgaagatgatggtgtaggtggccttgttccatggccgctggtgttgaaatatgtctttttatgtctctgaattttccctctgtctgacaaagaatgggcgtgtttaattttgaagggtgttactgatgctggtgagtttgtttatacgccaatgagtgtgtatgaatccttccatgtggtgtattttgatccaaagagaaagagtattagagtaaccaaaattaaaggaattgcggataaccagatttggcaacctgatagacttggatttgatcttgtgaatgacttttatgtattaccaaatcacattgagagtttcatctcgttttaagagatttcatctttttgcatggaatgacactaaatatttatgaagtgttctttagatctttttttgtaaccactgattcattgatcccactggagatcccaatatgttttaatgatgatactacatattctagagacttaatagaaactttataaaactatacatggagagactgtaatatgtgtttttgagattgaacctacgattcctctgttctgtttctagcaatttccatgtgatccttttctcaaaaatagaaaagagacttttgtcctaaagttaaacaagtacagaagaagtacttgaaatcttcactcagacgattagagcttagagcatacgaagattagccttagttacttgcagtatgaattcaacattttgagacatggatctctgtaaaattgaccaatatagtggttttattatggtaccttatgagaaaagattagcctggatagccacaaattcattgatattggaggacttggctaaaatttgggcgctattagtctattactaatgctagtgaatttattgtgtcatgaactttgatattattagcagttttaagagccctcaggacaataacatttggtaatgaatgtaataacatcccttacatattagtgttataacactatctagtttactctcaatttggatgtgagagaccaataatcataattcataacaactgattttgagaagggttctgttttgttttccaaagaatgacacatagctaattatatatgcaagtttatgattctctgatagattcttcttgttatgattatccgttgacattgaagggctttgtcataatttgatttttctttagtttgaatatatcgtaagtcctaaacatgcatgtcttattaaacaatgtgggctctgctctgaagactattgcctacatttatgctatctactcaatcccttaggagttatggcatttagtttccagctgatgatatgtagaacattcataagcgagctcaagattctacaatacgtgtataaaagatgaagcctaagctactactaggctgcatcggtcaaaacacacaagccttgtctttttgtttctttttcttacaaaaactttgtctcctacagtgacttcaccaccaacaccatcactgacaaacactaataatgaaagaccaaattcgtatcacagaaagataagactgaaaaatcaaaatgtttcaatagcattagcctccagaagaaataacaacagtcgttgtacttgtatcctagctaaaagcaaaatgtaattgatatattgcgaattaaactctatcttgttacaaactttaacaaaagttttaatattttgaattccgtacatgtaaatggaagcatattaattgggaaaacaaaagaaacatagtggataagattgtttacaagtcaacacacaccaatttagaaaaatcaaagaaatcccgatttgatgcgaacatgacgacgcaaccatatctctccaaatcaaaagattatgtgtgtcacattccccactaatttcacttatatctagcataagatgccatataatatacatgtagtatgtaacgttttgagaatgttcttattcggcgagattatttttctgacaatacatagcacaatgtttagttttcccaaactatataattggaaaattttccaatgacatctcaaatatgtcgacatatccaaccgtaattccgtaaatatgaacaaaaacatccaaagaatttaagtctagttgatctcaaattttaggcaagttgcaaataaacacaagtatattttagttgaattatacaactaaactcaaaagtacatgttgttccagaaattaaacagatagacagttagttggtaaagatttaattagttgattcaaaaaagaaaaaaatttctcgagttatcttaaagtatgtttgtcttaacttatcaaaattatatctaaaacccacttaaaggcttaaaccatgattattgtgtcttgtctttttttgtaattaaattacttaatcagctccaccgtaatcagctggacctccactgaatcttacccaaacatatcgatcacgtgcctgtgtataaataaatacatacacacttaacaagttacaatcagactgacaccaatcttcctctttaacagtcgttttatacagcgttctgacaaagcccagtgaagtcacagtccagaggaacacaaaagagagagaagtgagagag

SEQ ID NO: 31901 - DNA, 874 bp, Arabidopsis thaliana landsberg
gggcgagaggtgtcatggtggctcttcacagagaaaccaaaagggtcaaactcaatggaacaagaattgtcggtgatgaaccgacgaacagaaagaaagttgtgagtgatgtgaggagctatgagaacgtcattgagatagaacggtcctaggagaaccgaggcacctactgaggtgaccggcagagtggaactgttctcgacgacgatcgaggaggggtgggaggaatggggggatgagagcgagataacgtgcccgcgatggaggtggtgtggtaggacgcactggagtcgaccaccctgtcggaggggggtggttgtgtcatcgccatggggtactgaaggcgacgacgatggaggctgagtcccatcctccagccagtggggaccaaggtgtcggggtggggatcccggaggtaggagctggggcggacgtgagtcattgggggcacgccgtagggggcgccagtcagagggccaatgtgggaggacgaggcaaggatgcacccggggccttgcctggccacatggagatggtcccggtccaggggttgtagaacgaagaccacattagaccaatgtcgcggcctatggggccaccatgggaagatccatcaccccaacgggtcacccttctgaggccggcaactgccgtcagagctaggagcctcacaaggagctctatggggtggtaggagagcatgtaacccccctagtcattggagggtgaggggcgttggccggtggaggacacgtcttacagtaccgtggcagatgcaggggactcgatgtccatgatgagctccttgaggagtagctcgttacgaacgtacaggaaggagggccttcgggtggtcaagcgatgactaaaacca

SEQ ID NO: 31902 - DNA, 3277 bp, Arabidopsis thaliana landsberg
  unsure (1)..(3277): unsure at all n locations
aatctcagggatcaggtgtatcctccccagcgacagcaaagtcaaacaaaacttattgttccctacaaccaaggtttcgttcctaagaagcaattccagggggactaccagcaaccaccaccacttgggtttgcccctcagcaaaaccaaggtcctgctgctcctgatgctgaaatgaaacaaatgctacaacagctgcttcacgggcaagcttctggctccatggagatggcaaagaagatatctgagttacagaacaagctggagtgtagctacaatgatctcaatgtcaagatggaaacactgaataccaaagtccgttacttacagggacattctgtatcttcttcagctccaaaatagacaagccaactaccaggcaaaccagttcagaatccaaaagaatatgctcatgctatcacactgcgtagtggaaaagcacttccaactagggaggaaccaaagacggtcactgaggacagtgaagatcaagatggggaggatttaagtctcaagaaagatcaagatgaccaaccactcgaccagtcacttgagcaaccactcgtccagtcactcgagcaaccactcgatctgccactcgacagcgttactcgaccaaccactcgatctgtcatcccagcagcatcaccaactgctccaaaaccagttgctgtcaaaaacaaagaaaaggtctttgtcccttctccctacaaaacgcagcttccatttcctggccatcacaagaaagcgttggcagacaaatatagagctatgtttgccaagaacattaaggaggttgagttgcggatacctcttgttgacgctctaccgctaatcccagactctcacaagtttctgaaagacttgattgtggagagaattcaagaagtgcaagggatggtggtattgagtcatgaatgcagcgctatcatacagaagaagatcattcctaagaagcttagtgatcctggttcgttcactctaccgtgctctttaggtccattggctttnnnnnnnnnnnnnnnnnnnnnnnnnnnnnnnnnnnnnnnnnngccgctatctgtcgccaaaagattggggttcactcaatacaagtcctgcaatatatccctcatcctagctgacagatcagtaaggattcctcatggtttgctcgaaaacctctcaatcaggatcggtgctgtagagataccaactgactttgtagtcctggagatggatgaagagcccaaggacccgttgattctagggagacctttcttagccactgcaggagctatgattgatgtcaagaaagggaagattgatctaaaccttggcaaagactttaggatgacctttgatgtcaaagacgcgatgaagaagcctaccatagaagggcaactcttttggatcgaagaaatggatcagttagctgatgagttactggaagagctggtagaagaagatcatcttaacagtgctttaaccaaaagtggtgaagatgggtttctgcatttggaaacattgggataccagaagctgttagactcccataaagcgatggaagaatcagaaccctttgaggaattgaatggaccagcaacggaggtaatggtaatgagcgaagaagggtcaactcgagttcaacctccactctcgaggacgtactcgaccagccactcgaccttgtctaccaacgaatctggggagccgatcattccaacttcaaatgactggtctgaacttaaggcaccgaaggttgatctcaaaccacttccaaaaggtctaaggtacgcattccttggtccaaactctacttaccctatgatcattaatgctgagttaaatagtgatgaagtgaacctgctattatctgagcttagaaagtataggagagcgattggttattcattatccgacattaagggaatttcacctagtttatccaaccataggatccatcttgaaaacgaatcctattctagcattgaaccacagaggaggttaaatcccaatttgaaagaagtagtaaaaaaagaaattttgaaactgcttgatgctggtgtcatctaccctatctctgatagtacttgggtttctccagtgcattgcatccctaaaaagggtggaatgactgttgtcaaaaatgaaaaagatgaactgatccctactagaagtataactggtcatagaatgtgcattgattataggaagttgaatgctgcctctaggaaagatcattttcctttaccatttattgaccaaaagcttgaacgtttggctaatcatccatactattgctttcttgatggatacaatggtttctttcaaataccaattcaccctaatgatcaagaaaaaatcactttcacgtgtccttatggaacttttgcctataagagaatgccatttggtttatgcaatgctcctgcaacatttcagaggtgtatgacctctatattttcagacttaatcgaggagatggtggaggttttcatggacgattttttggtctatggccactctttctcctcatgtttgttgaatcttagcagagtattgaccaggtgcgaagagacgaatcttgttctcaattggaaaaagtgtcatttcatggtgaaggaaggcatagtattgggtcacaagatatcagagaaaggtatagaggttgacaaaggaaaaatttgaagtgatgatgcagctgcagccaccaaaaacggtgaaggacatcagaagcttccttggtcatgctggattctatagaagattcattaaagacttctccaagatagcccgaccgttaaccagactattgtgcaaggaaaccaaatttgaattcgatgatgactgcctcaaatcctttcaaaccatcaaggacgctttggtatctgctccggttgttcgagcgcctaattgggactatccatttgaaatcatgtgtgatgcatcggattacgcagtaggagctgttttaggccagaaaataaacaagaagcttcatgtcatatattacgccagccgaacgtgggatgacactcagggaagatatgcaacaactgagaaggagcttctagctgttgtattcgcatttgaaaagttcagaagctatttggttggatcaaaggtaactgtctatacagaccatgcagctttgaggcatctgtatgccaagaaggatactaaaccaagactgttaagatggaaacttttattgcaagagtttgacatggagatagtagataagaaaggcattgaaaatggcgcagcggaccatctgtcaaggatgagaattgaa

SEQ ID NO: 31903 - DNA, 527 bp, Arabidopsis thaliana landsberg
gcatctccaaaaacaagattttgttccagctgcccaagatcccagagtcctgtgtctctgattattctattaatttttccagctagctgaatttgattataaagtaagaaaaaaagactgtcagcagccacatctaacattgaattttgagataatttaatggtgagacaaacctctacatgagtggagagtttgtcaacttgttctccatattgcggcaaagcctgaactattttctgtagatctcgtgtagacaactcgctaccgtccctgcgtcacattagccaaagatgttagcaatacatatcaaaaaagtctgtgagggatcacgaatccatatcgaggataacaagaaacttaaagtcttccagatatcaaacttaggcaactgttccattgtctaagcactcggttatgaagacagaaagataagttcttagcgctgacaatgatctcataagaacggctttgttttttgaagcaaagttggtcattttctcatgcaaacgctcgttagcctatttatg

SEQ ID NO: 31904 - DNA, 635 bp, Arabidopsis thaliana landsberg
ttaaattataaacaagtgctaaagagtttttataatcttgttattagttattctataatttagtgaagtttctcaaacaatatatctatttgatgattttttcatgattttattttgtgaagaaaaatgtataaaattataaactaataacacaatagtttaattcattaacaatcatacatttttttttaattaaacaacacaaaaaatttattgactttattaaattttgattctaataaaatcagatttatgaaaattttaaaagacttttaatttacaaatcaaaaactaataatacattttaacagaaattaataaagttttgattgaataacaagagtcaaaagatctactaaagtttttaaaacaatatttcaatcacaaaccattttaggtgattttatttatttcaatataatttctttctataggcagtagtgtggaccataaaattactgataatttacttcctaaaaaggattatttaattgcaagattctaaactggattattcccacaatacacctttgtaaataaaaaccattaatccttcacaaatacagagtcgtgaacttaacgtctctctctattcctctgcttctctctttctccctgtgaaaaaaatggactcg

SEQ ID NO: 31905 - DNA, 597 bp, Arabidopsis thaliana landsberg
tatttgttggtctgtgatggttttttagacgttttcgaattgccagagtcgcaagttaagacacaattcattagtcgttgtagcttttttttttttttttctatacaaatcagttttgtcgtgatgaaaataacaagtttcagttaaatgaaagttcatattttggtttcttttcttctttaaaacagaagcgataatttttaacttttactctatttattccttctcttactcctatttttaacatggtatcagagcttgtattgatcgtggagaatgtctaagataaacgcgaataagaaaaagtctcatgcgagaagaagagaaagatggtgacaacatatcatcggtgagaaaccgaaaaattaacttggaagcaaagaacattatcagtccattgacatcgaagaactttatatgacattatttccaattaagggtgcttgtattccagcttttaatatgcttgtcgtttgctactccatcacttaatgaacctctgtggccaaatgtaacaataattttcatcaaacaccgtctagggttaaactaagtttcctaaattacgatagagtagagatttgtttctattgaatc

SEQ ID NO: 31906 - DNA, 841 bp, Arabidopsis thaliana landsberg
tttggatacagctacaataaagatttgacacatggaaatgttgtcctaattttgttttttcatcttattctctttttagaggtacatttgtgctagtttgttcatgtttgtcaatactcgataaatactctgtttgttagtttcgaaagtatatatatccaccaatcttactctcgaatgtcattctctaaccaatctgcaatttctcctaactaaaaattcctagtggagataaagcatgacggaatgaatgcatgatggacaaattagtataaaaactcatgaagatttgatgtttttgtttttgctaaaaggtaaatatcattaatatgaaatagagtttggatttatattttgattatcaatacaattcctagtaaaaaaaaggtttaagaaagagaaattaatataacatacagaaatttataaattagataactaaccaaaaaaaaaattatatgatattgtgagtataatatatatcaatacatttttatccttttaaaaaccatcactattaccacttttggccaccaccacctccggccaccaccttcgtccacgacaacgtccagtcaccaccaccgttcaccaccacgtccggccaccatcacctccggccactatttccgaccaccacaaccttcggctaccaccacttccagccataaccacctccggccaccacaaattccggccactaccctcggccaccatcattctcaatcacaaccacttccggccaccaccatctctgaccaccaccacctccggccaccaccgcgtccagtcactatcacctccaccaaaacaatttgggtcaaaattacccttaaaggta

SEQ ID NO: 31907 - DNA, 467 bp, Arabidopsis thaliana landsberg
  unsure (1)..(467): unsure at all n locations
ctcattctttttaccatctgaagctttcaaaccagttaaaatctctaacaatatcacaccaaatgtatacacatcactcttcgttcccaaatgacctaagaacattacacaactgtcttaaacatcgaaccacgacagattaattagagtgttcgttaacaaaacttaagattttggtgtacctgagattacatattcaggaggtatatatacagttcttcctatgaatgcagtcgtcacgctttcttctaacaaacatagtttctttgatccaagatagaacaattttgtgttgtagtgctgatgaaatttataagttcaggcattattgtaaggttataaacaataagaacagcaagaagagtgttctaaagtcatttacctcgtcaagcaaaatgttatacattctgagttctcgatatagcgcgctgntcttgacccaatgtagaaaatgcactacttgagct

SEQ ID NO: 31908 - DNA, 457 bp, Arabidopsis thaliana landsberg
atgtggttgatttagatgacagtatgttgtaatgttagctcaacttgattattcttcctatttgcagcggctgatatattcatgtggaagaacacgatgatgtctggtggtgtacttggtggtgctacagctgcttgggttgtgtttggattgatggagtcccatcttctcactctgctttgcctcgtgatgattgttgttctcgctgtgctgtttttgtggtctaatgcctctatgttcgttaacaagtaagttattcctgatgattgtaaatatgtctcagcttatggttattcacttgtgcattgttgtcaattgattctctgtcaggtcccctcctagtattcctgaagttcatatccctcagagttcctattcttcagcttgaaaatggaaacagaatcgtgttcatccgtggattctcttctctccgtgcatttgcgtcataaagggttct

SEQ ID NO: 31909 - DNA, 2737 bp, Arabidopsis thaliana landsberg
  unsure (1)..(2737): unsure at all n locations
gctttgcttagacaagacagagagaatgtttgttgtagaagcagccccctgactccattgcctcaccacaccacagttatcaatcaccgaagtgtgaaactcatctcattcattattttattccaatttattcagagaatacatgtgttgattaatagcattatatttatcataacagtggctttgattcatgaaattaacccaatggcgctatgagtcgttgacatctagcaggatatcaacaccggatttaacaatagcagtctctcacacgcagccatttgtttgtataatgtggaaaataatactcgtctgcctctcagattatattccttacggtgtaaaccaacattacataatctggacggctaatcttaaacaaatcacgtggaaagtatcgtaatagctcgtgacaaccaaattgtttggccggtgcattagcgccacgtgtcagacaatccccgctttacaggtccacgtcaagcgatcctgtttccaacactgaccgttgattacaaagaatcgtccaagggtccacgtgtacgaacaggatacgaatctgatccgtaccgtacctccaaaacaaaccctctggacagttcagtagtttcttcctaaaactgaaacaagctttcattggctttgttgactaaggccttccattttctctatcaagaagaggacgaactatagatagatatatatgttcatgaggtgtaactccttgaagaatcaagtaatcatgaagctcaacgactttttcttgactgcgatgcttactaaacgatgtaatcaaagttccatatgttatagaatccggaacaacacctatttcaaccataaacttcaaaacttccttcgctttctcataagaaccaaacttgcataagtgattgatcataatgttgaaagtcacaagactaaccgatttctcaccgtcctgtttctgcattttagataagatatcgtcagcttcttcgacattcccggttttgagagactcgttcaacagcgtgttgtaagttacaatgtccttgatttccatagcgttcacaactgcttcagctgcaccagccattcctcttttacttaatccattcacaattgaattgtaaatcacaagattcgatgttttattcatcttgatcataccatcatatatctcgagagctctttccaacttaccttcctttaggtatccatcaatcaaagtaccaaacgaaatcgcatcgagactcaaaccttgaaccaacatactccctagaatctgatcagcacacgccagctttttatcccttacaaaatggtgcataagcgtgttgtgacaaactatatcttccacgagcttcttctctgaaatctgtctctgaaactcaacagcttcctttacatatccgtttctgcatagacctctgacaacaatggcttgagtaaatcgatcaatttgcatatttttactattcatatcacgcaacacagacatagctccttctatgtcaccttccataaacagccaataaacaatagagttatagataactgtatttaccacaagtcccttactcgtcatctcatcacacaaccttaaggcttcatctgagcttccagctctaccatacgcatccaccaaagctccataggttctttcattgcaatcaacacctgatttgaccatgtcaccacggattctttccgccaaatccaatctcccggccttgcaaaacccgttgataacagaattgtacgtcacagcattaggtgaaacaaagtttccagacatcattcccatcttccctaaaagctgcaaggcaaatctcatatcacccgtcttacaagctccatcaatcatcatattaaagctaacaacattaggccaaaccccacatttcaacatccggtaaaacacagataacgcttcaaacaacttactctccttacaaaacgaatatataaccagattaaatgtattcacattctcaacataccctaaagaatccatttccttgtaaaccttccaaaacctatcaatctcattcacattcaataaacaacccataaaattattcaacgcatgaacagaaacacaaaaaccttctgctctcgtctgctcaatcacttcataagctccttgcgcatcaccattctgtgtacaagctctaaccaatgaatcaaacacatcaggactcgaaccacaagcttggtaacttctgattcaaacccgacaaaacatgtaaaggactcaacttttcaccttctacagacatcaaattcgccatttttgataaagcatcatcaaatcttctcgaaccaaccagcaaatgaatcatcacacaagaggcttcgaatcgattctcagacttagccacagtgttactccttaaaacccaattgtagaactctagagctaacttcggcgagcttcgaaactcgcgaagaactcgacttatcaacggatttgtgagactcgaggagaattgatgaagagtgttccatcttctctgtcttaaattcaaacagagagcactaaagagaatatcttccggctcaggattcgagaatttcttagcaacgtgaaagcaacgtaccaggaagctcgttcttctggagaaannnnnnnnnnnnnnnnnnnncacagaaaaacctcatataacgataaacccctagaagcaaaacccctaaatctagacagaggtctttaaacgtagaattcgaaggcatgattcgtcgatacatgagc

SEQ ID NO: 31910 - DNA, 1103 bp, Arabidopsis thaliana landsberg
  unsure (1)..(1103): unsure at all n locations
ttgggtttggttcgattatttttgctttggttttggtcgggtacatacagtttgaattatttgcccacacctaattaagagcatcaactaaagataatcatgagtcttgggctttacaaggcccattaagatcaaagtgaaatgcccaaatcatatatggcaaccagtggaaagcttaagagcatcatcaactaaacaagagccattttctcagttgtttattcattttctccatcgtacatagaaagagacaactagtcataactccaattttttgaaccttcccactccaacaatgccgattcaagtagcgagagcttaacaatcagcaataatggtagaaaaacgagtaggtccaaagatatgcaagactcggaataactttcagtttctgagtaacacaaagtattgatgatggattgtgttattcaccatgaaagtaacggatagagaaatgttgcttgagaatgagactgacaaatcagactgtcatattcttgtgggttttctctatgcaggtgaaaccaaaagtacaagggtactaagagaaactacatgcagccaatgtcaaaaccaagaattcatctcctaaatgaaacatatttgataaaattcatctgtttgttgttacatggatagttataatgtaaacttctaagcaacatatttagatcaccaaactatacttcaagtatctataaagataagctctttggtgtgtaccttaatggaaccacaatcttaacttatataattcatacaaatcaactcataaataagatatgctctaaggtgttcttagccactaacanaacanacccatttcacatctttgcanaccanaaccaaacccatattgaaaaaccatacaaaattacataaacaaactcactatacacataaactcaaatgaaagatttgctccaatgtgttcttagccactaacaaaacaaacccttttcactttttgactcactggctactcttaatatatccatctttaactattaatcatgataaaactactcagcgatccaaaagcatcaaatcacataaacaaactcgctatgatctaacaatctcaaatactaaaatcatcatca

SEQ ID NO: 31911 - DNA, 347 bp, Arabidopsis thaliana landsberg
gtgatgcatcaggtataggtattggagctgttctaatgcaagatcaaaagcctattgtctttttcagtgagaaacttggacgagctacgctaaactacccaacctatgacaaggagttgtatgccttgttccgagctctccaaacgtggcaacactacttatggcctaaagagttcgtcattcacactgatcatgagtcgctaaaacacttgaagggccagcagaaacttaacaagagacatgcgaggtgggttgagtttattgaaacatttctttacgtcatcaagtacaaaaaaggtaaggataatgtagttgccgattcattatcccgagggttcaccctactc

SEQ ID NO: 31912 - DNA, 435 bp, Arabidopsis thaliana landsberg
tgttatgttagaaatgaaaaaaaaaaactgaaatctgattttctttttgttcctctctttgaagatttgggatttgtaaaagtgaaagagtcagtgatattgacaagtagatgaagaaaggtattaaatcaaatgaagaaagaacaaaagaattctccttttggatttctctttttttttttttctcttactctctaacttaatgctcacgaacactttttatcattagtattgaagtattaaatatgaccttttcactagagattaagggtctaattgtcttttagttttctaacgcttatatttgtatttatcttagtatttattagataattatgtttatttagaccaaaattgtaaaccttaaaacccgtttcatttgatgatttatttcagagaatatttattttgaaaaataaatccgcccagtaaagt

SEQ ID NO: 31913 - DNA, 782 bp, Arabidopsis thaliana landsberg
tgaatatatatcatgcagaactaaaatttaatactcacaggagtagaaaactgagcagggtcaactggagggaacaacggatgtggtggagcaaaactgtaacacccaaaatcctattttgggatttaaaaatgttttcgccaaaaggtttgagttaaaaggtcttttgatagattcctttctttataaagtttatctctctaaaataatattaagagttgatattcaaaacctagatccaaaacttaaaactaaaggttgaaacaatcattaaaaagactttcaatctattaattattcccctcattattataaaatgaaagcactctttaagaatatctgaaccaagacgattcatggtaaagattatatattaacttatcctaaagtaaatacataatgaatactgcatttttaataaacttttaattagaatatgcattcaaaagaatcatcttattaaaatatgtgtgtatgtgaattttgtttcaagcatttagattaaataaataattaatatataaaataaaacctttgcattggcatgttggagatttatttgtttctgccttttaaaaaatctaatgtgaaattcaaactcaatttgaatctaaactttagggatttgaaatagaaaataaactagaaaggaaaatgagaaaacctccttcctacttggaactcaaccctttgttctcttctgctcgattttggcccaagttatttcctcaaccggcccatttactccatgcacccgcatggcccagccccacgcacgctcg

SEQ ID NO: 31914 - DNA, 3308 bp, Arabidopsis thaliana landsberg
aactgcgcaacatctcaacttcaatccccttctcatattgataccaaacgttaggaaattattttttatgaatctattggcactcaaaaatcaaatgtaagttatctataattttgtaatgtgaaatacacacatttgcatccattctgaaggaatttataccggtttataacagatttataaaactaattacaaattcaatagccaggattcatgtaactattgaattaaatctatatcatcagattataaatatacctgattagttgcagcgcaaagatgaactcaaataaaccgaggttatgaagcactccaaacgtagtgtctctactggtatccacactcacacagactggatctaacgggatgctagtaccgtgaagatctcggaataacaaacttttatgtctttggtgtattagggttggcggctagttacgtgtgtgttttaacgtgatcacatgactatatatagacattactaataaacctagtttactaatgggccatcaagcccaattaatatcacgttgataagtgtgtattttgcatgttttgagcatccatttgtcatcatttgtcatcactttagcatcatatcatcactgttttataccattttacatcatttgtcatcactttgcatgtttaggatagttttgcatgcatgttgcatatttgcgttgatttgaggtgatttggagctgttgtcgagctatctggaagaagcggacctgatcatgacaaaccactcgacccaggggtcgagtaggagcttcaagatctcaagagaccactcgaccaccaggtcgagtagaggacatcaccacttcactttaccactcgaccacgaggtcgagtgccctcatctgcatcaccagactatcactcgaaatcacactcgaccatgaggtcgagtgtcttcacctccattatcagaccaccactcgaccacttcactcaacctggaagtcgagtatcttctaacaccactcgatcacatcactcgacctgcaggtcgagtgccttcaccttcactcccagaccactactcgacctcgtcactcaacctagaggtcgagtatcgccatcacaacacttgactgcatactcgatgacaagctttagagccttcttcattccgcactcaaccagacactcgagcacaaggaagaaaagaagactccaactattcactagacctctcactctaccacctgggtcgagtacagatcttaacccgtccaaatccttcagtcgttttagtattagggtttcgggatatttggctataagtagcatgtacttctcattttcgaagacaagaagttttttacctagttttatttccgcagaccttgtgttctagactttttgtaatacggatttctctttatctattcagtattcagcttttgttcttgatttcgtttactgttgttcattctgttatcatcctgctgttacactgttgttagcatgttttcaacttgttcaatgtttatgctttctgttatgatgtctgagtagtgaataggtttctgaggatgggttagagtagtgtagaattctcagtatgctaggtgattgagtattgattgatagatcccttctggattagttgtttttaatgcctattgctttctgatcaactggaatttgagcctagacatttctgcgcccaaaaggtgttcgatgaaatgtctgaaccactaattccagagattcgtgaccctgtaccagggtattggttgtagggagcgttttggctttaacttgttgattcgtaatgcctgttaggttagctctcgtcaatggtgattgagtctgggactaggttagcttgagagtctctgttgcggtggcacttatatttggttgatgaacttgttgcctagggttaatttattgagcatgtcaatcacctgtaaactgagaaaacgaaactacttaattaccccatcctcgggaattctttgtctgattgaattctttgtttactctactgttgtttactgcatcttgttatctgtcgcttaatttctgcagttctttcttgttactcgacctcatactcgaccacctagttgtctggcaacagactgtgcagtcgagtatctgtatttcattttctgtctgttactcgacctgtcactcgagtagctgtgttggtcgagtgttttactgtttctgtttgattttctgttttctgcatgttcacttaggactgctagaacgaaccaaaacctgttattgcttggcttgacttaatgacttctgatcacatcttgattgttagcatcacacccatttggattgacaacctaaaatactacaacgatatgattggtgtttcaggataattgactaaaaaaacctattatcaatttgacgccgttgccaattgggtgcttgtttgttacatttgagatttcagacttgcttagatcttgttctttttcaattttcttttcggttactaactgtgtgtttttcatgttgtcttcttgatccaggtacacctctgctgtatgcgaactcgatcaacaggcaatcagaacctccttttcaatcacaacatcgaccgcatagctcgcgaactcatagaaaggagaaacacagtcaaccttgtacctcagtaaccacacaaaatggctgaagaacagaaaaaacaaaatggccctgccaacattggtgctggagatgcaccacgtgatcaccgtcagaggaaaggaattgcacctcctgctatccagaacaacaacttcgagtttaagagtggtctcatctcgatgattctggggaacaagttccatggtctgcctatggaagatccactcgaccacttggatgaatttgataggctctgcaacctaacaaaaatcaatggtgtcagtgaagacggattcaagctccggttgtttccattttccttgggcgacaaagcacacatctgggaaaagaatctgccccatgactcaatcaccacctgggatgattacaagaaggcttttctagcaaagttcttctccaatgccagaactgcaagactcagaaatgagatctctggtttttcacataagactggtgaaagcttatgtgaagcatgggagcgtttcaagggttacaccaaccaatgccctcatcatagcttcaagaaagccactctgctcagcactttatacagaggtgttctaccaggcataagaatgcttttggataccaccagcaatggcaatttcgagaataagatgttgaagaaggcagggaatttgttgaaaacttagttcagtcagattacaatgact

SEQ ID NO: 31915 - DNA, 651 bp, Arabidopsis thaliana landsberg
gtgcatgcgaactattaaaggtgcatatgaagaagatggtcgtgggaatacataaggaaagggttgcaagccatcaaggatgcgtttgcccaactcgtttatgtcgacatgacagagataaatgagctggacgagaacaagcagaagaagaagaaggtcagttgcacttactacatcaagttcgtgaagggaaacaagaagaaattctccatgagtctaggcaatgtcgaaatcaagtgttgcactatcaagaagtgactagttttgtttggcttactgttttgtctaaaactctagtgaagaaacttgtttgcttttgtctaaaactcttgtgtttactgttttgctaaatcctctatatcgaattgctttatgagtactagccttattgatatttatgggaaatgtggtcttattgttgaagttcatttaaacttgaattaatagatatagatagctacacaaagtctaagcttttcaatattttttgttttcatttagatagtccactagactatcaacattttatcgtattgactcatatctagatccagaaatggtattacgaatgtagagaataacggagaatagagtctgaatgatttttttctaagtccattcaaactcacattgggccggtaacggaccaat

SEQ ID NO: 31916 - DNA, 561 bp, Arabidopsis thaliana landsberg
  unsure (1)..(561): unsure at all n locations
tatgattctcaatataagaagccttggaattggtgcattgctttaatattttcatataatcacatgataacatatttgcttaatgctttgtcataatagcaaaagtgtaagctcaaagaatatgcaatgaccattttgtagcacttaaaaaagtataatctcaaatacagttaaacctaataaaacaataaaaattaattaactaaatcctcaaataaagagaaatctaaaaataaaaaaatattataaataaataaataaagattctagtttcattttcttattctttctgatatattaaaaatggccagtcacatttttttgtttctctctttgtaaaatttatccttttaattacattattcggtactcttacaaaagaagtcgcaactactcccctctaatgcaaaacaatcaattgtgcacccaatatacaagtcggtaaatttttgaaaaataacaaaatcgttcggtaattgcaatactntcaaatacatctcctctaatgcatatngtagtaatttataagaacacacattgaattattaacattaatgaaca

SEQ ID NO: 31917 - DNA, 102 bp, Arabidopsis thaliana landsberg
ttcctccaccgaattgtagtacagaatcatcttttaagatttcggtcaaagcaggcatatgcgaaacgtgaattccccctgaagccacaggcagaacaccac

SEQ ID NO: 31918 - DNA, 1347 bp, Arabidopsis thaliana landsberg
ttcagtcaagataacgatagggttcttttcaatacgtgtatggaagaccagccctcattctgtatggttcctctaccagcagcctggtgagggctggttgtctagcagatatctaactaccttggagtgaattctgtcttgattatagatgattggaacaattattgtacaagctatttttgtgtgtgtaatatttcttcctggaatgttttaggggaactggaactattttgcagcaatgcgcaatgagaaaagaaatccaaaattagaagctacacatctggagaaggccaaggaactctatactaaagtatggtgtttagtttttctcctttctctcttctaattattagtaatttgggaatatgcatgtgcttctggggggcgtcttgggtggaggtttgcctgtagaaacctgaacacgttgttgaaatttttgctataccagtagcattgcatgcttaaattggcgatgtcctctttccatcaacgctaatcgtctttctcattgttgatcgttgggattaacaggtcctgactcaacataattccaacatgtatgctgccaacggttctggcattgcattatcagagaaaggccaatttgatattgccaaggatgcttttactcaagtcagcttttatcatttactgttcatagtataggctagctaaattcttgaaatcattggaattttgtgaatgttttaggttcaagaagctgcgagcggaagtgtatttcttcagatgcctgatgtatgggtgaatctggctcatgtttactttgctcaagggaattttgccttagccgtgaaaatggtttgtcattttatatagcgtttttttttttttttaaattcttttggttgatttcgatgttttgcttaagtactctgttcattatctatgttgttggcagtatcaaaactgcttgcgaaagttcttttacaacacagactcccaaatccttctttacttagcccgtacccattatgaggctgagcagtggcaagagtgcaaaaagacactattaagggccattcacttgactccttcaaattacacattcagatttgatttgggtgctgtaatgcaaaaatcatcgtcttccacactgcaaaagaaaaaaagaacagctgatgaggttaactaaagattttcccttgcttctttctgactctagtcttgtgtcgtagaagatagacagatattaacatgcatcgattgggaatttatcagactatgaacttgcttctacagcttgtgtatctagaacttttaacacatgaccctagcatagtatgttagtcatccttgctaagtaatggctaatctagaatgcaatac

SEQ ID NO: 31919 - DNA, 1171 bp, Arabidopsis thaliana landsberg
  unsure (1)..(1171): unsure at all n locations
cccaactacgaatacccaaaccaccacaaatatgtttatgcagtaagtccccatccatcctcctaccactctcggtggcctctccaccgcattctatttacgatatatcaatattaacaacaattagatataccaaaatattattttagctatttttacataatctatgatactatataataattttaatataaactaataatatactatttccaattattctttgtaaacttatactaaaattgtaacaagctttttatgaaacaattataattttaaaatagatattttggaagttggaaatctaacctctcttgaaggagcaggagcaaaggtaagcatatgagccaatgcggggatgatgtagacagtgaagctaactaagagagatccgactgcggaattgattggtccgaaaaaggggaagataatggctaagaaccatatgggtacaaccacgggtaatctagccatggctcttttgaacatgctcttcgtctcatgcacacctatcaatttctcccatacaaagtataatggtgtagacgcgaatccgaacgttataaattgatgaatgagcatgaggatcactgcggtatctctaaaaccagtcttaggagaagagagagcgcattgaatgagttagtagcttatcgccaaacgcccaataaaccgcagacgcggatggtagcgttagcgttagtacatatatggtcgctagtagatatatcgccttgaacttttgcggtttccacatagcgtgcattatctccctattatattgtttcaaatttccaatacataattagttaagccattaattaagccattttatttttccaaacaaaaaaaaaaaacttacactgtgacggcgtggccaccaaaggtgtagagaatgttggtggctccnnnnnnnnnnnnnnnnnnngtggttggaccagagtgtttcacatcctcagccttttttatatgaaaaataaatatattaaacaacaataaccaggactatatgtctatatcttataataatcaaaacaagatttgtgttaattataatgacctggccatgaaggagtgaagcaatggtgagataccaagaagtgtaagtggtcatagcgagtccgaagaatgaaaaaattctataattgtggaaggaaggaataaaaacggt

SEQ ID NO: 31920 - DNA, 443 bp, Arabidopsis thaliana landsberg
  unsure (1)..(443): unsure at all n locations
tttgatttttcgcagtacagacagtaggtcggcagttgggttggatctgacgatctcttgcccagatggcttttcttaagaaagtcagcctttcatggctgcgctgccccccggtcagttcactttgcagcagttcatcggattcttagatatattcgaggtaccttttctcgagccgtccttttttccgtcatcgtcttctttagagttgcgtgcaactactgatgccgattgggccttcagataggtgctcaactacaggcttctctattttttggggagactctccactatcttatcttggatgagataaannnnnnnnnnnnnnnnnnnnnnnnnnnnnnaagcggagtaccgtgccatggcacactactagatagattgtatggcttcgttggtgactttctgatcgcgggtttcattttaaaaccccaattcatctt

SEQ ID NO: 31921 - DNA, 3685 bp, Arabidopsis thaliana landsberg
gatttatgaatactctttactatattttatcaaacctctttaaatccttagattaaccaattcaataacagtttcatacaatgttcaaaaaatcgttagtcggtagctagacgtttgataagggtttagcgcctagatagagataaatcgtttgctgatctattccaatcggttctatgcatttattaattttgatataattatggtaatttaatctaaaaaattacatacattaaatttgtcgaatccacgtacaaaacttcttctaacttataattttttaatattttatttcttaaaaattggcaaccactcatatttattaattttattaaatattttctctcttccccttttcttctttttcttccggaccctcttcttccaattttctgcaacttttttttctctctcactagataatcacccgcgctacgctgcagtattttttcagatttttttatcgtttaatttaaatataatttttaattatgtaatcattcattcatgtaataaataattattcttagtattaaaatattttttccgaacaatattttcaataatgcatcatacacacacttcctaaacaatgttcgtcttaaaccaattaaatagagggtaatgttgggattctcgaaacctaattaagaatttgatgattaaatttcttacatactctttaccctcggtgatttattatctacatatacatttttgcagtcactttattaaataaatcctcaagttgagacttatttacagtgattgtcattggtatttaataattgtttttgataattaaaaagtaaatcttagaattaaatgtttgcatttaactactttcccacaatctctccacattaactacacaattagttactgaaataaaacttccaaaatattttatatcatttaaacactacaaaattattatttttaaattgcttttttcatgactataataattcgattataagcatcaaaccgtagagatatttgatagcatttaattactacaaaattaaaaaatatttagacaatgattcataaacatatcattaataaaataaatggtttttttggcaggacgggttttgcggaacgggtttagcagaacgttacttaataacagttgtaaactataaaataaaaatattttatagataagtataatttgcaaacttttatatatagtaacttttaaaaataaattgtctccgcagtgtaccgcgggttaaaatatatatgaaacaaaaagaaagagatgaaaatactttgatgtcgggatttagataatgcaagtatagactcggtataaagattcatgcattgccatgaagacataagacataaatattatcatgtctatatctcaccgtccaaggatacatgaacatactaagctccttgttatatagataatgttgtttttggccggacaggctaagactatttgacagtgaaagttgttgaaggtgaccacgtagctaggcaggatacaatcatccaaccctcaaacatcacttttaatcattaacccatactttctcctgggacaagacagctaatcattcatcattaaacggcatcgtatctttacacagccaccatgtaggccagttcttgattaggcgtgggcaattatatcgtttattaatatcattaccctttttgatcattcttatatctgttaagaactaggttctaacatagtttatcttctttagtggaagctacaactacaagaatgttataaattacataatttgcaacggacttttgtatactttcaataagaatttagatacagctgctttgcatctcttttgacccaatctatttcccataaaattttttttttctaacatcttaatacatgccttacaaaggaaagtggtacatgcattacaactatgcgcatgatgcaaaagcacattagtttattaatgatttttgacttgtggagtttggatttgtatatgaacctcttctctcccaaaacttgatggacctatgcatttttatgggttagacattgtcatgtggttgtctttcagaaaaaaatcaactcttttggtgcgtttctactcaagctgacctgatcagctaatagagtttatcaaaaaaaaaaaaagcattttcattgacctaactttattaaacttagatttcaaaaaaactttgtttgagttcacattaacataatcagaagcccaaattaatgatataagcttagaaagaaataatgaagaagataatagtcagaattttgggtcctcatctcgttgttgattgcgatcaattaatgaacttttacataccgtaattaacataatctaaaattctaaagtccgcccaacactatttcaagtttttttttaaagttccgaatctttggcccataaactctttcgacatccgggaccagcctctagtgtccatttgttcatagtaactttttggcccttattacactaaaatcttttttttttttcttaagaatgtaaaatttatattcaaacaaaaaacgttgttacaatagatgcttctgtttttctaatgatttagactgagaaaaaagaagagtgcagataatttctgaaaaaatgaagcagttagaagagaatgatggtgaaggacgcgttgagaaccatagtcgtagacaattgtcgtagctatggtcgccaacgtcgttgattgagctgattctgtttcgcacggttttgtcgatgagctggatgagtctagttgagggggactgcgcttctccgtgacgtcttgcatttctttcccgccagatgtgataaagagatgcttggaagacgtagcgaaacaggaagagaggttcacttggtagagttgagctgcagaggagagcaagtagacgatctcaatcagttgaatattcgtgtgataggagacgcctagtgagattgtcccaaattgcagtggtataatggcaggagaagaataagtggtttcttgattcttcaaaattgccacaaagaagacagttgatttgttgtccggaattccacttttagatccgatcacccgtagataatctatcatggatcgcaagccacagcaggaaagagtatttgggtgtgttgtaggagaaccaaacacccttataccaaagtctgcgtgtgtgaagaacccggatgttgtgccaagttgcttttgttgagaagctatgtctgaaattgtcacctgaagaacgccacagtgatatgtcgtcacctaacctcctgttttgacgagtatactgaatctctgcctctatcttgttgtaaatggctgtacgatgtcgcctagtcctgtgagaagccaatacagtttccaccgtagcttctaacggaatccccatgtttattgttctgcgagcatttgtaatatccacaagctgcccgagctgtgaccaattgtcataccagaacgatgttgaactaccacttcttgtctcaaccttacacattgttttagccacttctctatacttaagtagcttcttccacatccaagaccccaagctagagcgatcgtttgtagaccagaaggaacctttccgaatgatataagtccaaacccaattacccacaaagaaggctgccgagatatgagtctctagatcagttttaaacaactaaccttatttgcttccgaaagtgatttgataccc

SEQ ID NO: 31922 - DNA, 856 bp, Arabidopsis thaliana landsberg
ttacatattttgattggtcaaatgccatttccatttaattaccaatcattaacgctaatatttgtaatacttcttttttcttatggcatataaactaaatttgggcatattatgttttattcagactcaacgttttgcaaatttattaaatgtgctattttcttgtctccttttttcactgttgcgataatgcagtgtaattaacaaaaaatgtttttgagttttgttttttcatttacattttgtatattttcgacataagtgaaatatatttaaataattttaaaaataagattaaaaattatttttttatgcaaatgggatatggattatataaattcgcttttcacattttcccactcaaggtataagtttacatagtgtttcaacatatcagtagtagagaatgtattatttcattcgcgcattaattgttgcaatttggaaaaaagttattttgccaaataacatagcatgtaacaagaaaataactatcactcgactttatcatcgttctcttcatcaccgtctggtgggggggacctattcagatcaaattttcgcttatatccaactccaattaccttgtcttcctcctcgactggatcggcatttaagtcaatccccgcccttccgatacttgaaacaagcccttcaccatcggaagaagccgtagcgagtccaccagcggaagaagcagtagggacttcaccaacggaaatagcagtggcgactgcaccaccggttgaagcagtagcaactccaccaaatccttcctcagcagcattgaatgttggcggaggaagataacctagataccctcgatccttatgctgccttagatgtccaaaaacag

SEQ ID NO: 31923 - DNA, 1678 bp, Arabidopsis thaliana landsberg
ttggtggctaagcaggatttgatttgatcttctagaattacagatcgagaaacagcttatcttaggttttagaaaatgggatcttcttctgggcaaagtggatacgatctgtcttttaagatcttgttgattggtgattctggtgttggtaagagcagtttgcttgtcagcttcatttctagctccgttgaagatcttgctcctactattggtaatgaatcgttcgttctaaacagtcttagagctagaatcgtgactggtcagacttcaaatatctctttctcgacatgatttttttttgcattgaaggctagcttattgtttgtgagctagaccactgtctggtcaaaattcaaatgaagttgaagtttgagaacttgaagttttcttcttgatattctgtttgaaaataaactcggaaaacataactcttgatgcttatctgaatttgaagcctgcttgagtctgatcagtataacattgtaggtgttgactttaagatcaaacagatgaaagtaagagggaaaaggctgaaacttacaatctgggacacaggtaaaaaagcaataagagcaattcgagtttttggaacgtgtgtagttagttactacaaaactcatggtccatgtgatttcttgtttgtgattgttgtgtagctggacaagaaaagttcagaacattgacaagttcttatttcagaggctcccaaggaatcattctcggtaatgatatatgagatcatataattgtcagtagctgttgtcgtaataagttctcaagacttgtattaatactctctccggattttcttggtcatggtgcagtttatgatgtcacgaaaagagagacatttttgaacttggcagatatttgggctaaagagattgagctatattcgactaaccatgactgcattaagatgctcgttggcaacaaagttgatagagtgagtagcagtagtagtaacacttgtagtcaaacaacttgagatcggtttcactgatagttgtcattgcaggaatcagaaaggaaggttagccgggaagaaggaatggctctagcgaaagacctcaattgtttgtttcatgaatgtagcgcaagaacccgagaaaacgtgaacggatgcttcgaagagctagctttgaaggtaagaaagaatcttgatgatcccttttcactttcaaaaccggtcgaaactgaggaaaataaataataggagagttgcaaaatgaaacagataatggaggtacctagtcttttggaagaaggatcaagctctgtgaagagaaaaccggattaccgagctcatcaaggccggtgttgcagctcgtgagtcaccttgttaaaatcgggtcggaagtagcctcttttgtgtgtaaatttctcaagaagcttgacttctctgtaaatttatcaattccttcgatctttcttcttcttgcctcggcggagattttgtaataagtttgtaaccccagaatatatgaaaaaaggcacttcatgttcttattatctcgtgattacttttagtctgaaattttatatctgtcacaaaacacaggaacgagataactctctaatttcgagccttgaagccgtagcttacacacataacatctgcatttcattaattcaaagtttaagcacttaaacactgtctaccattaccagtacagtg

SEQ ID NO: 31924 - DNA, 181 bp, Arabidopsis thaliana landsberg
tttttttacaacgtctgatccctaaacaatcggggggtaatctttatctatcacaaacacaatcaccactgtgatgtccttgttgacgactttgactgacatcaacatgggccgatccgacctacttttaaccttgccaatcataaaatttcgtctaacacaccaccagacactatcttct

SEQ ID NO: 31925 - DNA, 1073 bp, Arabidopsis thaliana landsberg
  unsure (1)..(1073): unsure at all n locations
attttgtagttgaaagaaatcttataacagaaatgttgagttcattcttcaagatttagataagtcttcaacttgttgagaattctatgacaaacactcatggtattcactttggagattaaatcaagaacacacgttttacgagtttttcgagatcgatatgatcctagtacatttcagcaagaacaacaccttgtaatttaccatcagtggagtttttgagttatagaaaaaaaggagaaaacaaaaagactagatatacaagagctttggagctcaagggctttataacaatatggttttcagttagaataataatcgtcacctccttacaacgacattgcttcattctagctaaagcacacantcttacgttgtcctgtaaaaatgcttcaaaccagaacattccaacaaanatagagtctcgtctcttcttacggntagtacacagtaattgtttctattaattcaatggagttatgttcaacatatccactataccacatttggattcaaacccttatagtagaatatggtttttttttttttccaagtgcattcaacttgtccaaataataataatgtaaaaaaacaatttttaaattttttaaaatatatggatagtaaaaaaagagatctgagaatttacctttttttatggtagctgaaaagtaaaagtaaaatatactccatagttatactaattattttcgatatccattgtaatttagtacatataaccggtccggttgactcacttggttcaaaaggaaaaatcaaaaatccacaatccgtgactaacataataacccaatctacaaccgtcgattcattaataatcaaggatccatatatctcataaacctttctcacggatcgttatctttgaccgtccgatcaaacaataaaacgaacggtcacgattcattttctaacccaaacaatcttctttataaataaaaaataaattcttctctactcatcagaaaactcaaatcttaaaactttctggaaaaacaaaaatgtcaggaagaggaaaaggaggaaaagggttaggcaaaggaggagcaaag

SEQ ID NO: 31926 - DNA, 500 bp, Arabidopsis thaliana landsberg
  unsure (1)..(500): unsure at all n locations
ctgttgtggatctgttgggctctttgcggcttggcctattagatttagacgtttcggctttgtaaaattttctttcttatgcaaccaatagcaaatcttttaagaaaaaaaaaaaaaaaaaagcccgtaattaatctcgtaagtttgactttatttgcttatatgccagcgtcaaatccgattgagcacgtataacaatatccaaacaaaaactaataccattatttatacatacatgttgcatcacgatgaaataaacaccttaatggcagtttaaaagtttgtgtgtatcaccagatctgttaccaacacgtaaatctattacgagatctattacgacttacaagagagaaacaaattgtttaataattcaagttggattgctttcaagtagttaaagtgagttgtggaaataaaagaggattgtttaatggttcctcggtnggaggcaacacataaatatatatcacgagtgagagaaactggatttttttatgttc

SEQ ID NO: 31927 - DNA, 894 bp, Arabidopsis thaliana landsberg
tttcatcagcggaagcagaagtgagaggaggaccggggacgatggaagaagatcttattcttatcaactatatcgccaaccacggcgatggtgtttggaattctctcgccaaatctgcaggttcgtttaatttcttcttaaaatcaaattcaattatttatagttatatacatatatggcgtctgaactagggtttcgtcataacatgcaaaggtatatatcctatacgacaaaagcagactctttttttgttaaggtaaaatacttcttcttacgtacgttcatttcttatatatataaatctatctacacagatataaattatattttcataactagattttttttttaaacgtgtatatatatatgctctattatagtcgggctttgttaaagaatcaatctaaatattaaaacgttttcatgtgttggatacttggatatatgatgctttaatgatggcctactggtagagtaaaataatgtaaaatacttttttaaaacatcaaaaataaatgatacacgtatttttatactcatatgtcatatgtgctactactaattataattatgtgaatatatatgcacgtagtaagagtcatattgattgtgatgattgataatatgaatgtatataggtctaaaacgaaccgggaaaagttgccggctccggtggctgaactatctccgcccgacgtacgacggggaaacatcactccagaagagcaacttatcatcatggaacttcatgctaagtggggaaacaggttggttttaatttacttgtcgtagaatatatataaacaattatatatacatacatatacactatgtgtaactagagaaaaagacatacataggcaacatctttcaactttgaatcgttatatactc

SEQ ID NO: 31928 - DNA, 528 bp, Arabidopsis thaliana landsberg
atcccctccgcgcataaaatattttgataggaatattattcaagcattgacaaaagctgacaagggcaagatacgccaaggacaagaaccatttgggcattgttcggtaattttttatacgcatctattatattttttatttatttattttggcttatatatggtacatggatagaggtagtttcgttttaatgtccaaatgaaactctattttatatgtgtgtatcagtttgtactccatcttacacgcattttttagttccgaagcagcacagagacctgctacacagctgtaccacctgttcaaccacaatttaaggcaagcttttatctataaatttttttgtcttaaaatttcaacataatgttcagttatactttatacatagatttagtaatattcattttacaacacataaggacaggacaaacacttttgatgtaccgcgtcctgacctatgtggacaacacgccattcacatcgaactcccgctcatcagggacttgatatcaagcaagctgaaccag

SEQ ID NO: 31929 - DNA, 815 bp, Arabidopsis thaliana landsberg
agaaacgacctataattttaaaggttagtcaaacattaggatttaggagaaagttgtctcaaactatttgtggaacttaaccctttttcaaaaaaaatcatttggggaactatctaagaattttaaagtcaaacagaaattgaatgttatagcttacaagaaatcatgtcatattctcatacatattaaaggagtgttacaaaaaaggtttattttcattttaaaatccaaactcttatgcaataatgcaaatgcaccatttatacatagaaataaacggctttgagtatacgataattctagcatatggtccaagctagaatcaagaatcactttcacaaaaaaattgtatcccactataaccgatagagacaccctatgtggtaaaattttcgtattatcttttagtgtatattttctttgatttttgacctattcctatagggatgaataaacttttggtcgcaaattgggatgaattaactttgcacataaaccaatgttatttacgttataaaattacatgtaagggggcacgcaataaagactaagtgactagggggcatggaatccaactgcttccatgcccggtattaattcacccattaatgcaaaactttagccattcaacatttaaatacatacatacatggatacaacatagcgcacaagaatcaagatggcactcttttgtcgtaagaagaattgcctcaattcaatgcaactgtcttaccaccacacctacttcttatctaatgctccagaaaacagaaattaaggaaaaaaaacatataaacaaagaatcatagaaaaat

SEQ ID NO: 31930 - DNA, 708 bp, Arabidopsis thaliana landsberg
aaagaaataagttgaagaaaggcttaattatataaatgttctcgaacacacgaccaaacattttgagagctcgtagctagtgttgttttaaacttttttttgttgagaattcatagggatagggttattgttaattttgatgaaaaattaagttatttgttcaatcctttatgttgagaaatggatgtaaagatatatgttgagaaatggatatagttattagtgtatgcttgtgaatcagtcagtaatagtcatgttctgttggaaatgaatgtttgtggtcaattatcttttggaagtttggaacaatacgtaattgattgtaatttagttctaaatatgattatgtggcctgatcgagtctgatgtaacgaaaaagattttgactaacgagtatcaaatgttgaagtcatgcaacgaagaaattgcagcttcaacttctataaaagtatccaatgtatatataacaacaccatttcatacaaacaacaaataacaaaacaacaaaataactattaattaatcatgttaattgtaactaattgactctaagacgaaatatgcattcaattctcaaaaaactatcatttatgtatttttcttttcttctgaacttaccataacttacaaactcttactatcttgtggtatttgaaaaatttataaattttcccgctagtttggacgagaacacgtaaattgggtgtt

SEQ ID NO: 31931 - DNA, 749 bp, Arabidopsis thaliana landsberg
tttttatttgttctgttacagtttctacaatgaaccaggatagatcatctatgagtgttttcattaagcaaactaaacaaccacagtgtatataagtggagatatggaaaggggtcatgttcctacatcccagaacacaggatcatatctttattactgtgaaagaaacgacaactatttaaataaataaaatgcaatgtctacaattactgttcgccgaatgctacaatgagtgcaacattttagtaaatgtttttatgctattatacaaatcaaacgagaatattaaaatgacatagtcacgaaatcaaatttattgagagtaagcttgataaatcaaatttagaactaaccaaatctttgactttcttatttgctctcacattcctgaacagttagatcaatcgtactctccaacttttctacgcacaaaatttaaaaatgttgatagtttttcttttcattaaataaaagacgagaaacggttatatttgcctaagtagaaaccgccgataacaacaaagtggaaaatatggctagtttgtatttctaagtaatttctcgatttaatttacttaggacaaaaatgtatttatagagaaatcgggctttttttatttattgagaagattcttttttgggggtttggaaaaatttatttaacatttttattgggccagggacttatgtttttacaatataaagggattataaaaataaaaattatttttctttgcctcttaaatttg

SEQ ID NO: 31932 - DNA, 789 bp, Arabidopsis thaliana landsberg
gggacgccgcgcctgcctcatccagtggctcagtggggttcttctgttaatttcactccggggcttcctcttctgcgggtatttctggagcttatgtgctacccgctacggatggcagagagcaaggagacgtggtgacaggtacgatttcagttgattcgtttgcagcccatgctctttttgactctggcgctagctattcgtttgtttcggaggattttgtgtcgcgggctggtctttcggtgcagaggttgggtcacccgattttagttagatctgctaatggctccattagtagctgttcagtttgtcaggggtgttccgtcattcttggtgatgaggttttttcggccaatctggtggtgatttccttggagcattcgatgttatcttgggtatggattggttatcccagtatcgcgtggttatatcctgcttctggaagacagtgttattgtaggcgtcgtcgggtaaggaggtggtattcttgggaagttccccgaagttctcgctatccatgttggcgcaattgcttctgatcgccgatcaaggaagtcgggcatctttttctccatggtggtggagggtgaggctgcctcacaggtgcaggacatccgggtggtgtgtgactttgctgacgtgtttctgacagagcttcctagcattcctccgtagcgcgatgcagcttttgagattaagctgatcccgggtacgcagcctattcataaggccccgtatcgaatgtccccaaaggagcagattgaattgaagcggcaattgcatgatctg

SEQ ID NO: 31933 - DNA, 4344 bp, Arabidopsis thaliana landsberg
  unsure (1)..(4344): unsure at all n locations
ccattccttactctgaaatgccccgttcttgccgttcgagagaaaggcggtttagatggagaagcttttggagaggcctttggcgactctttttctaccgagaaagttccttctgcgggtttttggagttcggacggtttttttgaaatagggggaggagaagactttggtgtagcattaaactttttagctagaagagctcgctcctcttcagcagttatccagttcgttgctcgatggagagcatcttgaattgtttcaggtcggtttactgttaacgccttgcgaaaacgcgattcatgccccaatccattttttaaggcggactgagcggctgagtcggatagattaggcacttggaccataatttccttgaacgcagtgatgtatgtccgaagtggctcgtcagcagactgagagaggttccaaagctgggcctcactgacgtcatttttgatgaagtatccatattgtttaatgaaagcggtggagagctgtttgaagttgtcgattgaaacttcttctaactaggtaaaccaggtgagagctggtcctgacaagttttctgaaaaaagtttgcacagtccagcgtcttcttcgtgcggctcgagaggtacccgtccggcaataacctgaaaagaggtaaagtgctccttgggatctcccttgtcgttgtagctcgggagcttaaaatcttggaactcacaaatgcgaagtctcgagatccttggagtaaacggagtcctgcgggttgtttcaattactctatcaacgtcgggggccgcggtggtaggtcgatgaacctttgcgttcatagcccaaatttgatctttgagattttgaagctcattgctgacaccatccggatcctaggggattctgaggtcagacgtctaagggagggctctactcgaaataatgatggagttggtgcggtaactccatcaataggaaggttgggatttaccggggtagtcagtacagcctggttctggtttgaagttgccccaacttcaacttgagagacgagaggtaactgaggtggcggagtctactgacctgctcctgcctgtgaagtttggatgctcggactgatgtctccttgaaaatcaaggcgtgagcgaactccaggggtacatgacactccggcagacaggaagtcaactcgatctgcgtacgcgttgtgagctgtccttatttcagaatggctggtggtgagcgccgcgagctgcccactgcactgttcctgaaaagaaacgaacttatcagataaagaagttactgcggtttgctgtcgctcggtcttgtcggagagctcttgaagcagcttcttgatatcgtcaagggtggaggcttggtagccggaactttcgttgtcgtcagtgctcatgatgatttaaccgaagctctgaagtaaaagatttaaatgccctccttctagtgctaaattgtggatgtcggaatccgctattaggaatttgtggatgttgcgaggaccttaaaccttgttagtcgagctaagactaaatcggacaatatttcagttaatcggaattcttttgtatattaatttttctgtcccctttacaaattttgatctcgctctctttatacaacaagacctaataattgcgaagtaaatgaatacaacaatcacgctgcgaatcatgcctcatcaatgcttacgttttgtatcaacacttcgcgcattcacgtcgcctcatttattttgttgattctgcgttacgtaacgcttaaaatactttcacacaggtcgggcctcgaatgggccctcgaagcccacttcgctattgacagactcaggcccatctcctggtccagaacttcgagcccattgattgatgatgatggatctcgggtcggggcaaactaacaagatccgacatccacaatttgccccccaagtcttcgaaaaagagaaatgaattcgaaaacttaaatcgacttcatctcgcaatcccaccaattacgggatcagttcgggattccttttccttaaccgcatatgctcgaggtaaaataggaaacaaaatcccgtgactttccaaatttcatcaggaagagtgtgacgtttcgtgatcctagggtttttccttttcccgctcattcgtccactatttaatcgaatcaacccctcgtcttcttcactttcatttataagttccagcgactcgtctttaagtttttccaagtaaattctctttattccctctctgcttttgcttctattctttagacgctatgaatcttgccggaaattctttagtttaggctcgcttagggtttgaacggggtgttcctcgatcgaaaatccttatcgattcatagattttcagcgctgattccgaaggtttcgctgtttgccactgttattcttctctctccgccgcggttctcgttaaaatcaccttcggcacaaccgcttatttccgagatctcggcgaaaatcgtttcggnnnnnnnnnnnnnnnnnnnnnnatcttcatcgtgttcttgaattttactgaaccgaataggctccagatcgtctttcacagaatcctcgaagtcgttggtctttgtcatgcctccgaagaaaataagccgcgaggtgttctcgatcgagggtcagttcgggaaatataaaacctcactttcaacctcgagaagactcgccttactcagaggggcccatcagatctctacacaaatcagtttaatatctcccgaaccgacagactctcccgaaccgacaaactctcccgaatctccccctgctggacataattgcgcattcgaaattttcttctcggaatgcggcctttacttccctcttcctgacatcctcatcgagtttatgcatgagttcggaatagcgttgcctcagctatgtccgaacattattcgcaccatcctaagtcttctcactctggcagaagaagatggatttcttctttcactacccgacctccttcaactatatgctgtgaaaaaaggtcgcacttcggggaccttcttcttatctcctcgaaaaggtttccgtgtgtttgaggatttctcagagaaagatgaaaactggagaaaatcttttttctttttcctcgtaaacgagctcacctttgggaataagaccgatctctttgtttctgaatcggctgctcgagctggtagatggcgaccttaggatgatttattttgaaatctttgaaagattgttttgatcttaaaaggggcatcactctcccacttgtccgggaggaatggcaaagtctaaggttccaagactttgataaggtaatgaactataattctaccatgttgggaatcgtggccaaactgagatattgtggtgaaactatcactgaatcccagatgcttgagaaaacgtataccacgtttcacaaaaaccagattactttgcaacaacaatataggttgcgtggatataccaaattctcagatttgattgtggagctcttaatagccgaaaagaatagtgagctcctaatcaagaatcacatgtcccgacctaccgaatcaaagacattccctgaggtgaatgcattggaagttaaaaatccagtaagagaaaacaaaacgttttgggaacgtggttgccgaagctatcgcggacatggaagagggtttaatcaacaaaccaggaagtcatatcaatggattcgtcttgagcatgattcaaaaggaaaagaaatccaagcaaatacttcccaaaaatgtgagagtgcttgtttcagatgtggcacttgtggatgtcggaatccgcaattaggaagttgtggatgttacgaggaccttaaaccttgcccctccccccaagattaaatcgggcgatatttcagttagtcggaattcttttgtatagtaattttttctgtcccccttacaattgatgatcgagttctatctatacaatcaaatggaatatttacgatgtaaatgaacgcttgaattacgcagcgaatcatgcctcattaatgtttacgttttgaactgccacttcgcgtattaacacatcctcctttactccagtgattttttgttacgtaaagcccagatactcttacgcggactgggcctcgaatgggccctcgaatcccacttcgtcacgggtggtttcaggcacaccgtttcgagcccactgattgatgatgatggatctcgggtcggggcaaactgatgagatccgacatccacattttaccccccccccaagtctttgaaagagagaaatcaactctgagacttaaatcgatttcagcccgtgatacctgcaattacggcgccagctcgagatttctttccttaactgcatatttcaagcga

SEQ ID NO: 31934 - DNA, 493 bp, Arabidopsis thaliana landsberg
ctttcgtttcaactcgatctttgaagacttgagttggggcttgtcctttcttgatgtcgttgatcctttcttctccggtcttgagctcattgattcgaggttagtgtatatttggggaaatatggttagaatagttatgggtgagatggactacatgatgtaggtcaaaggtttgtttgatgttaggtggggatagacagactatgcaattcttcatgactctattggttgggttaactctcatgcatgtggctgagttggtttaatgcactaatttttttaggtttaagtgtgtgaggggagaacaaagtttataggagtaggatctagtttatttcactagtgttaacttgttaagtgacccacattagattgaataagctctagattagtacaggttgagtgtgttatgtcaattttcagttgggtgactttgtgttaggcagggcttggacaaaccctgatgtatatcattgaatctgaattagaaaca

SEQ ID NO: 31935 - DNA, 8198 bp, Arabidopsis thaliana landsberg
  unsure (1)..(8198): unsure at all n locations
ctgtctctgcgcacatcaggtatttatgataagatattattaactcatttgttcatgtctgctcaatagactgcaatccttatcacgatagtggcttcattctagggctctcaaatctcgggctgtgtctcgcatgtattgtgtgtctgaagagaatgttccctgtaaaacgtgtagtggtgtaagctttgtatcaactgtcgtttgtcttgctcatctgtttgtgtaaccaaattctcatcatttatcagaaacttgaacaccttaagaaatattttggttctgatgtannnnnnnnnnnnnnnnnnnttgaaactactaataaaatgttgaccgttcttccaactcataaaatatgtaaaggacaaaaagtgataactgaatctcttggtatttcaagaaaactaaacaaaaacccgataatatggatgcggccgagtcattcctgtctgcgccttttgacgttgtcctgtgagaatgattcccatctgctatggtgtagagaactcaaatcactaagctcagctattgtcagaaggtactgagtcagcttcacaagctcttgatctgtatcacgatttgcatgagctttcctaaacggcttgattgttagaccgttttgaggattcattacgaaattcctccttaggtcatcaaacattatcgtgttaccagggttatagaactgcacaagtcaggacaacaccaatcaattacataaaaaaaaagatcaagattcatgtgtcaaatgaggatgcatgatatataaatacctcaggaagtagtgcccaaattaagcctagcggtttgcaatcaaaaatcccgcgagtgtctgactggaccgtgatcattgcaagatggtcgagaagagccgtgaccttgtagttaggattgttcagcactcccagctctgtcatcttcaactccacccacttcatactgcagaaaccaaacggataactctagcatcagcagagctacaaaagctacacgaagattaaaatgtcaaactaacaacaacatcacctggtagcagaccaaatcatgatatcatattccgcataagcagcagtaagaaactcatggagatctacattaagtaatcaaaacatcaatcaaagaaactaactagctaaaaccaaacagttaacagtatacggcttacaaggacgcataagctgcaacggattctccgcggtggaccgatgatcgaacaatgtatagtcgatatctaaaacaagaagtttcttgccttgacgacatggcgttcgaagatttatctgcacattgttgtataagcttgatgaatcatttacacatagatacacacacagaaaaaaaaaaaactcaccttgtattgatcaattcttcttctcaacttctgtttattaacttctttatctttaacatcaacagcttcttccttaccaagctcaaaatcatcaacaatttcaggagattcagcttgatctactattatatcatcttcaacagtactgaaaaaagtcaaaactgatttcaaattagattcgatttcgttagggttttaagaaattgaaattgagactgacccgatcattgtcatcttgagggagggcttaaaggagatcgaagagagtaaaagagaatcgtcagagagtttgtttccgatcttgggataaagaagcttttggcgtttaggtaaaacggtggtgagaaggcagatgcgacgttttagctcggcgactgagtcatcggcacagatacggacggtgtactcttttccattccacttaactgttagagttaattcttcctccgtaagaggagagaccgccgccgcagcactaggcgtcggagaagaggaagaggaagccattttaatttgttatgacatttggatgccggattggtgtagaaaaggtacttgtggtactgaaattttccccggtaaccttaaaaaaagattataaattaaccaagcaaatataagttgttttggagaaaaagtgtgattcttacattaaacagaaacttaaaggtaacataagttatattataacaaatgtaactactaataagtgagatgaaaagaaaaaaaattgtgtcttaacatttgatgataactgttggcaaaaagatcagattaacccactagaagataatcgactgatcttaatgcattcaccatttgcttgagttatggaaccttggtgtacactatcccagttcaatgagtaggctaactgcgatataatcatcccagttcaaaactggtgaagaaggcagaggtggttgaaagttggcatatatggttgaaagttggcatatacgataaaatattagaaaactttgtgacttattctcttgatcccatcgattgaaactgttggagccttcaccatcatgccactttggaatgaccaacacatctgattcattatctaattcaactgaatgagctaaatatgggcagtggctggcttggtgattcatgataagtgtgtattttgcatgttttgagcatccatttgccatcactttagcatcatatcatcactgttttataccatttctcatcatttgtcatcactttacatgtttaggatagatttgcatgcatgttgcatatttgcgttgatttcaggtgatttggagctgttgatgagctatctggaagaagcgggcctcatcatgtcaaaccactcgaccccgaggtagagtaggagcttcaagatctcaacagatcactcgaccacctggtcgagtagaggacatcactacttcaccacatcactcgaccccgaggtcgagtgtcttcatcccatcacctgaccatcactcgatcacttcactcgacccctaggccgagtgtcttcaccttcattgccagaccactactcaacctcatcactctacctggaagtcgagtattaccatcaccaccactcgactgccactacaagaaaacagacaaacgacgactacgaaagacgactaacaatgtaatcgtccttttttgcgactaacttacgactgctggacgacgacgttacgacaacagtacagttagtcgttggatagtcatatgttagcgactatgttatttagtcggtagatagtcgtccagttacgactatctgacgacaacattattgagaacaatacgtagtcgtaacttagtcgtactttagcgactacatctccgactacaagcaatagtcgtacattcggcgacgataatacgactattttgcctttgtcgtaacatagtcgcataattgtcgtataatatggttggaaaacgttttacgcgttactgggtaggtacacctaatttctgagtgtctacaatgtttagtcgtatagtagtcgtaaaaaatcctctatataatctacgacactcttcattctcattcaccaacaaatcaaaacaacatcaaaagaaaaaaaaacgatttcgaaacacatataagtttcttttacgctataatggcgggaaacttcaattatggcggtggtggcggtttctattgagattggatgtacaagagaattgatgaagtaacgggaaatttgtcagccgaatatgtcgcaggagtggaggagttcatgacattcgctaatagtcagcctatagtacagagtagtcgaggtaaatttcattatccttgtagtgtatgcaagaatgagaaacacatcatctcgggtagaagagttagtagtcatttctttagtcaaggatttatgcctgattattatgtttggtataagtatggagaagaattgaatatggatataggaactagttacacggataggacgtattttagttctaatcctgaagaagtgggtaatgttgtagaaaatccatatgtggatatggtgaacgatgcatttaattttaacgtggggtttgatgataattatcatcaggatagttatcatcaggatagtagttatcagaatgtggaagaaccggtccgtaaccattcaaagaaattctacgacttgttagaaggtgcaaatactccattgtacgatggttgtcgtgaaggccaatcgcagttacccttagcatctcgactcatgcaaaacaaggcggattataatatgagtgaaaaattggtggattctgtttgcgaaatgtttacagattttttaccagaaggaaaccaggctaccagttcacattaccaaaccgaaaagttgatgcgcaatttaggacttccatatcatacgattgatgtttgctcgaacaattgtttgcttttctagaaagaagacgaaaaagaagatcattatcgattttgtggcgcacaaagatggaagcctaaagatgaccgtcgaagaaccaaagtaccatatagtcgtatgtggtatctacctattggggaccggttaaaaagaatgtatcagagccacaagacagctgcagcaatgcgatggcatgctgagcaccaatcaaaggagggagaaatgaatcatccttcaaatgcggcagagtggacatatttccaagagttacatccccggtttgcggaagaacctcgtaacgtttatctcgggttgtgtactgatgggttcaatctgtttggcatgtctcgtaatcattccttgtggcctgtgattctgactccatataatttaccccctgttatgtgcatgaatacaaagtacttatttctttcaattttgaattctgggccaaataatcctcgagctagtctagatgtcttcctcctacttcttattgaggagctacaagagttatggtctactgagttgtatgcatataatgtgtctttcaatcaatatattaatctaaaattagtgttgcgtgggcaataagcaactttccgtcgtacagcatgtcaccaggactcctcaactcttaaccctaaacccttaaacctaaacactaaacctcaaaaccatagaccccaaacttgaaaacctaaatcctactttagcttcaggaatccggttgcggttctaattccactatctagttttttgatccggttgcggttctaatttttgatactcaatgaatccggttgactacaaatccgctaaccaagctttttgattctcaaatctttgatggtgaagccgaagttctcatgattttttggttttgaatcctataatagggaaacaatactttacctttcgtgatctggttgaggttctagttttatattcaatcatacccatgaaatgtagtaatacttcgcttggaaatgcaaaccaaaatttttcttgcttcttaaagtattatagtatgttagcagaaccatcccaatctgtcttacagaagtacaaatgttgcaaacccgtaggaccaagtctacccttcacagcagcagaatcaacccaagccctttgttccatacaaccaaggtcaggggtatgttcctaagcagcagtatcagggcaactatcagcagcaacttccaccacctgggttcacacagcagcactaacaacctgtttcaacaactccagattcagacttgaagaacatgttacatcagattctccaaggacaagcaacaggagcaatggatttgtccaaaaggatggcagaaattcataaaaaggttgactgcagttacaatgatatcaatatcaaggttgaagcactgacatctaagatcagatacatagaaggccaaaatgggtcgacctcagcacccaaatttacaggaccttccgaaaaatcaatgccaaattcaaaggagtatgctcatgctatcacgcttagaagcggtaaagaattacccacaaaaaagagtctgaaccagaacactgaggacagtgtggagtgagatggggaggatttatgtcagaatgaagattctgctgaaaaagcaatagaagagcctatactcgaccaacctactcgaccactagctcctgcagtatcacctcttgttgaaaacccagctgctgccaaaaccaaagacaaagtcttcgttcccccaccttacaagcccccactcctatttcctggtcgatttaagaaggtcatgatacaaaactacaaagctctctttgaaaagcaattgaaaaatcttgaagtcacaatgcctcttgtcgactgtcttgcacttataccagactctaacaaatatgtgaaagaaacgattatagagaggatcaaagaagtccaaggaatggtggtgctaagtcttgaatgtagtgcgatcattcggaaaaagatcattccaaaaaaattaggagatcatggttcgtttaccttgccttgcgctcttggtcctttagccttcaacaaannnnnnnnnnnnnnnnnnnngtttgtgagtctcatgcctctctctgtggcaaagaaactcgannnnnnnnnnnnnnnnnnnnnnnnnnnnnnnnnnatcctagctgacatgtctgtcagaatttcccatggtctgctagaagacttatcaatcatgataggcgtggtcgaagtacgtacaaactgtttagttttagaaatggatgaagagcccaaagatcctttgatactgggaaggccatttttaggtacagttggagttatcattgatgtcaagaagggaaagatcgatcttaacctcgggaaagatctcaagatgatcttcgatatcaccaacaccatgaagaagcctacaatagaaggaaatgttttctggattgaagagttggatctgttagctgacaaaatgctagaagagctaggagaaacagatcatctatagagtgccctgacaaaggatagcaaggaaggagatttacacttggagactttggggtaccataagcttttagatgagcataaagtagctgagaatccagaacagtatgaaaatttggttggaagggaaaaggacgaatatatactcgaccgcatcactcgaccgacggcccattcagtctgctcgaccgaactactcgatcacaacccctcctctgaagccaacttagtatccgacgactggtctgactcaaggcgtccaaagtcgatttaaaatcgctaccaaaacggctaaggtacgtttttctttgactaaactctacttatcctgtcataatgaatgatgagctaactactgatcaagtaaacctactgataactgagcttaaaaagtataggaaagcaatagggtattcgttagatgatattatggggatttcacccaccttatgcacccatagaaaccatcttgaaaacgaatcctactttagcattgaacttcaaaggagattaaacccaaacttgaaagagattgtgaaaaatgagatacttaaactattagatgttgggttatctaccctatctctgataacacttgggtctctccagttcactgcgctcctaaaaaaggaggtatgacagttgttaaaaattctagagatgaactgatacccactaggattataactggacataggatgtgtattgactataggaagttaaatgctgcctctagaaaagaccatttcccattgcctttcattgatcagatgctagcaagattagcaaaccatccttactattgcttcttggatggctatagcggattttttcaaatccccatgcacacaagaattttttcaaatccttatgggacctttgcttacaagcgtatgcctttcggtctctgtaatgcacctgctacctttcagtggcgtatgacttccattttctcggatttgatagaggagatggtagaggtattcatggatgatttttatgtgtatgcctcttccttctcctcgtatttgttgaacttgtgcagggtactcaaaagatgtgaagagacaaacatggttctgaactgggagaaatgtcatttcatggttagagaaggcatcgttttggggcacacaattgcagaagagggaatagaggttgataaggctaaggttgatgtgatgatgcagttacagccgccaaaaactgtcaaggacataaggagtttccttgggcatgcaggattttacagaagattcatcaaaaatttctccaagttggccagaccgctcaccagactgctgtgcaaggaaactgagtttgcatttgatgaagaatgtttgacaaccttaagatgatcaaggaagctttggtcactaccccaatagtccaagctccaaactgggacttcccacttgagatcatgcgcgatgcttcaaattatgcaataagagcagttttgggccaccggattgacaaa

SEQ ID NO: 31936 - DNA, 163 bp, Arabidopsis thaliana landsberg
cacaaccatgaagcatcctccttacatcctctgaatggtcaagctcagaacaagccttcaggatcctacccagggcgaaagcatcgagcttcacacctgactggtgcatccagacaagcacattgaccgcaacctctggccaccccatccgcacatacgcgga

SEQ ID NO: 31937 - DNA, 849 bp, Arabidopsis thaliana landsberg
aaccttgggtttctttaaacttcaaaattcattggcttcatggggcttttatcttaaagtttagcctccctctttccctttttttagggttttttctcccaataattatgttttgttttgctaatacattaattatgttttgtcaataaaaagcagttaaatggttactgcgggaaaaaaaaatctcaagaaaatatatactttcatgcaaacaactagtgtaaaattatatattatacgcaaaataaactctgcattgtgatgtgctttatcgcaaatcattccataaaaattgttagctcaatacaattttcagaaattatacaattttccatttttaaaaagcctacaagaaaaatttcgaagtagaaaagaaaaaatctagccgtatcatttcgatttaatcattcatttagcataactagcaaaaccctttctgaaacggagaaggtaaagacaaaaagaatagaaggaaaagagtcaaacattgtgagcaatgactaattccagaaagtagtgggacgatatgattcaaagcatgagaaatttgtaatacgtataaacttatatatcgagcaaagtaaaaccgatagagatgatattaaaaaaatgaatttgacgggaaagagagcgacgtgttggttgcgctcgtgggcaatgattgaaatgcgctcataactttagcagttgaatgtggggaaaccacaggcacccttctccatctttcccctggatctctatttgtgaacagagtttacactgcgctatatcgaatttatgtgtaagtgatcatgaagtaattgcatccataagatgtatgagtggtaatagagtgagggcccgagctcg

SEQ ID NO: 31938 - DNA, 686 bp, Arabidopsis thaliana landsberg
agatagaaattttgtagacaccaagaacctgtaacaacaatcaaatatgatcaagacctgcttaagatgctgaacccaaacataaaagagaaaatgctcattctacctaaaagcttgcacaggtaatatcttgtctagatcaaaaaacatcacaagactttcccaatgaggaaaccaaaaccaaaataacatgacactatcacttctgcaaaaagagtacacttttgcagcattatatatggctttaagcacacaagaaaatgtcgagccacatgacacatatgctctcttggatttgacataactcacagtgttagttacctagtcccgaagagaaaattaaacacatggttttcaaaaccaccatataattccgaagatgaatcaaacatgatctggattacattaagtctcaagtcacatgagagcaattttgatacttaattctcaataacatttcaacatagcacaagaatctcaaaatcaaattcaacttagttgattatattaactctgtcaacatcaccaaacaagtgattattaagactttattgtataccatttatagtgcaagacagaaacttgatgaaaatttcgatcaaatcgagtaagaattataactgtactgtacttaaaaagacagaaacttgacaataattatcagttccacgagcaataacaagctc

SEQ ID NO: 31939 - DNA, 754 bp, Arabidopsis thaliana landsberg
ggggtagacccccggacgggtttgggtcgatagtaatacgtgacggtataccacgggtaaaattcattagatatatttaattccacagaacggaattagatggtaagacgggtttaagtctatagtaatacgaaacagtatacaacgggtgaaactctataactaacaatttaaatacagttatataatttaaaatatataacaaaacaaacaattttaacaaaaaaaaacatatataattttaaatttaaagttttaaaaatcgacttacggtgtacgccgtgataaaatcaagggattgtacaatatatagaaattaggattatatatttataaaatacaaaacaatatgttacatatagataatttataaaaaaatttcagttatttttaataaaacaaatagtttcgcggtgtaccgcgggttaaaatctagtatggatatatttctattttttatattcaatcataagcattgtagcatattatattttacttcaacattgcaaaccacatgatttattattttgctaaatattttgtaatatgattgcccagttttatgttaatcatatcatatgtgtttataaaagacttgcttttgcttaagaacacaatcgactaacatttaatcaatttatttatcgctttcaaaagtgtcgttagctgatttaggagtctgctcagagctcaatgagtaggtagaaggctagctcgagttagttggactccgcacatcttatggtttgctaca

SEQ ID NO: 31940 - DNA, 587 bp, Arabidopsis thaliana landsberg
tgctggcaacataagcagcgtaaacgaaataaccttctggttcattctcaggtttgtcatcatgttcgatatgatatatagtgggaggtatccaaagaccaatgtcctccaatagcatttgccagttaaactccaaggctcgctttaacatccctaaatatcgaaccagatggcattataattgttaacaaaataaaaaaaagtataaatatgtcatcatagcaacttcaagtaagctcccgtatttgaatcttcactagagaggccaaaatttgataaattcttagaagatgtacttctcatgtccttgagcttcccaacacgccatgcttctatagcttctggcatatattagaaaaacgaagggaaaatattttattttaggttagtaaacatctcattacagttcacgcttattccaaaatacaccttacaaagaagtaagcgcaaacaaactcatatgttatccctgggtgctgacatacaaaccttgttgttccgtggtattagacctactctagattcacaccaatttccagaccatagaatctaagtccatgaatgtatttaaatgcctccatctatta

SEQ ID NO: 31941 - DNA, 577 bp, Arabidopsis thaliana landsberg
tactcgataggagcttaacgagaggtggagctattttaggtgccggagcgggaccataaaaagtggctctgagcagctccatatgtgctcgtgcagccattctacttgtctccagaggcgagtggacgagtggtcaccttccttcaaagacgacaagacgtggagacaaggtgacaagacgtggagacaagcaagaagcagtcagcggatgtgggcctgcggtctacgctggcactggtctggccatctgcgtgactgtggacagccgttgcaaacaatttgcaaaaaaacagcggctctagtggaggagcagctcctatagacgagttagagccggaatcattttcagaggagccggggacctgccaaacaggccctaatatatccctacccgattagggttagggtgtcatttccatcaatctctaacacaatctattatacaacgataaatgcaggcatatcttacaagtcccgacactggatgacaaataagaaacaaagcaataacttcataagtaggagtggcatacttaaagcagagtttgctttacagagactactgaaacgtggttat

SEQ ID NO: 31942 - DNA, 527 bp, Arabidopsis thaliana landsberg
tgcttcattagcaacctgcaagagattgatgtgcatcttcatagtttgagtgataggttaactacttactgaactgaaataatcctgctttagaacataactaaatcatacctgtttaagttttctaaactctctcttcgcaagcttctgtcgccaacgacactgaatagcaataatagatgactgacggtgcctgaatgctgagcgaaacttatggattctccaatgagcctaaaagatttatcatacacaatattaaagcacaaaaaatgagttagagactgaaatcatgaatgagaggaaactagacgactctagattaccctatataagaacttaattcagtaacagaaaaagtcttaacgcacatgtaccatacaaacttggagatcgtataagtacctgaattagagaagcagctcgatgctctttctgatgtgaaaactttaagcgagttgagtcagcacggatgcaagactgtaatacaatggcagctgatacaagttttacaaatgcacatcttgaca

SEQ ID NO: 31943 - DNA, 546 bp, Arabidopsis thaliana landsberg
gcctcggtgtctgcaactcgggacgcacctcaatttactctctccccctctggtgccctctgcccgtgctcactagagctttccccgcgcatccggagagacgccatcgttgacccaagccctcaccatgtccctaccgctgttcgagggtcccaaaatctcttctcaatgtaacaaacctttctcgccccaatttatcctttttctgttctcggctgggcgagattgctcgccggagtgtagttgctctgccgtcgagccatcccgccgcggacagttgtcctccggcgtctctgtgccgttgctgtgctcatgaccgtgttcgctacatcccccccgaatctccctgagcccttcccggcgtcccgtgggccccagcgtgcccacaccctcgtctccggcgggcctctgtcgtggacgcgagcggcggcactgctggcggccaagagaccgtactgagttagccgttagatccaggcgcccgttcgagattgaatggcccgaatctaaccagacgaaacctaatcccgatcgcccgcctgagat

SEQ ID NO: 31944 - DNA, 576 bp, Arabidopsis thaliana landsberg
tatttagactatcatttagggcactcttaataaatatcatttgattcggttatctccggttatgtctgcttggattcggttcaaacggcacgtgtcagtacagtgcccctgcccgaaaaagaggtcaatcattgcccggctgcccgggaaatcaatttcaaatttcaaagttagtaaaaaagatcaacggtcgtctaataacgttaaagtaaccgcaacggaaaaagagaatccgattcttattaccttaaaccacaaatattctctcttcttccccaaatttgaaatctcttcgcgtctctatacttgtttctctctttatccttctcatcatcttcttcattttcctgcgaaatttttgttaatggaggattgttgtgatccacttctcgcaactgatgcttctccgcgacctgaaagcttctctcgctgtgagattttcaatttgatcttatggacgattgtttttggttctccttcaattttcttacttttttttttcatcagcagctgaaaaggatatagcatcgcgctcaaggactgtggcaatgggagatctggatcaaaattgcgaat

SEQ ID NO: 31945 - DNA, 970 bp, Arabidopsis thaliana landsberg
catgaaaatgactagcgtgatcctttcttttagcaatcatcatgaacacaggacttaaaaaaaaacatgctgcatctaaatcagaagtgactattcgtgcagaaaactggatccgtagccgccaaagcgacgccgccacgtacatctccccaagaagagatacttttttaacgtcgcttttgctactactcctgctgcattagattctctagcaaagcaaatcttatcacgatatttaggtcatgtttggtttctttattctagggactaaagtttagttagaagactaaagtttagtccctaacatgtttggttttaggagctaaaaatagtaagaatatactaaatgacttataagaagactaaaatgacttttaacattatcctgctattagtacaattgaactaaatgagaggtaaatgtggaattaatatggtttagtccttttagcacatatataaagggctaaagactaaatcattttactccatattttagtcctagtgtttggcaaaaaaatggactaaataagattaaacactagagactaatctttaattcctctaaccaaacaccctagtggtaccaacagactgcatgcattattgcagtactggcatgcatagtagcagttttggacctatctagcaaaacctttacactcgagcaagaaaaaaaaggcgaagtatgaattaaatatcttcgtgcatggaatcttttttggtacgactgctcacagtgaagggtacctgagtgataccccatatgcgtgtactgcatatgcatgtgagaaaaagatagaaacccacgaggatggaaccaacaaggggcggggaaatttacataacaaaaaaggagcgaaaaaaagtacgcaaatttacccttatatgagcaaacatatatctggtcttatttttagtacatttcagagatactacagtactgtggggatcctctagagtcgacctg

SEQ ID NO: 31946 - DNA, 1075 bp, Arabidopsis thaliana landsberg
ggaggttaaaaatcttttagattattatctacaggttttgcgatttattcgttttgggttgtataacgtgtgaactatacctaatgaatgagaagatgatttaagaacaaggaatggcttccggaaataattaagtcaatgcagctatgtgttaattatgttaggtctgtgttttggcaactgaactcgcttagtgtcatctactctgtttgaaagtttatactcaaatctatcccaccgcccacgttgcttgaaactctatgcctgtggtattcaaaattcctatgattttcattttcttatataggtcaccacatctaagctatggcggcaagttggagaatcgctccatcctccaaagtatggcttgtattgtcctcaatcttcaacctttttcgctttcttgtatgaaattgactttcccacatttttgtttttcagaacatgcactacagtctcctggacattccgcattttctatgaaaaggtgaatttcatttttggtctaagtactgaatatgcattgatattaatgaggttgtacttgttcagtttagttcatacatgttcgattcagacaatgttcttttgctccttttgtcagtagtgtgtctgagactagctggtttcgttatcatttatgtcgtggtttagtagccttctaacagtttatttggattgactccttcctaacatggagtctggttgatttctatcctatcaagatgtggaaatttcattatttgtatccttatttccaaccgcaggcacttttggagtatgagaagcatttaaggcaaaatggtgagcttaaccttcctggttcagcttctcttccgtcttcaggcattgaaaaggaggttagaattcctatgaaattgtgtaattcttatgcttttgggtaggtgaacactttgagaggaggtcaatttaagagtaggtaaccatgttgttaaattagataaagtgaaagctctgcagttctttataaaatcattttatacagatggaaatttcgggcatgagtaatatcagcttaacatgttgaatactactctctgcaatctgattgaat

SEQ ID NO: 31947 - DNA, 872 bp, Arabidopsis thaliana landsberg
tttgcctttttttgtggagagcctatctggatccccagtcttttcatcagtgtttgctgattttcaatatcttcagttatactatgtttaaaattgagatgtggatatccattatgtgacggttgggattcaggtataatgaagtgacgaacttatatctgcttatttgcatgtttcacttggattcatatatgctttaagtggtttgtttgtttgtttacaagtattccttgacagctgtatagacactctgggaagatttcacatgtcttgacgtttccctgtgtttgttgaacaaggcgattctgcctgtggcttcaaaatacctctctttggatcggcctgattgctcacactactttcttgcttttgctattaaggtacaatgttttcgtttttattgcttactgctcaacctcaattttggaggggtgttgtattatcttttcttattccacttcttctaggtaagccaatggtgtgccaaacatttaaacatgtctgttatgtccatggaggagtctcaagaggaagagcattccaacattttctttcaggttatttgatgctttttggttctggaagtaggattctgtcgcagcttatggtttcgaagggactgagttattcaatcaatgttatgcagcttcttttggattatcttcgtttttctgcctcaagctttactgctattggaaaaacttgtttcatgactgatgatgcctcagctgttacagttcataagtttgtttcagagcagctcaatttgacaaaggagttgataatgaattccaaggtatctttgaaaatcatctttatctttcgctagtaactacacgtaccatatcatgaaacatttttacatttgtttt

SEQ ID NO: 31948 - DNA, 885 bp, Arabidopsis thaliana landsberg
tcagagaatagagagcatcagatgattgcccacaagatattttttaggtctatgtgtggttctcacttgacttaagggagaagaacaaggcaatcaatccttcggacacatacagaggcttctgatgaaaaaatatgcaatggtacaagcaagagtcttcttctaataagatttgagccaaaacctcaaaagcgttgctacaagctaactctaaagatgtcacatgagcgtaagaaaataatctggcattgttacgccgagataattataatctaaaaaatgtattgatttaaactactcaggggaatcaaagccctaaaagcctcctctctcaaaatacaatgactagctatcaatcttgataaccatacatgatgctaagcatgacacaacaagtaagaagaagattcaagcttttatcgaactctctaccttccataaggatggtaccgtccgctgcccccgcctccatatccacctctacttcctcctcctcctccataaaatgagcctccaccgtttccgccaccaccagcaccgtatcctcctgcgcctccccttcaaattcaacccatatcatagcaactacttcttcaatagcttcggcaacaagaacgacccattcaaccaccatacccaccaattcggctactacaatacccgcctccataactgcaacttggtcccccataacaacctcctggttaaccgtatggccaaccatacatataacctggtcaaccacggtaccaacaaccccctcccatatggtatcaacctctatggtaacaacggcttcttcttcgataaggacaagattatccaagagctggttttcttcaataaggtctatacgataaccatatcaacaacggcaatacccac

SEQ ID NO: 31949 - DNA, 323 bp, Arabidopsis thaliana landsberg
gtatcccctatgttatctgttgtattgtctccctactgtgctatctcttttctaccttcgtgctgtctgtttgtatgtaattgtgtgctgttgttctattgtcatgttgcttgtacattgtgatttcttccttagtgctctgttttgtgtgttgtgctgtgttattatgttctgttctcttgttgtcactgtatatattatctctgtatgtattgttctccctattgtggctattctgtatttatcttactctcctgtctcttatgtgttctgtgtattgtgtgcttgttgcttttctgttttgtgtaatatgctattgtgta

SEQ ID NO: 31950 - DNA, 2372 bp, Arabidopsis thaliana landsberg
  unsure (1)..(2372): unsure at all n locations
actatccttatcgatgcactcccacagatgtatccagatctacaacattatcctcccttcacaaccactcgaggacgtggaacctcttcatacacatgatgtttgccatgggttgctctcaataaggtgcttaatctagcctccgaatcagctatagccttcaacatacgagtctccattcgcttgtctttcttgtcaatatagtttttgatcgagtctggtatgctaaactggcctttagctttacgaattttggaggaggcatccatggtttcatcagtttggttgttgtcatcatcactacaatcatgagagctacaaacatcgctgttgtcattcctttcatcaggcaacgaatcagggactacaccacctaagaacatggatcccttaaataggtaatcctctcaaataagttgcaataagctgtcaacacgaggatcagctacgtcatcaatccaccctctcgagaaagggtcaccattagctgtaccactcataacagatgtgactttgatctgcaaaaaaataaagatttcttaatttaaaatcatgctattgttattaataacgaatgattagttttacgtttaaaagccagagtatattcataaatatcagatgatataaatttaaaacaataagaagctatagtaaaatagctaatacattattacgttatcccctaaaccaactaaatttacgcccaactacagacgaaacattacacgggtgattaaattaaatcatgtggaaaatatttacaacatgctatttatcaataaatcatattaaaagctacataatgtagactaattttaataaatctctaacattacccttaacgtaatgcaatacaaaacttatgtaaagtagtcaatacattattacggtatcccatagaacaactagattaaaaccccaactccagaccaaacataacacggttgattaaattaaaacatgttacataaatttaaagcatgtgatttatcaataaatcatactacaccctgaaataacgtagactaattgtattaaatctctaaaattacccttcacatactgcaatcccaataagtacgctattttaagttaatacatgctagacaatttcaaatcatgttatgtagaagtacattaactacagtttgtataacatgatataaagtataatagtatgtattttataaaaggacgaaaatgcaacgattacctgggactgcctatcgactttccagacaatatccaacttcaagctccatagacgctcaatttccttctgtgtttcctccatatctgagtcatcatcttcgtcaacctcagggaattgcaattccctaattcgaggcacactttcaaggaacaatagttggattgcgtgtgggaatccctgaaccgtgacagatttccgcataagcttatcagcaccccttgctgtaacactcttcaacgtcaataaaaaagatgtagtttcccacggatgattaagaaacttatccagattttctgccatgtccgcatgtaccagagatattttgcttctacccgacgtcgggcacaagacgccatcaatgagggctagagcagcgtaccgtagacgaattccttgatcttcaaccattcgtttcttcagcctaccaacaacccactcaacagatacatcactccggtcaaataaggtgtaccaatacttgcaaggaagtaatttttgtttcccctttctctctttgacatgagggagtttggggcaggtgagcccaattactctttcaaactcagatatcaaaaaccgaattggggaaccagagaatattatccagatttcattttgttgctaacaactaactgcctcgttagcagaaagtgaataagcttcctagaatacgcagctccttcctggatatcaaataattttccaaactgcgattcatgtagaatcttcatgtcctcttcatctaaagcgttggcgatgtcatcgattaaagataactcactgtaagactggactctctcaccgtttggttcagatccagcccgaaacaaccgacgaggaatagggtggttcgccatctaaaaacagtattagggtatacannnnnnnnnnnnnnnnnnnnnnnnnnnnnnnnnttatcaacagttactaaactataaatttgtgaaagatactaattgtgtgcttaaaaatccagatctaacaatatttacctttgggaatgatggattcgaccccgtatgtagcacaaacactcgaaagctgcaaataccttccacaaatcggcagattttaaacaggattaaaatgtcgcatgtcgttttttttcctgcagttatgttcttcaacagagagagaaacgaaagaggcgctaggg

SEQ ID NO: 31951 - DNA, 1210 bp, Arabidopsis thaliana landsberg
accacaactatcgatccagagcgaagctgtttttgagctcccataggttgatgagtcgttcacgattgctacagatctttggatctactatattctcaccggatagacaactagaatcactttcagtatctacggacaagcttcgtgaatttgaaattatgttctgcagtatctctgagataaagatgggagggatatgcaacttcttgagcctcgtcgatgtgcatatattcagttgtcaaggcttgagggaattgacttttctgatctttgctccaaagcttagatctcttactgttcaggatgtaaaagacctagaagatataataaacgaagagaaagcttgtgaaggtgaagattcagggattcttccttttccagagctgaattatcttagtttagatgatctaccgaagctgaagaatatctattggagacctctaccctttctatgtctagaaaaaatcactatagggaaatgtccaaatctgagaaagcttccactcgattccacaagtggcaagcaaggcgaaaatggatgcatcatacattaccaagattcacgttggttgaaaggtgtgaaatgggcagacaaagctacgaaaaaacgcttcttaccttcatgcgaacaccgattagaaaggtgtgaaacaatctctgaagactagttagtgccgagtggctgcaaattgattggatgtggatcagcagttccaagtcttctgatttctaatgatgatctcgctaaaatagttgatactaatgatgaatggattgctactcgtactggtattcgcaaccgtcgagttgtatcaggtacatataacatttgattagttccgctatgttaagctaagagtatcatgtagagagattaatttgtaaaactataattgaaggcaaagatagcttggttggcttagcagtagaagcagcaaccaaagctcttgaaatggctgaggttgttcctgaagatattgacttagtcttgatgtgtacttccactcctgatgatctttttggtgctgctccacaggtatctattaacccttaattctaaaatttctctttggtggagtaagagttcccgttgtttgattcacgataattgtttattgatgacagattcagaaagcacttggttgcacaaagaacccattggcttatgatatcacagctgcttgtagtggatttgtttgggtctagtctc

SEQ ID NO: 31952 - DNA, 3279 bp, Arabidopsis thaliana landsberg
atcaaatgttacttgctcagaaagcaatatgataatgtgatttttaccagtgtaagtaatttggactttatctattcataagtatatacaaggagatgattatgggttgatcacccactatatgatatttagatacctaatggttataaaagatgcatcgattcaatggacgcattgactcgattgttgcatcgacaagaaggtcatatttatccttgttataaacccgcaacatagagtttgcgagattactttcttgattaaagtacaagagtatttcagtgtttatttataataaccattattggatatccgttgggataagtgtttaacattttgaaattcatgttcatacataaaatggtttagtaacatcgatacgcatcaagccaatgaataattaataattttccccattattattggttttgggtcagaaaccaaatagttttcatctaaaagctttgaatgtgaaaagtgctccaccacagcacgcagagatgaaccctcagaggaggataagaatacatgttggatatgaatgataactaagccatcctagagggatttatataccgctcgttttgaagaagtatcatattatatagtcagctattccaacataagggggagaatgtacacagctgggtgaaaaagataaaaagaaatgaattatcaatgatcttcggagtaaagaatgtatattaagagtccaaaagataattcaattacagaatttagcgttgtaattgtcagacgcatttgctgacccaaataaagtgatgaagtcacctataccaattgtaaattaaatcctccagaatataatgaatgccctgtaaggaccaatttcaaactgctattgagtcttaagatcgcatgaagcgtaatagaccttggttcgaaatataaatatcctcataaaagtgaaggagcacaaaattaaaaatgaccaaattgaggaaataaatattttgatgatctcttgaagagagtgaatgatctctaaaagagacataaacatgacaaatgaaatattcaagtacttgacaatgaagatatctagctagctatgtcttgtcaaaatataatggaatcaaaagcaaatcgacgtcgtaatatatttgcatgctatgagcagttgatattatggacaaaaaggaggatcatgaaagaaggtctattgaaaagtgtacacaaagtaatgattagccaaaaatggaaaagaagaaatagacatataattataatctctagtagagatatttggcacatgatgtgtaaaaccagtggaagataaatgagtctttatgggaaagaatagtgaaattaatgagattttcacaaagataagaaatgtattatgaagagatatattctcttgtggtggatgtaatattttttaagtatctaaaatctggcaataagagacggaacactggatatgacatttatatgaaattcttgaaagatataatctctgaatgattaattatatgagaattatgttctctaaaactctactcgatcgaataaaaagaaatatgtaacatgacatataatcataaaaatgtatatttatgttgagtttgtcaaaatatattgatcaaactaatatttgttttgaaaatcattaaaactcctacagagttatcataagtaatacgatgacaataatgtatgataaaatatcactagataatgatatttataagtctatatgaaaaccatataattttgatcattaagattatggttattaattccaacgagatattgtatttgattgaaaattatctcctgaagaagatgtttccgagggggagattgaatgatatgcgtggatgtaccctttttccttatcatagtttttatcccacatgattttttctatgacaaggtttttaacgagacattaaagaacacgcaaataatacacttgatgaatattaggaaattctatcaatcatccaaatgaatattatacactaatgatatttagagaaataaataagatggtcaagatgaatcatctaaaagattcatgagcagcagaagaatggcgttgtactttatccagaaatttgttcaagagaaaatttggcagacttattctcaaatactgtttattctctgccacatcttctaatcatgcagagattttaccaattcatgaagctagccgcgagtgtgtatggctaagatccatagttcaccatatacaagaagactgtggtatgtatgcagggaaaaagactccaacaattatgtacgaagacaatgcagcatgcatcgcacaactcaaagacagatacatcaaaggcgatagaacaaagcacatcctaccaaaattcttctacatacacgatctacaaaagagcggcgatgtacgagttctacagatccgttcgaatgataatctggctgacttattcaccaaggcgctacctactgctactttcaagaagttagtctatcgtatcggattacgtcgtctcaaagatctcgacgaatatactcataagggggagtaattgtatgttgcactctttttcccttaaccatggtttttcccattgggttttcctggtaaggtttttaatgaggcagcatttcaaatactttacgagttatgatactataatggtcatcaagggggagtgttatgaataaagatggatgcccattataagacccatcatctaagcccatcatctaaatgtttgtagggttttaccttttccttatactcctatataaataacccttttctcaatggaaaacacactcatttcttctatctttttctctggttataacagatacacacatatatatatatatatatatatatagagattttgatactgttacagcactgttgcggtgcggttttgggtgcggtctatgtcaccattcatggttttaatatctacgtacttatttgcaagtgggctgaagacttctgttagacgacgatagaaattattattttgtagtatttttatttatttatatatatgtagtagttttatctttttttttgtgaatgtatacaaaatctaaaagacttgactaatatatttttggtgtttagaaaaaggccaaacgcattcctctgttcgctataggccatagcgtccccacgattatttctgtgtaaagaggtgtttgcttatttttattaagaaaacacataatatcggatttgattgctgactattttaaatgaaacacttgcaaggttttttagcagccacactcatatgcctccgtcat

SEQ ID NO: 31953 - DNA, 450 bp, Arabidopsis thaliana landsberg
caaccaaacacacctatactgtatgaaatggacctggtcatgggttgggccaggtaaccaaacacatccctaagctctcgaaggcattgtttatcttcggctgctcttatttacgctaaggagcgcctgcatattgctttctggctactgctgttatctcgtgtttgcagcggctgcagctgcaaacaattgctttctccagctcatcctccgttagcacaccgtattgtactcagggctaagctgagagctcctgcctactcaatcatcatttaggacatcatcaactactcgtaattaagtttaggtggaataaaaactcgtcgtagttcaatagccaggtgtaagaagcgcagtgcacgtagcatagataattcaggacgaggaccgacggggacggggccctgcatttcccaggccggccgtacgggcacaccaggcacggggggg

SEQ ID NO: 31954 - DNA, 851 bp, Arabidopsis thaliana landsberg
atgagattcaaagtaacatattaagattttttttaaaaacatgtaattcaccatcaaaaatggtgtcagaaccaaaatcttttctccatttgatcatattactccacattaacttggttttcccaatatcaaatttcctagctttcaagaatctaacagagaacatagaacatcaaaatcatcatcatcaccatcatcatcatcatgaaaaatgaatcgacagaaataaagtctcacctcagcatgatgtgataatcatcaagtgtaggaggaagcaaattctcagagacgagtaaattacggaattcatcaacagctcgcaattcctcaacatcatgaatatcttcaatggtaagagagaaagtacgatcactgcttcttctcctactgctacctttcttcttcaacgaatgtctgagtttgctcgaagctttcgcagctttcttcttcaaattgaaattcccgattcttgtcttcttctcatcctctgaaactttgaaatctgatctcctttctcttctctcatcattgcttgaaactccttcaaaaccttaaaccaaacaaaatctcattcaacatcaacaacaacaacaacaaatccctaaaatctaaaactcagagcatcgtctacgtctagctctcaaactcaatctaacaaaccagaattgcgtgctttcggactcgcgagaatcctgagacaggggatgattaaaatttacttacacggcctcacaaatcgatcaagacagcctgacatgagaaaacttcagaagaatccgcgaatcagggaactcgtaatctgcccatccaacagagagagagatgccattctgcagataggaaactgacag

SEQ ID NO: 31955 - DNA, 832 bp, Arabidopsis thaliana landsberg
ttttctttctacgaattcagataaatcctaaagcgacgagagattataagaacaattatcgatgtaaagaaaaaaatttagcaggcgtaaaaaaaaagagagggacaattagcataattccaaaatttaaaatacagaatagttcgtgttgttgttaagagaatgaaattggacatgtcacgtctctggttggttctttggacctacgttttggtggaaggtacttttctcactctcataggtctaacttgaccagctgaaccttttagtttagtgttttgacgttgacccacgaaaatgtggttttgacttttcttgaactttttgggtacagcttcttctaaaattaccgacttaattaactttactttactttactttgctcctagccagaattttatataaatgtctcttttagattcttgcaattgtaacttatatttaaagaatattggttttttagaaaatcatcgccactcgagaatcaaccgaaatcaagtgaaagggtggacatatatatatatatatatatatttcctataattcatgctttatgcaaacactaaatatcatttaaattatccatagtatttaatcaaataaattttggtacatcgaaatatgatgaaacgtaaattgatcctaacctaagagaaaatgcacaatcgataatttatgagataataagtaattcagagttatctgaacaacatatacccatcccgtaaaagtaaacgaatctatgaaacgataaaaagggggtcaacgaaacatcatcaattcatgatcatcaagaaactcataacccccaacgcgatcaggcctgagatct

SEQ ID NO: 31956 - DNA, 493 bp, Arabidopsis thaliana landsberg
ttggtttggcagtttgccatatattttttttgtagttgattgttttgttatattatttgaggttgactatcgcttatttgttatttgaccgttgcagattcacaaaatcattataattcaatagtagttaattaggtttcaatccgatcattgattttccgaaagacacctgcatatatatacatgttaaatattttatattatcatttgaaataaaagaacttaaaaataaattagggtaacttatcaggaatagatcttaaaaaaaaacaattattcattatctctttgtgtgttaatcgaatattttaatctgaatttgcatgaattacatgtatatgtatgtattctctaaaaatagtggagctgatgtagggatgatttcgcaaatgctattttatgcaccaaaagatcataaaattccttgtatatatatttggattcgaaccaacttcccggaatcggagtgaatttattttttcttttctttttt

SEQ ID NO: 31957 - DNA, 745 bp, Arabidopsis thaliana landsberg
tagaacaataaactgaaatgtctaaatacaatagacgaaagactaagttgggggataagatgggaggtagcatgtgcctgtgcgtgtagtgtttttctaaagacaagttcctttttcagttggctcttttaaatcttagttccatctttaagaacttggtagattgaactattgaaaaatccaatacaaagcccaagcttcttcttttccttgaaatttgaacttcattgttcatatctaagcaaaaaataattagtaattaagaaaatatcacaccgacaacgtcttagttgaaagtttgatttattaaacagtatattctacgtaaaaatgtttatagatagctggttttgtttgtatattaaattcatcgatcgataactcaattttttagcattttgcatagtagaaataagaagcaaaagcatatgtcaatatgtgtatactttgtattgtgatcgaggctaagtatgataagataactagataagctagcaagaaaaaaaatgaaaagcgagaatgcttattggtttgattagaagctcgataagattggatttcacattcgacgcttttcaattaatttaagtttcttttaggctgttatccatttcgaaaacagtattggcccaacttgatcatccctctatattataagaaaagcaaaattatttttctagactcattactttctatattatacaccaattaatgttaaaatacacttataattggaagtctgcaa

SEQ ID NO: 31958 - DNA, 612 bp, Arabidopsis thaliana landsberg
tgccccggcccggtctcgaatacatcctaaggccccttcgtcaattccactaaagagcttaactcctggttggtagccacaagacataccatatccctgcagctctttcttttcagcctcggataattcttgaccaaccaggttccgaagatcgaagttcatttcctccgaagcggcatcggcaatctttttccctttgccaggcactgtggccatggtcttctcttcagccacagctgtttcttccgcagccatatccaagagcattttatcaatcccagacaatgtactctcaaggttggcagctttggcagcagctgcagcttcagcagaggtattagcttcggcagcggcctcggcgcttgcaatgggtgttattttggatgtcgaggtcgacggtggtgtttgttcaattccttgcataacatttacaattcgccgtttcttttggtctctaactttctccttcgtagctgaaggctggtctttcctctgtaaaagtttcgttagttctgttcctagaggacttagcagcttgaagggcggggattcagttgtaccttcagaatttcggctacttcggcggcagaaggcgtcgaaggagtttctttt

SEQ ID NO: 31959 - DNA, 600 bp, Arabidopsis thaliana landsberg
  unsure (1)..(600): unsure at all n locations
tgacgaatgcagtcttctgaatatctgcttccttgattctcagctggtgatatcgagaccttatgtctatcttggagaaatatttggctccttgtagctggtcgaagagatcgtcgatccgagggagtggatacttatttttgattgtaacttcattcaaggatcggtaatcaatacacattctcatacttccatcctttttggtgacgaaaaggatgggtgctccccaaggagacgaactgggacaaatgtaccctttttgttgcagctctgtgatctggagttttaannnnnnnnnnnnnnnnnnnnnnnnnnngtatggtctctttgtgatgggcgcagtgccaggaatgagatctatgtagaactccactcctctttcaggcggcattccaggcaactcttccgggaatacatccacaaactcttctattacggatatattttctattgctagattaaacatcattggatcattggcgggcggttgtgcctgataggaaactgcttttcctttgcggtcggcgagaaggatggtcttacatgcgcagcttatgatagccttgtgctgagttagccaatccattcctaggatcacat

SEQ ID NO: 31960 - DNA, 2257 bp, Arabidopsis thaliana landsberg
gagcaatatagcaattaaaaaccaacaaaaagtggcaacaaaagaataaaagacaaagcaaaaagaaaaacacgaacaaaccaagatctaaaggaacttggccataaaaaaaaatcacaaagccaatttcgtaaaatactttgacacgatgaatatcaacaaaagaatcagttttttttccaattgaacttgcaaaaaacagaatcaggaaaaggaagagatgtgtagtctctttgtaagaaattatgggtaaagttttatcgttgaaattagaagggaaagtggaggatttgagatcgtgggaaagagtagaacagtcggcgaagtaattgtttttttttttaataaattttttttctctcgagatttgataggaaacatctaaaagtgaaagaattaggacttatgacaaatgccagactgagagagttgcagttaattgtaaaatgacttatgaattattagataaagatataaaccggataagtatgaatgtgattatccatcactcatctctatccacaagatatggatgatgtttatccaatacttcatccctaagatatggatgatgtttatccattacttcttctttaagatatggatgatgtttatccattacttattcgctaagtaatttacttcctagctaagtaaaccctactatatatagctcatttcattcatttgtaagttatagagaaaatagagagaaaagagaagagaaatagaaagcaataagaaaactctggttttgagttttattctctctagtctttattcttccttcttactttaatcttttataacacgttatcagcccgatcgtctctccgggagttatctaaccaaccgatcgtctatttgatcaagcatcttttgaggtaacatttaaattatcttaaattcatcttaattcatttataaaaaattatatgctttatattttcggagtatgaggttatacctcctccttaatcgaatggtaagctatgcctcttcgaaatgccataaatggctcattaattgaatgattatttatttctatagataatcatgtcaaatctagctaagctcgatgtcgttgcccttgatgtatctggtaaaaattatagtcatgggcatcagatattaagatgcatcttagatcaaatgggtttcttagcaccataaatgcatctgaaacgacatcagatgagagcaaagctaaagccatggtatttctacgccaccatctccacgacaatttgaaaaatgaatacatcacgagagaagatcctgtggatctatggtaatcacttaaagattgtttcgatcatcaaaaatatgtgattttgccaaaagccagacatgaatggctaaatctccggtttttggattacaaaagtgttggtgattataattccgccatgttcggaatcacctccaggatgatattatgtggtgaaaaagtgagcgattatgatatgattgaaaaaacgctctccacctttcatcctggaaatgtaatcctttaacagcaataccgggccaaaggatacactcgttattccgagttgatgcaagtccttttggttgctgaacaaaataatgaactcgtgatgatgaatcatttatctcgcccacctggatcagctccacttttagaagtgaatgttgttacatcccgataatgataattggcgaggacccggaccttatcgaggccgtggtcgtggtcgtgggagaggtcgtggtcgtggccgaggaaaggaagaagtttccatcccaataatttcaacacggaaaaaaccaacaaaaatgatgttggtcgtgttaagaaaaggcatgttgaaagcacttgccacagatgcggcatgaaaagacacttgtaccagacgtgtcatataccaaaatatttagccgatctgtatcaagcctcataaaaggcaaaagaaagggatgttgaaactaatctcatctgtgatgagttggaaccttccgttaaaggccaagatgatgataatcatcttgatatggcagattttctcgattgatcatgacaacgaaaaatcaatgtaatatattatagccatatgtataatcatgctatgcatgacaagcattatagatgcttttgtaattctggaataatgttatatattatgacatatggatagcctatgtcaaagtttcatgaataaatataatattccagaaaatatgttatgacatatggatagcctatgtcaaaattcgagattgaggatgaaaatat

SEQ ID NO: 31961 - DNA, 1149 bp, Arabidopsis thaliana landsberg
  unsure (1)..(1149): unsure at all n locations
gatataaaggcccccgtgatatgctaccgcaccgaagtggcccactggttggacaagtgaattgttttacgttaaggcagacgagaagaaaagggaaaagcttatgagcatggtgatgagtccactaagattaaacttcgacatgactcgggccctgtgcaatatgcaattggggtctccctgccagctagctgaggtggagttcagggttgtggctgagcatatcagcaccagatatttagttcaagaatatctggcgaactggacattctcaacctctagtggttgggggaatgttgaagaagaaggatgagggaaaaaagtatgagcttgtgcatctgccctaccgtttcaaattttagaaaaggtttaaagaaccatgcaatgaatggttagaattgatagaaaccttgtgcaatgaaattcttggaaattatacaaagaaagaagatcagttaatgactgctgccttcggacccaccaaagcgaagtctgaactatgtgatggacgctcttaacttcgaatacccagattacgaaaggcttgatgaaggagacagaggagcaaagaaaaagagggttgtaagtattttaaaaaggcaagccatgtggtccattgaaaaagatcagaggtctgctaaaaacaaaaaatttcagcgaaaccgaaggattcggctcccaaaaacgaaagtcctcaatcttggcccttgccaagatggtacaagatgtaccagagaagactgtcggcacctcttcgtcctcctctgctagtgttacagaaatattgaaggtaatgactgaacccttctggtttgctatgctaagtcccttggggtcggatctgactagcttattgcagtcaaaggagaagggggttcaaaaaagcgcagaagggaagaagattgcttcggtaactgggggaaatgtggggggtcataagaaacgtggatggtggctgtaatgaaggctatccataagaccccgccccncggtcntcggtggaaaaaagtgttgccctgcaatgtcgaagctaacgctgatgccaaagctgataaagctgcccctgaagctgaaaatagcggagcgcctcttggaacacaatgtcagagattacnnagattatagctgatgtggttcatgaaagagaaa

SEQ ID NO: 31962 - DNA, 520 bp, Arabidopsis thaliana landsberg
acagtcacaaccctctttctcttcaatcccccggcttcttcgtcaagtctttcatagtcggggtactcgaaacctaggacatccatcacccgatttagtctccgcttctcccgtgtgccgaacggctgtcattagttgatcttcattctttgtataatttccaagaatttcattgcacatcttctctatcaattctagccattcggcacatggcttgccgaagcttttttgaaatttgaagcaatatggaagctggacaagttcatatttattcccccttttttcttaggcattccccatccaccggaagttggaaatgttctgtttgccaagtattcttgcaccagatccctagtgctaatatgcccagccaccaccctaaattccaccttggctagttgacagggtgaccctagttgtatattgcacaagggtcgggtcatgccgaagctcagttttaggggactcattaccatggtcatgagtgtctcagtgttcttcttgctagagtcgtcgtgca

SEQ ID NO: 31963 - DNA, 544 bp, Arabidopsis thaliana landsberg
atatggtcgttcatcgagagtttttgatgatcagttgatttatgaagtataccgatcataccaaacaagtatattcaaaacatccttataccttgatgaattgtgtatatataaggaaagaaaagccattagccgaaatgtgtcatgaacctaaatcctaattattgcttgttagaaacgagacttatatactattaaaaccaaagaaaaagaaaaaaaacttaactatttttaaggacgaagtggcttaacgttaaacaaatgtcacagacgactcgttcaatgctatagcattaagcaaacaaaccaaacaaacataaccaaacccaaaacacactttttatttttagtaaccaaaacttcctaacactctttctctcacaccaaacacacattttccacacactataccaaataaaactgaactctaataattaaaataacctttgaaataagtgaatttctcttggcccccggcttcctggtttttttggtaaaagagaagtctcaccgcggagaaaatcagtcttccggccaccgtaat

SEQ ID NO: 31964 - DNA, 592 bp, Arabidopsis thaliana landsberg
attccccgggagcagcaggtagcagcagtaggtaaaccggagcaggcaactgaaactgaagaagccgagcagcagagttctttactcgtcggagcagtaggaagcagctagcagcagcgcgccggagccagcagcagcagcggactctggaagtctggaaccggagccagcagcagccagaaactgaagaggccgagcgtgcggcctgcgagcgacggccgacggggcgagcgtgcggcgtgcggcactgcggcctgcgagcgccgtgcctcactgcgggctgagggagagcgtgcctgcctgcgagcgccgtgccgccgtgcctgacgcagagggactgagccactgagggctgagggagccacggacacggagacgcagagggactgagggctgagggaccacggagacggagcgcgcggcgtgcctgaccgcggactgcctgcgcgcgtgcggcgtgcctgcgggtgagcggcggcgggccggcggcggaatgtgggaagctagggtcgcacggcggaagtcggaagctagggttgcgcgttgttcgggcagggctgaaccgctgacaggaactgtcaaatgagaatga

SEQ ID NO: 31965 - DNA, 378 bp, Arabidopsis thaliana landsberg
ggatgcagatctgacttcattacctgttcctatttttggctcattggcgatttggcgtctaactgtattgcatcagggcctaaactggcgccaaaaaatgagacgacgcgccaaaaagcaaagcgacgctccacagatgccagcaatacgagctcttcttgggccaggagcgcacgcaagcccactctatggcctgtgagacgagccagctgtgtgcaatcgttggatttacacgtacggtgaggatgagccgactgctctctgagtcgtctagtgtcatgtgatctggatcccattccggtggcttctgccaagtgctgaggatcggcatccggttcggttcgtcgtcctcgtccccactccccacctgcgcactgc

SEQ ID NO: 31966 - DNA, 8405 bp, Arabidopsis thaliana landsberg
  unsure (1)..(8405): unsure at all n locations
ttttgtgtactattactcctaagaaaacaaacatgcatccaggatgacataaatttgtttactttacttagtgaaaataatccattttacccacatgatttaaaacatacatcttgccctatgataccgcatcacaaatcctcataagggatatattagcatgtaacaaataaaagaatcaacttagtaattaaatagtagttcactcattctacaagtatgcattttctagcaaccatgcatgcctacttatcatgctatgaaaaaaacactcctttgaagaagggagacaataatgacgacattgcttggtttgtttaaaaagacagattcaaatttcgcataattatatatatattttgattttttcaaacaaatttcacgtttaaaagaaaagaaattttcacaaaagtgaacgaaaaaagatttgctctcaccgtttgtcaaagtgagaactggttttcatgttttgtcttttcattcaatttcggaccaaattaccctgggaaaacttaataatggcacaaaccaaaccgtacagcagttcgtatcggttgagttgacggcgtaaaccaaaccttacagcagttgatttcggtttagttgatgcggttcagttttgaaaaagacaaaaaaaaaaactgaaacgaagaaacccgagaaaacgaaaaagagaagagagtaacggagagatttgagagagaatcagaaagcgaaacgaaattcagtattcattgcttcaaaattcgacataacttcgaattgttgggtagttgaattgagccactgaactcccacatccggtgaagtgaaagttactgtttttcccggcgaagccaagagaaagttactgtttttcccggcgaagccaagagaaagttactgtttttcccggcgaagccaagagaaagttactgtttttccggcgaaatttgaacctccggcgagatagcatctttagctatggctgggaataaagctaacgacgaagtcccgaggaagcagcatggtccagggaaggagaagcgtgtattaagagtttccccgcggagaaaacgctctgcgacaaaggcaacggaggaactgggttagaatctctaatttaccgtttgttgtctttgggtgtatgagaattgtaaagcttgtttgattaaagtgttagaatttgtcggaatttagcatatctttaggatgaaaaattgagaagtagaattggaaatctctgtttccgccaaaaatatgattatgagttataatctggaaaatgtctgtgtacgtacactacttttgtttgctcaacagtatatgacttttaattgcaggtagtccaagtgttgctccgactgaagatcttacagttgaagatttaccaccaagactctttgctctagaccggtacccttccgannnnnnnnnnnnnnnnnnnnnnaaaccggagtacatttctgacatagcaaaagtactaaaggggaaaccagagatgcagtttcttctcgattctccatttgggaaactttttaaaatacccaaaaacaaggcatctttcaatgctaagcttgtccttggactaatatgccgtcagttagtgacaaagaaggtgaatgagatgtggattgtattcggcggtcatccaatcagatttggattaagagaatttagtatcttaactgggctggaatgtgggaagtatcccaagaagaaagacgttgatgatgttatcagtgtgaaacctgagtgtgagagtgtttggaagactctgtttgatgagaggtttggggacacggttccaacaattgctgatttggtgagctggctgcaggaggaggaaagcatggaggggtggaagcaactggcactatctcttattattttggttgacggtgtggtagcggcccacagtaaccccaacaggcctacttcgaagactgtcgagatgactaagaacctggagtttttctgcaaatacccatggggaagggtgtcctttacccgtactttggggaggatagcaaatttccaaactccttacgatgctcagaaactaataaggggtatacttgtagggtcttatgcactccatggtttcccattagctctccagcttttagctttcgaaacaatcccatcaattgctaagctaggacctgatgatgtacctaacaggacatttgctgagaggtctatccatcgtcttgcctctctgcgagcaatccggacatctcgcattttggagtgtgaggctgctgatgaggtgtgttaaattgtgtatgtacgtacataataagtaaatatacattatctatggttaacatacttatttgtgtaggttgaggtcaactatattgtgaaaccagctgataatgtttgtcctccatctctttcatgggatgatgaagttgatgatccaagggttgattacattgaggcactgttgatagatgggcaccagtggcaggaggatgaatgggttggaggctatgctagagtaccaaagcagtcgcgcccaccacaactagaagacacaggtaagtataagtataaatgtttttacaaatttttttggtattgcacctagaagaaaaccaattaatagcagcaactggtctattgtagatgttaagaggaaacgaaatgcaccgggcccgagccctaaagaacctgctatgaaaaaacagaaatctgaaatggactgtgataaagaagagactgctgaggattgttttggagagcctgtgcctgagaggtttattgttgaaatgaggaggtctttgaaggagctggaagaccaaatgtatcaaatgcatgaagatatgaaagactttgtccgtgaccagatacgtgctgcccttgatccaaaaggcaaaaggccagaacaaaccataccttcccatgattcgcgggaaccacctacttctatggataaggcaccggttactgcgaagaagccatcgagaaggatgtctacaaaaggaagcactggaacgagaaagtcttcaaggctgactcgtgtttctcatgatgtggacactcctgcactttctgttggctgtaattccaaagaggaagatttggatgtccctggagtacataccactgctttcggcggaagaagaaaaccttcaaagccgaagaaaaatgtttcttttgttgttgacactattgaggaacctgattccaataaggaagatatgcaaggattcattgatgaacaggtaagtcatgtacgtacattgctaaatattttataatccatatgtataactgtactgtctgcttcggtacaggatggcgttaataatgaaagtgattttactgcaaatgatggattgaattcttctgccgctgaagaagagatattagacactggatttttaatagttccttatgctggatccacacaatcccatatggtatgtcgtctactaatactcttaacaatctgtttaaatggtgtacgtacatattcgcttaagaagttagttaaactatgtttcaggatagaggaaatgttgttgttggtaagactgtcttcttaggttcaatgtctgggactgtctttgtaacacaggaagagaggcctgtggaagaagctactattgacaccgagatggaagaagttccatctaatgtgtctgcaagagtttcagaggtagatcttctggtaatcgttatatacagatttccatgactatatgcataactattacattaatttcttcacttatctaacgcttaactctatggtagcctatgtttcaggataatggaccaaaggatgttgctgaacctggcttagttggtacccatacaggggccgatgaaatagctgatgctgacatagagatggtagacaatccatcaggtttaccttcaacatctgcacaggtatgtgttagtcacttgttctttttccatatgtgtacgcccataagactttgcaaattatttttgtttcaggaagaagcaagagatgccagtgcatcgactgaagctaatggcagcgagtcagaagaaacttatgagccttctgatggagacacagctcacgtacctgccacaagtgtacgtacatttttgtcactatgttctgtgtacatatatattgtttcatacattactaaaaagtttctttccgatgctaaattctacaggttgaggcggcaggagaatccaaattagtgacagtgatggaagttgaaatacctgagaagacccacagtgatcccccgtcaccatttcaagtagttaacaatgtaagctaactcttgcaacaaataaaatgtactatttactgttcaaatgtataaaatttatattatgcaggtcatacgggagttggataccaaagccgttggtgatttagctgcagccactgatttggaggtaacaatttgtgtgtttcaattcctattttcggaatagcatacataggattatatgtgtacattatatatacttgtgtacgttaacttgcacaggtagtcatggaagagccgtgtattgtcgaggggtctgtagaaactgaggatcctaacccagggtcagatgaagcagacaagaccgatattcctaaaaataatgtatgtacctattttaaccatagaaaaacgtatgaaactgttgttgacaatcatatttgttaacaggatgaatcagacaatgctgctgctgtcgaagcaaaagaagaaaaaaaatcgtccccaaaggtcccaaagaaagtgaagaaacaacttgtctatgaacaggatgatgcccatcctcatggttttaaggcaaaaacagtattggtgcccgatgtaccagctcaacagatagaggttgttatcagggctggaaatgtctcatacaaccccctggacatggttgacctttcaaaagtagaggaattcagcaatatcattaaaggaccctctgtgtaagtacattatagtaaaatggattatttaatatctcaatcatcatttttaaggttgttatcaaatatttttctggattttacaggattcacactcttttcgggtttcgaaaagtgcccaacgacttttttgcgaaccttctaacacctggtgaatgggtcgaaagtacggtacgttgcatttatatacgtacattccttgttataaattgtacatagatgattaaatttttcgtggaagtgtacgtacactgatatattttttgaacatttcagcatttagaaatgatggcaatgttgatgtggcacaagaacggggaacagatgatagcaaacagatgtattgtattggacatgatgctgacgcatcttcttaccaagcgggtgggcgacttcaagaagtgtattaataagaacgggttcaaatggggtaaattactgtccgacattgctaatggagttcacataaaccgtgaacccaatatgaagtggatgaaggatgtcgatgttgtgtatgctccgatgaactggaagagtgaacattgggttgctttgggaatcaaccttaatgaacggctaataactgtgtatgacgctttaatatcgcacacgcgggagtcggctgtgaaggcgagaatgactcctatttgcgaaatgatgccgtacttagtcagagcgatgtgccaggatgtattgatttctccgtactcagttgaaccttttgagtatgtgcgttgtcctaccgttgctcaaaacccaactacaggagattgcgggccatacacgatgaagttcctggagttgcttgcgtttggacaccctttttcggatctgataaccattcgagaagcagatatggtcttctaccgtcagaaatactccattgacatctacgagcacggcaagcgggaggccggtactgtgcacttggtttaatcgtccaagaacaatattctggttctttgcaaccaattattatgaacaaacctgacttatatatatgattgcaactacatttaatttggagattgtcagaagttaatttattgtcctctatcatattttcgtacacatcgttcacttataattacataatgtaaatgtgtacgtacatatctatatgtctcgtacactgcatattaactttataacataactcaagtgataaattgatttgacagccaacgcttaccaacacaagtatgacattcatttcaaccgtaattgccccaaccaaattcacagtagtggttattaaagtgaagaaattactgacgacctctgactatctcatttcaaacatggttaacccgactcttcaagacgatttactctcgaagatagctaagaacctggctgaccaatgctggtccgaccttggtccattggtacgagccggcactcgtggaagagacattgtctaccgtccggatgtcctcaaagatgccaatattctcaccttgtgtgactcgcccgatgacttccaagctggagggggccacaatccctccggatccgctgatgaaggccgacatcgaacatttttcttaaggtgttttgcagctaataatcccacggccgtgtattacgaaggtattcgtgttctaacgcatgaacgaaacatcaatggagccatcaggctcttacagcgtcatgctccagtacgagcaaatgcaacacttgcatgcgccattgtattcatatgtgctgggtatgattatatgggcggcttgtttctacagctcttcacccgcaaccattatccattggactcggttgccactcgagttttgggtgatgagttcatcgaggaaataaagaagtttgaccctccatacagcaatacatatggtcctacgttctcttatcctaccagccatggtattaaaactccagattgcgccatgctttggtacattgtatctggaccgttcaagaacgtgtgtaactgttgttacctctagtggtgtgctaggcgagttagccaaatgctctggtcatataaatctactagttatttgaagttgttatttaatgttatcgtctaagttatgttcctagttcttctaatgccgttatgtttctatttcgttttatcctctatgcgtgaagttgttcaagtttttgtaatgcttctataaagttatgtttcaatttgtgcttaatctctggtttacaaggtttctcggtttaagggtttattcggatgtaagcaataaatttgaagtttcgtaatccatacttctttctgtacttacattataactttaaagttactataaatgtaggaataaatatgattggattgacgcaaaagacagtattgtgatagacgtgaccaggcataataaatacactccaattcggcgtataggttatatagacgtacacgtgttactaatgacgtacatgtaagtaatgagtcgacgagttatcttgggtttacattgaaaattacaaattttaatatagacttacacgtgtaaatctgaacgtacataaaccaataaactcgaaaattgtaatttgaagtttcggttttaatcggaaatagtttatagtttattattttcatgtaaacacgagttaatatccaatattaataccacctacaatatgtaagtgggacgtcaaacatttaattagttgtctcctcgccattaggtctatataacatgtactccgagacaagtcatcttctccacacttttcattgctcttactacgccatatataacctaaactcacaaataaatccctcagtctcggcaatggacgtccccacacccccaccggcggaaatttacctgaccattcagctacctaacccactcaacatcctcgtcaactacttacccgtttccgtaactcccattgaaacactcatagttctcgttagcacgctggagccgaccgctatcaacatggatgagtttataacgtggcctgatttcgtgttgccggaaacacctttccgaacatatttcaccctcctgcttgaacgtggagcaaggccggcgatttaccttgaaggggttcgtttagcttgcaatttcgttacagttgctcatggtttaaccatgttgagttctatctcgcccatcgacgcttacgcatgtttctctcatggtctgttcctaacggtaactggcaacggacgggagtttgaacccgtgaacgcgactttctgggatttagtgccatcatttgaagatgcaaacacagtgggggagttagttatgtatcacataagtcgattgtatgctcaaggacctcggatgtggaatctatcatggaggttcatgatttcaccagactgcttgggtcattgcagctacggagcttgctgccgcaattatttcttctactggtatgctagggagttgtgcatattttattaaggaatggcgttcgttcagcattttttttcccattctatgcatcggcatcggttatatgctttggctttagtatccttttgttgtatgct

SEQ ID NO: 31967 - DNA, 828 bp, Arabidopsis thaliana landsberg
gcaaggaaaggaacaaaaaaaacaaaaagcacggggaagcacactacagcgacgcgcgcaaaaaagcccagagacgaaagccaggcacgaaccgatagaaaccagcaaaatcagaaactatcttcaaatcagagaaacagtctttgagatcactggtcatcatgtaatctacgatcatcttgctttgcttctctccattagtctgcatcatcataaacaaataggattaatctttcatggttgatgtgattattagtatatacgcaaacatcttccaaccaaataaacatataatgaaaattgaccaatcaagactttgatctttgagtggcaatcataatcttcttagaacgccaaattcttactgataaagtgaaagcaacaataagcaacaattgtttcttcggactcatacacaagaacgattatcttaaatctcttttcaatactaacatttccggttttagtatcagagacaaagagaaaaacatagtaaacccaaacgattgtatctttctactaaatattttggagaaacagagtgaaaataaggtaggtacctcgaaaacgaaaaagccaccaggttgaagcatccgagaagccccatgacagagatgaaaaagactatcagttccatcaataccaccatccaatgcaagtttcggttcgtgtctaccaacttcagcttgtaggcctggaatgtcatcacttggtatgtatggtggattactcacaagccccacaagttttccttcaagatctttcaaaggctcaaaccaagatccttctctcacttcaatcatcccctggataagtccaatttcatca

SEQ ID NO: 31968 - DNA, 504 bp, Arabidopsis thaliana landsberg
gaacatctgcgtcttgcaaaccattcagtagtggacacccacccttcttgaaaccttcatacatccaatcacgtctatcacccattattgcggttgtgtacgtaaagagtgtgtgtgagacaatcacgtttctacacgtcacacgtatatacacctatagataagtagtaaaactttatatatacataaataattaaatatacacataaataacatcaaattaatcacacatgtgatattaaattaataacatcaaattaacatcaaattaataacatggaattatagttaaataattatatatacaattaataattacatcaaataataacatcaaattaactaacatcaaattaacatcaatttatatatacatcaaattaacatcaaattaataacatctaattatatatacataaataattatatatacaattaataattacctaacatgaagccacacatgtgatattaaattaactataatcacactctaatcacatg

SEQ ID NO: 31969 - DNA, 805 bp, Arabidopsis thaliana landsberg
ttaactgataaaggagacgtcattgtgaactctttctttgagaatcagtgcatgttgatgtggcaaaaccaggggtggttgttgtaggagacgcaaagggaagtgaggagttgaagattaatgctgatgctgaaactcttgaagtggctaataagtttgatcaaattggggatgatgatagtggtgaatttgaacctgtgtctgacaaggccattgaggaggtagaagaaaaatttactagcgaatcagactctattgcagactcctctaagttagaatctgtggataccagtgctgtagagccagaggttgtagctgccgagagtgggagtgaaccaaaggatgtggaaaaagccaacggattggagaagggtatgacttatgctgaagtaatcaatgcagctagtgcagtagctgacaatggaaccaaagaggaggagagtgtgctcggtggcatagtcgatgttgcataagaaggttgttaagttatctatgttaggagactttgttgtggactcatctgctattgaagctgtgaaggtagatgtggcatagccaggggtttgttgttgttggatacttagaggtgattgaggtgctttaaacttatggcaacttctctgatgtgcatattaagtttgatccgattggccaaggtgaaggtggtgaagtttaacttgaatcctatatagccacagaggagggaggaggaaagttggttagtgaaggagactcgatgtttgactcctcttgtggtggactctgttgatgctgatatctatgttgcagacgctggggttgtggt

SEQ ID NO: 31970 - DNA, 507 bp, Arabidopsis thaliana landsberg
cataatggtgaatccttacaaaagactacacagacacaacaaatgagttttgagaccgtgactaggttgattagagatctcaaatgctagagtcatcatcaacccagaaacaagaatcctacttttactgacactcttgattgttacacgcagaaataataaagacacaggaaaagagaattaactgaactcttcaagacttttaaaatggactcacatgatggtgcatcggcccttttcttcgtttggttgcgctggcatttgctggaaccggtgtgactctgagggattgtatgtgaactcagatgtgtcaagcccatactgtttcaaaaaaaaaagcaatcagtgaatctcggtatcgcactaatgcttttttttaatttcagcacgttataatcttgttaccttttccctcatacgtgcactccaagggtcactgcggcttgggcgttggccaaagtaggagcaactgggacaccagtgacaggggcggcttggcggttgatg

SEQ ID NO: 31971 - DNA, 559 bp, Arabidopsis thaliana landsberg
tatctttcatttactttactaaaaccagtttagtgcctttttcatatgatatccttttgaataagtacataaacaaaaacaaatgcttatttattaaaattgtaaagtatgttttagttaatctcaattttcttaattactaggactaagctaggtgtgaatatatataactaagttcgaataagtaacatttttagtaatctaaattttttagataataatttgttataaatctactaaaaatatttgaaaaataagtaaatactttactaatgcctaggttccgcctaagttttgattaatcgatctagtcgctagcctccttccaaacgtctaactaccgcctaactatcttttaaatattggtgatattgttaaatgcaaatcaacaaaactatttatacgactatctaaatgaagaattgtgatgaacaaagtacatacgaaggtaaaagttatggtgaagaacaaagaaaattcacaactctaactataaatgtatcactcgaggatatctatgacaacgcaatcgactatctaagacaaaattatttaatac

SEQ ID NO: 31972 - DNA, 377 bp, Arabidopsis thaliana landsberg
  unsure (1)..(377): unsure at all n locations
gattgttctgattcttccgacttaggatcagagtcagaagagtttcacgatgaatcggatccactgtctttatcggcatgctcaagcttgaaaaacccgtctctttatcatttttacttcgaggaactactctacagagacaaaacccaaatttaggattcgaaattctccaacatatcaaaagtaaaggggcaaacttcggattaaagtgaatagaaaagaggagacttttgtcccgtgaggtccgcagaagagagcttggagactgaaaagggggnnnnnnnnnnnnnnnnnnnnnnnntaggggttttaggttatttatgcaaattaaagaacccttataagggtgttttagtcattgagtgcacaacatttta

SEQ ID NO: 31973 - DNA, 652 bp, Arabidopsis thaliana landsberg
taactgtaatgtcgggtcttaaattaattattgccccagttaaaaaaaatttgagtgcgagagcgtacatttccttgcaattgcataatcaataaatacaatcccaatgtcaaaagatctaaatattcatagactcacaagtatggaagtgttacttgattcaagttccaagagagaaccaattctcaaatggatcaacctcatcatgaatgggcccatcatggttttgttcatttagtatttcgttttaacgtaacccatgtgtcttctcagcttctggtcacacccgttgcatagtggatacgtatatatcttgatgagaaaattaaatccggagatcttttaaaattgttttgaccatattacaagaatcgcggaccaaatattttttcgcttctatgcaaataggtgaagaagcaatgactacaataatgatcaaacaaaaggtatcgtttcattcacgtagagtctgactgatctgaccagtgctaatcgctactctcctctacggatgacaaatcaagaatatttaggatcagaaatttgttttcttatagtcacaattcttttattccgccacacgtagagccaaaactttgacggattcgttggccgttaagtcataaattattttttaatcgtgctttacttt

SEQ ID NO: 31974 - DNA, 517 bp, Arabidopsis thaliana landsberg
ccgagaagcaagcagcgagctgcacgcagcaacccaacacagtgcacaccacccgcaggagcaccagcagaacactctcagaagccacgcgcccacgcaccacaagttcaggtacagtcgcacagagcctaccagtagcttgagcacgccgagaacgatggattcgacggcaggcacggcgagctaggcaaagggcggcactgtcaggacagtcggcggcggtggtggaggaggaggacagtattgaagctaaagccactcgttgcttacatgctaagaaagctgaaaaaacaggcgagccgccagctacaatggagacactatcaaacatatataaccctctttgttttagctttttcaatatctggtcacgaaaaactgttttggactgtcaaatgctagcttctattaaaatcaatttggtaaaaacaaaaaaaaaacaaaacaaacacataatcggtcgagtcgcaatattaaaaatccgtcactttctaggtcttaaccttatggaaatttt

SEQ ID NO: 31975 - DNA, 860 bp, Arabidopsis thaliana landsberg
  unsure (1)..(860): unsure at all n locations
tatctatcaagaaatgtcaacctttgttaatgttttcatttattttcattataaatagtttcaatatacttgattccggtttcggttgcgttcataacaactccatattgagtgaattctaaaataaattttttgagttgatatatatcgagtcgaatagtaaaatctaattcgaaaaatatggaaacatgattaagaaaatgggactgatactttccgttattcataaggtatcaataggctgttccttaggtgtcaaaaaaagaataaaatagacatactcattgcaaaaacagatgtcagttaattaggttaacgagattcctttaattctctcaaaactctgaagaacatgcaaggcagacactagttatgttttgtttcagcaaatccgaaaacataatttatgaaacgcaaatcgttggccgaatattcccaaaattacgttattattcattatgtcatttaatatcaaagagattagatctgtataatcagacttagtatactttgattttgagtcttttgacaattttcggcttcaaaatttcagtttaggcacaggaaaaatactcataatgattcgaacggtgtaacatatagtatcaataaattgaccaaagtcatgccgcaatatatatgttaataattagcgaatgatcaaaattatgattttggaatcaaataaatccttttaggatttttttttttgtatccattcaaaccccaatctgcatggagatatatttacacatatctcacatacaaatcctttatttataacaaanaagttataaatggcatagtagttattctaatgttaaacttattcatcttcttctcaaatgggcatcatatgg

SEQ ID NO: 31976 - DNA, 972 bp, Arabidopsis thaliana landsberg
cgggttttttcctaaatttccccttgaaaagaaatgttgtcttgaacatagtggcaattagatattgtgtgcgaaatataagtgtcaatttttttatataagtgattcttcatgcatttgtgactttgttcgaggatgtctacttagtaagttaaagagtagtagttaaagagtagtagttaactatggtttgatatattggtggaagttcttaaccaattttaatttggaaattaatatgtgttcctttcaaagttaatttaccgggtgaacaagtcgccaagtcgggaaaattgtttgaaattaggctaaactaattttctaggacaaatattcaagtattttgaaattattaaccttcttaactatctttacacgtcccagttatctaatattgcaaaattgattagtttatatatatacacatgttttgctatttagaaccctaatttgtaaaatgattggagagaataagtaattgaaaatatttggtcaacaatatgcggcatatgttttggaattagtcacttgcttgccattagtcagccattagggatcttctatagatatgttttaaaaagtatttggtcaattgatatgccaatggaaagatacaaatgataccgtcgacttaaattatttattttttattttaatactttaaattattattagtttggtaatataaattattttcatattaaattattttctgagttacaagttacaatatatattcagaccaattctttgcaaattgtaattgttatacttctcatcgatttggactgaatttttgaacgcaaatattcactaaacttcccacaacataaaaacaaagaacaaaaagacgacaaaaaaaacaaagaataaaactaaaaaagagatttataaccatttgagaaactttatttctagagtcacatatgtagattttttaagtatgaattttatttagtaaactaataattt

SEQ ID NO: 31977 - DNA, 582 bp, Arabidopsis thaliana landsberg
tttcgaaataacattgttttttatcatatacaaccagaagtgtgacgggaaaatattcatttatctaatacaagactatccatgacgcgaatgctgcactctttacataatctaatacaaaattatgtccttacacgcaacgagggcgtttaacaatttccacaagatcgcgaagaagctgccatatatactgtgaacgtaagcgtgtaaaatgcatatatcattctacgtaaagaggaaaatcccataaacatcaatctatgtagatgtcatttggtttatcagataaaaaatatttgacgtaatgggtttgaaggaagtcaaacgtaattcctggttttggtgtcgttggtttaggacgtcgagcaatagccaatatgtagatggtgtcataatttgttgtcagttccatgttctagcattgtgattgtaggtctctcccgctcatagtggatttgattctagtaaaatatgactttgacatatagttttatcagtatgtattttgttgttatagtagcaacgacaaaacacactacgtaatatgtcaatcgtcgcgcacgtgcctgcgacacgcgcaaa

SEQ ID NO: 31978 - DNA, 1024 bp, Arabidopsis thaliana landsberg
acatcgatcatgattttcatctatatatttctctttctctcctcagccattataggtaactaagcttccttatgcaccgttttcattcacaccattcatgtttcagatatttgctagagagaacataaagtacacttttcccctatattttaatctaaattatgtacataatggagtatatgtggctccaaacgttagttggataattacaactttctttgttgcattctctttaacacattgatgcttggctagaaagctaatgttctcaggaaaattaataatgacacgaagattatataacacaataatagtattcaatattaatgtataaagattcaaatgggtgtgcaatggcccacaaattggaggctaacggtggcaaagggggcaaggaatgggatgatggagccggtcatgataatgtagcaaaggtttatataagaggtggtcttgaaggcatacaatacatcaaatttgattatgttaaagatggaaaaactatagatggatctatccatggtgtttcgggtagcggtttcacacagacggtatgtttatgtataaattttaagtctaaattttatgttttatggccaatgaaatttaaacttagatcttattatgtcgtggttccccacatcacatatctaggttattggctactgtgtacaaagtcattaatacaatcaccatttttgtttgcagtttgagattgattatcaaaacagtgaatatattgtatctgtcgatggctactacgacaaatctggtacgatgcaagcacttgaattcaaaaccaacctgaagacttctgaagtgattggatatccaaagggtactacaaagttttcactcggtggagtcaatgggaagatggtgattggcttccatggatccgctgggaaagtcctaaactccattggagcatatttaacaacagctcctcctactaagtcacaacttgtaggtggtctaaccggaggcgaaccttgggatgatggtcctaattatgatggcgtga

SEQ ID NO: 31979 - DNA, 574 bp, Arabidopsis thaliana landsberg
caaatcgaaattctagttttgcacagattaaatagcttcaagttttatagcttaaagttgttttaatcaacacttctcgaattaaagatggccggtgactagatctatgataacaccgacgtaaagtcacgagttttacgtataatctacgaatgtgaagaagaaaaaaaagtgacaaaactacaaaatcattagacgataaaaacttaatttaatgtcgaaagcacatataccactagttttacaaatgacgtttcatgaatgtgcatggggttgagtattaggctccattgtgggcacgcgcgcattatttaatgattgagtcgcgaggactactggaccgcagatgtgtgaagaatacattgagtgatgagctacgcacagtgggtgatggacgaatatgggaagcacgtaactaggattattgtgaccctatttgaagctataatagacaccttgtcccttgaattatccggtgaccaaaaaatgggctacttatcaaagtcaacaggtgtgatacgtgttcaacggtattcctcagtgtaccgaatcccccggactcgaagctcatacg

SEQ ID NO: 31980 - DNA, 1015 bp, Arabidopsis thaliana landsberg
aacatttttcataggttaagaatcttttgaaaggcaaaattttatacgaaagccgaacaaaaataaataaatgcatgtaaacatagcatacaaaaaaaagtaacgtgccaattgacatacacaccaaaaaaaggaataggaatatgtggcccgtatattagtagttatgtgatatacaccactattttcttacttgaaaacattattttttaaaaacaatttcacgcacttcaaatattgtggttcaaaactcattagattttttaaaaagaaatggccccaaaataaaaaacaaaatttagtggcccaaaaccttgatttagcctgtatccagttttaccattcatttatgatttttggtgagctaccttgtctcctatatatggaagaggctcaagtttggccagtctaataaacacacaaaaaataatgttttgtttagtttagtttagcacgagtatgattttgatattctatgtatgggtcgattaagatgattatcctttggtacacatatttttgacaatcatattaaatatctggtcttgtgttttgagattccaaaattagataccaccgcccataaattcttgccaatcatatcgaaaaatattcatataaatcattgttaacattccacttaagatgaagcctatccaatttgtgtaccacacggtacatccagataaacacagtcttatacttgcattttttaaatatgcaaatgtatgaagctaggcctcttaaaacattatgaaacaaagagtaataacgatcgaatgcataatttattttaatgagaagcctctggatatagtttatattttaataacgatttttaaactcacatcgaactatgcggcgctccaattaaaagaagtagcgaagaacgaatatttggcgcactctagcaaaaccggtcaccaggctggctggacatgttagcggcgttcggtatctcgaagagccagagcctacctactgagatgaccttatacttctcacataggaactc

SEQ ID NO: 31981 - DNA, 922 bp, Arabidopsis thaliana landsberg
atctatctaaactcctcgaagatttctttcgagatttaagacccttgaataagggtctttttttgtttatgaagaactaactttaagatgactcgtgtatttgaatttcaattgaaatttgaagcggttgttattgacagggtatagatacaagatattgacggagtagccaatgcacacactgcgtgaggccagccaggccgagctgatcgtcaaaaaaagtcgcttcatcgcctgcgtgcagccggttgctgacaggccaactgcccttcagatggtgtctggcttgcgtcaacaacatccagacgctgcccacgtgtgttgggcgttgatggctggcggccattcagctgcagtggacgacggcgagccatcaggcacagcggggcgccccatgctgtaggtgttgcgcatgcaagggcttgttggcgtgcttgaacggtggtgcgctattttggcggtgtgaagttgggggcaggtggcctggtgggggcctacactgacagcgtggccacagccctgttttccgcccagcgcattgagattgtcaaatcagtgaatcttcaacttcttgcaccttacgcactggaaggcactgttcggcactatatccagcaatttggtgccacaatcgcatccattgagcacaaggctgacgtgcaatttcagttgcttgtgcctgaaccggttgctgctgaatttgtgcaaaccctgaacaatgcgtgtcaggggcgtttgcactggttgcagcctgatgacccagaccctgaaggaccccgatgacccagcacattattcacattcaccgcgagccggtggaactctacaaaatcctcaaattcacaggcatggccgacagtggcggtggcgctaaaaccgcattggccgaaggccttgtgaaggtgaaaggtcaggtggaact

SEQ ID NO: 31982 - DNA, 858 bp, Arabidopsis thaliana landsberg
cactacaaccgactgtttgacgaaaagtcagatattctccactatatcctattctttatctcccgtccaaggcaacataagttctccaaatcggatctatatatttttagaaaaacatgtaacatttactttgagatttagaccaaaacccacaagacattttttcccaaaatgtcgtatgttaagttgcagttgcatgataagggcaatcatgttggtttttactttaactcttctcatgatcttcgatgttcatttatcagcataaactaaagaagactgaaactttctatatggctggtttacgaatatttcaggtggtgatggataatggcattgctcgggttacattatctaagcctgatggaattgttaccggaatcgagtataatggcatcgataacttgctcgaagttcttaatgaagaagtcaacagagggtaatgatccttgttttttcctaagtttaggttcttaaattggattatgcattgtctctgttttactctcttgtaacatttctgtatagtctctgagcgttcctgttagtaatcgatattctccaggtattgggatctcgtttggggaggatcaggaaccgctggtggatttgatgtgtaagttttctatgtaagcttaacaccaaaataagatatatcacaacatagaatgttatcttacttatagcagctgagagagattcagtgaagttcaaagcaactaatgcataattactattttgttttggaaacagaatcaaaggaacaaactatgaggtaataatggagaatgaagaacagattgagctttctttcactagaaaatgggttccctcccaagaagggaaagcagttccttt

SEQ ID NO: 31983 - DNA, 840 bp, Arabidopsis thaliana landsberg
cttcacaaataaaatgtgcaaatcattcatactttgaaaaaaatataaaccatatataatatcctaaatttatagaataacaataaaattattttagccaaaataatcaaaacaaaaaccataattcttcgaaatttaatacgtttttcacttgatgcaaagaaaaatccaaatcaaagtgaagataaatagatgaattttgaaaaatacttacataaaagtccaaacaacataaaaagtgatgagcaaagagggagaagatcacaaatatttaaagaccagatttagagccagtacatcaattcattaacttattatgttaagatatcttgtcttattttattttctttgtaactaaagcaatttaatgatgaattgtatttcgattatctattttaggaattatattcagttagtatttgctcttattatctcttgattattattttaatttaatttaattaattttagaccatatatgcttgttaacttttaaatagaaatagatttatggctctatttttgttatttttgttatgacatgtgtttgaattaagaatacatataaattgagatgacttttgtatttgcatgtgtagcctaagttatgaaaacaaaatgtaatatccgtgtaatgtaggtcctatatattgaaccgcccacaagcgtattcatgatttaactcaacgatttagtcctaaaactggtgggcctactctacagatggctacattaggatgcgggaaagatcatatcaactcttataatcaaaaactttaggtcacatatagctacatagcaaaagagtctcctattgtatacgatcaagtagcatatatt

SEQ ID NO: 31984 - DNA, 312 bp, Arabidopsis thaliana landsberg
tctcttcagtttgttctgactttaaatttcaacatccacaggtccctcaggatgttttggaaccaaatccagaggtataaacacgttttttttttttaaccaagaatagagagtatcaaatcatttctatcaatctcattgattatctcgatatacattctctaacatgtgtatttctttcttgtccaggaaaaacatcaagaaggagaccctgaacttgtggaagatgctgagttctataggcagttactaaaagagtttcttgagaacatcgatccagcttactcaggtatagttaaaaaaaaacattct

SEQ ID NO: 31985 - DNA, 2133 bp, Arabidopsis thaliana landsberg
gtttctttattaactcatatggtgttactgattccacagaaacacggttttcaatactttgtcacccattgacacagttcccaaatgtgattctatgtgtcgtaagttgaaagcgaaagcacatggttaattaatgccatctaatttaataatataatgttttgtaaactttcgtcaaccattggcacatcgcccaaatgtgattttatttagatgaaaatgaaagcaatgttaattaattccatgtaattccaaaaagttaataaagtcgagctttcgaagtaggtcaaacattaggtttattcttggttcaagtcgagttaaccgggtggtgctaaataaaactcctacgatcttaaccttttctaaactatggcatgtaatccctaattatagaaagaaaagaaaccatgcatttggaacttgaattatgtgtactgataagtctatacgatgtccgcttatagacttatatcaactaatcaaaatcgccttgtagacaattcgtcacacacacagaaaaaacaccatactaaaggtaccgtttggtgttcttggtgaaaattaaatgtacaatgggacgtgcaataactagaaagatgatatcttgtacgggtggattgagactcagctacaactacaagtacgagaatgtaacgatgcgaaagagaaagaagggactcgtgatcatatcttattaagtacacgtactatgcaataaacttgtcttctcgccagagcaaattacacatatctcccttcaaattttcaattgttttattagacaaacaattaaagctcatttaactttttgataaataaatttaaaagagaataaataacaattaaatgaacactagcgttacataacgtagaacacaataactaaacagatggcagtttcaactattgcatcccactcggtcaaaagaagccttagtaatgcaccggcgttggaagatcgttacaaggaggtgaaggatacatatatggttgcggtgatggtggtggcggaggatacacatatggtggtgatggcggtggaggatacacatatggtggtggtggcggtggatacacgtatggtggaggtgatggaggtggtggcggcggcgaaggatacacatatggtggcggtggtggaggtggaggtggaggtggaggtggaggtggaggtggaggtggaggtggaggaggaggaggaggaggcggtggactaggtggagagcagccaaaggatgcacaatcaataggataagaagaaaaggatttgcattcagcgagagaccgttgcattggccttgaaggtaaacaatttctacgatcatcaaactcttgaagcctcaaacaagccggtggctcaccggagaagaagttatacgagtaagtgaagttctcgagccgtggtaatcggcagatactctccggaatgtagccggagaatttgttatgcgcaatgtttaactgctctaaactcttcatatcacctatagtctccggcaacgaacccaccaagttgttgtaactcacgtcgaaaaccgtcaactggttaagcaaaccgatttcccggtttaaacaaccggttagttgtgagttcgtgataatgatttcgtgtaatgttttccccattttgtagaaacttggaggtacacaagatccttggagatcgttgttggccaagacaagaacagaaaccggagagtttccgatgtttctcggtaacctaaactggaatttgttgtcgttaatgaagagagcgtcgaggtttaggtcaaagagttggctaggaacatcaccttggaactcattgaacctaatgtcgagaaacttcaaggaaggcaaagagaagattacggaaggaaactcgccggagagtttattgttgctgacgtcaagctcatggagaagatggagacattttagagttttgggaagttgaccttgaaaacggttggaattgatatggaacaaggcaagatcggttaagagaccaagctctaaagggagataaccggcgatattagcatggttcaagtctataccagcgacggttaagacataagggctatctagagccggtgcacaaaacaaacctgagtagttacaaacattaggaccgctccagttagaagt

SEQ ID NO: 31986 - DNA, 1586 bp, Arabidopsis thaliana landsberg
ctgaagaagaatttgaagctgcccaaacaaggatcgaaagcaaaagaaaaccatccaacaagtctattttattgtacaggacttaacgcagagttgtcttctaacagtctttgtgatggaacacgaatgcttatcttctttccaaattgcatcaatttcaaaaatcagtaaatatttcgattattgctttataaattgaggaattatcttctcaaaattttgatgctctccatagaaaaaatgacgttcacctattatttacaggacgagactgaacccaaacggtgaaatagaaaaactctatttgcttatccaaattttctacaagaaaacatatctttgacgacctatcttcttctccaagaaacagttagggtttatcttttgaagcgatgggttgttgttcatcagattgcttcgtctacttcatcctctccattgctttagctttcatggccatctccaccactctacgttcacctccggattccgaacccacaatacccattgctttttcttcctcttcgccttctctctctttaaacgcctcaaacactctacggcaatctaatttcaaagcaatagccactcttctcctcatctcccctgagatcttcctctcttcttctcccaacacaaccctctttgccatcgaagatgcttccttcttcaacacgtcatcgcttcatcctttgtttctcaagcagcttcttcactatcacacactccctcttatgctttcgatggatgaccttctcaagaagcctcaaggaacctgtctcccaacgcttctccaccacaagagtgtccaaatatccactgttaattaagaatcaagaacagctgaagtcaatgcatgtgcgtatcacacaccccgacatgtttcttggagattcattggtcattcacggagttattggaccattctctcctctgcaacctcacagtgatcatcttatccacacacctttatgtcaatctgatacaacaaacaaaaccagtaacaacgaagaagttccagttagcatagactggactcggattgttcagcttctaagttcaaatgggtttgtgccatttgcaattggattacactctgttctcaacaggattgtgaacgatcataatcatcacaagaacttgaccggtgtaacgattctagctacaccgaatctggtctcattgtcatctgcttctccgtttttgtatgaagttgtgagacatcacattcttgttcaacggcttacatacaaagattttgcttcaatgtctgataaagccacagtgaagacattggatccttaccaagatcttacaatcacgagaagaaatgttaattcgtctggaggagatttcatgatttctggagttgagattgtagatccagatatgttctcttcttccaactttgtaattcatggaatatcacacactctagagatcccacatgtataaccattttcttctttcctttgtagatagctacacacattcatgtgatttttttttttcatgcatataacacattcattcttttaattgataagttaataaggaaatattgtttttagtaatatgtaaatgtt

SEQ ID NO: 31987 - DNA, 1217 bp, Arabidopsis thaliana landsberg
ctatccaaagattctaggaaccgaaaaaatgcacaaagagaccatgcaaatgaaagatactctactttcctattatgtatgattttgggacaactaactaaatcaaacgacacgtaagcccaacaaaacaattggtagaagttgtagatttaattaatgaccacgggcaattaagatttattgaaaccatgtagattataaattataataatagtcgaatcaaggccgtgaaaaaaaaaagtcgaatcaaggcctttgtaaaaaagtccatgggcttttttaaagaaaactaaatgtagaaacgtcctgaagcgaccttagaaaccctaaacactcttacgatcgtttttggttattacgttttcgagccgctgtttcttcttctctggttcgcgtaaatcagtatggatcagaatctggatccagcttttgagataattttcctctgggatatcgagaactgtcgtctcgagtttaaaatggtaccaaaaatgatgaacaacattcgtaggtctctgagaagggctgacaacaggtatcatatagtcaaaaaggttttggtcggaaaccagaaccttaggttcatcaaagataatctggtctatctacatgtagaaggattcgagttctatgacataccgcttagggaacacacttgccctgaaccctgcggttttgtggttcaacattcaccgttcaaaaggttatcttaccaaaactactttaacaaaaagaaattttacaaatccctctacattaaaagttcttaaatcaaaaactgtccagtaagtagtattgttcaaaacggtgtgttttaaaattatttgttaacaaaaaaaatttccgatatcaatccataaatttgtgtaaatgattataaacgactaaatttgggctcaaaacattattttgatgaagagcactaatggataaaaataacatttcttaaatatttgtttaaaagactagtacaataacatttttaactattttaaaaatatatttatagttggtctgagtaggaaataaccgaaatcttagttttatggaaaaatattataacgttctatgtaattaaaatagtgtttaagcatcagtgtttaaactctgtaaaactgtgtacatgattatatgctttttcctcttatttgacatttaaccataaaaatttcatgttgagtcaaactgatcttttaaaatacatatacaaaaatact

SEQ ID NO: 31988 - DNA, 1613 bp, Arabidopsis thaliana landsberg
gcaggtcgactctagaggatccccttctacttatagctcgtgcacatgaattagagattcgtaaatcaaatcctttttaaaaagaaagtatgagaagcaatcatgcaaagccaatagcttttcgaagtttgaaaaaagtatatacatcactttatttgttttattaaaatggaaacgagatctacataggatgcctccaaaatcttccaatttcttataagtttgaaaacagatacatcactcatgcatttgccttgttgaataagaccgcttatgaactatttgtggtcctaaactaataaaatttatcgaaatcgcattgttctcatttgtggttttcttgatattttgtcgtgtatatatacacgtctagctctgcctacctttcataacatagaaaacttatggtatttaaatatgtagcaaatggtgattgaaaaacctaacaacaagaaaaaaaatcaatcgatatgttcttctcgattttcatttactaatttctcatctgattttcataaatatagtcacaataacgttgctaaatagtcacaaatttgtgaccaataatgttggtcctaaatttcgtcgtaataactccagttttttgtagtgtagcgatgagtgatgaactgtgaaacgctatacaacatatggatttaggtcgtgaggagcctgaactctttaatccttatcatgcttatgctggagttttggcttctaatagattaagtcttcttggaaaaattcttaatcctcaaactcaaagtgttgaaagagctatcttagagttaccttatcagtggagacttggatcttaagttcatgggcgtatccttgatgaaaggtgctttcaagttcgttttcgctctgaggtagatctacttaatgttttaatgagagcgtcttgggtttttcatgagtggtttattgcacttcagagatgggaagactttcctacagaggattttcttacctttatagacttatgggttcaaattagaggaatacctttaccttatgtttcaaaaaggacagttgagatcattgctagtactttaggtgaggttatggctatggatttcaatgaagcaactacatcgcaacttacctttatttgtgttaaggttagaattgattttaccgagccactacgcttttttagaagagtacgttttgaatctcgagaaagggccatgatcggttttgagtatgagaagctccagcgagtttgcactaattgatatcgagtgaatcatcaagtcagccattgtccgtatttagtgcatcatgaggaggttgatgaagaaccatacgtgatggtttctttagagaggcatgatgatgaagactcaaacagtctcaatcaacgagatcaagagagtaactcacaaagctctattatctcattgttttcatcaatatctccagcatctctgaatgactcccctattgtaagctggaatggttatgctgcaggcaacctacctcaaagattctcatcatcttcaaactcatcttctcatacagtttcagctagctaccttgcagcttcggagtggagacctgtagatcgaggtagctatgagtttgatgagagatcatagataaagaaa

SEQ ID NO: 31989 - DNA, 432 bp, Arabidopsis thaliana landsberg
tttataataatactcttcaattgatttttgggatccttgtttgatttttgattttttaaagaaaattgttattttcttacttgtattcttaaatcaaattgttattttgatattttcttatactttttagtattatttttttttccttaaagaatactactaaaaagttggtattttgacaatgtaatgccactgatcatgcatgcatgactctgattaagttacgatataaacataaagtttaaaaaataaatttgtatcaagaaaattataataactagtagtagtatatatacatcaacttatatgacgtggaacaagacataaaagtaaacaagaatggaaaattattcatcgaattatcaaggttaattgcttcattgtataattcgttttgcaaattttgtggatttttaagggttatataaataa

SEQ ID NO: 31990 - DNA, 2714 bp, Arabidopsis thaliana landsberg
accgttaatatcaaattaaatttaaataattaaatattaaataaattttataaaatagtttttgttttaatatttgtatatattttttaaaaaactttataaataataaaaactagaaataaaaataatcattactaaaacacatacaagaacatagatttaaaatacaatacaatacgcacacaacaagtaaggaaacatttgtaacttaattagtatattaatcttaactcacaaacttaaaaatctcattcaccatggaaaattccaaattgtgcccatatatgtttgactagatttgcttgcaatttgcggtgtacatttgaatcacgcaacttggatctaccacgcacatgatttgcaaatacaagtagcactttggtcgagaatggttgttatgtactcggcccacttgccttagattgatcataatcagtccaatgttgagtatacgtctgtcgttcatcatcaacaatcatattatgcaatatgatacacgacctcatgatgatagtcaaatcggctatgtcccacagtcgagctggttcgcgaataattttaaatagagcctgcaacactgcaaatgctcgttcaatgtccttctgacacacctgcaactaataattgttgggatttggatagtttaaaagtaattagaaaagttttgggtgttgaaaggttattgtttggatccatttagataaaagtatatttaaagctaaaacaaaagtttattggagactaaacttttttttttctaaagaaatattatttttgttttgtccaaatcaaatgaagatagtgtttatttatagagaatgaaaaattgtaaattttgatatgtttatttataaatattatgaaataattgaagttatgtaattgagaaaaaaaatatagaaatcaaagcaaccaatcaaattttttgcgagactaagattttaaagagtttctctcccagacactaatatcgaggaaactatctcccttcatctttccgacgtcggtggagctaatagacactaatatcgaggaaactatctcccttcatctttctgacgtcggtggagctaatgctcgccggcatcggaacctccctctcatctctcgagctatttcctctatctttcatctacttcttcgctgtaatttagttttcttctgttgcaaaccttttaatccaaatctatcgagttcttctttgctgttgaatcttctttgaagcagtattctccgacataggcaaaatgtggcctccgagccagctacactctctgtccaaaccttgcgaatcaaaaaaaacagtttgtgaagctttcaatttcataggcgaccaatccttccaacctgagccttgtctccgcctcctcatcattactagatctgcgggacctttcggctccctaaggcttctccgacgttcttttgccaaaccattagccgttgttatagcctcagcgccggacccgtcatgcagcttgctcaccctaactctatttacatcggagacgtctgcttcaattgtgcaatccgtacctctctaccgtagccgccgcactccgaacgctccttccccaacaatctggaatcgagggttttctttgatgggccctgtctccaatgttggcccatttccctcgcggcccaagcccataaattgcgacccaaacctattatcacaaaaatccaggtattcctccatctgcaatttgccgagtctatcccaatgtagacatcgtttctttattttgaggggctagggacaccacttgaatgacgaatcaccctcgttgatatgctcctacaaatattatctgagaaccttggtgctaggtttagctagggcaatgttttatgattccgttttgaagattcatggtctagtgtttcttagtccaatctgtcggagatgtgacgctagtcaccaaaactctctatcaaagtatttcatactgacaactatatcgaccaacttcaagaacctcccattcaccattactccccgggtttggatcaagcttcaacatgaacttctcaattctcttgtgagagatccctccctattgactagtgcctcaaagtgatatctactaaatttcctcatgtctggccttttcttcatgtggcaaaccgactacaagctttgtgtggaattccttaatctccttggtcttcttgggagagaggacccacctgttctgttacggtctcgcatcaatctttctaagcctcgacgatcctccttcctttaccaaaaccttgttcgaacctttgcaaaagcactacttggtgtagtacttctcgtcccgacgagattcatgtctttggcgcccttgttaacgttactaagtcttttgacagtaaccatactctcatccactactttgttcgtggaagatttgtcaacaatccttgatcttaaaagtaacaaattcccttcaagtgtttggattatagctctcatggaaccattgttgatgtaccttatttgtgtgttagcttttcttcttatggtgttgggaatgcctacctttgttgtcctttaaactttgggatcttagaatccttgttcctttgtacttgtttctctcttaattgaataaaaacaagcttttgtccaaaaaaaaaaaagcaacaaatcaaaatataacacttgtcacacttatcttctttcttctactctcatgagtgttgataaatttgccatctggctt

SEQ ID NO: 31991 - DNA, 643 bp, Arabidopsis thaliana landsberg
gacgtgcttaagaaatgttttggacttgttgtttttatatgtgttaccacgtggcagatgtgtttttaagtcggtcaaatttttatcttcttttttgtcaatatactctctataagaaacctaacactatagtgtaaacatggaagaaaatttcacaatgtttaaattggattatagtatcaacaaatatgattttattagtattcttattttaaagcattttttgataatatattatcaatagcatatttagctttagatatgtgtcagatatatatctgatagaaaattattttagacttatcaaatcatatatattttgttatctaattttgagagatttatggaaataatcacttaaaagtaagtaccaaaccagcaatggtaaaccaaatttgaccataaggaataaagagaaatttactggcaaataccgggttgtctttggtcacagctgacctaatacgttgtggtcatcaaagagtgagagaccggttcaaagtcaataacccgaaaagtcactaattggtcaacccgcgcatagattttagcttatattgaaccttaaaaaaaagaagcatacctttcccgtggagctgacttatgtgttagctacacgccacgagtcgtgtgggtcacgcct

SEQ ID NO: 31992 - DNA, 988 bp, Arabidopsis thaliana landsberg
atgatgtcacgatgaggaagtgttgaaacgttaaaatgccaaaatataagcatgcgatggaattttggcagaagatataagaatttaatctgtcgcaatcattactcatgctaacatttttcattttcccttcatttgtggataacgcacgatataacattctacacaccaacaagattctataaaaacgcaaaggttgtctccatagaatatcgtcccatcaccaaacattagcactccttttcctctctatctctccctcactcaccctctttctctatatcgtctcctcaacttggatatgggtgaagccgtagaggtaatgttcggaaatgggtttccggagattctcaaagccacatcacccactcaaaccctccactctaaccagcaagactgccattggtatgaagaaacatcgatgatgatctcaagtggtcttttgccctcaacaggttttctttccggttgcaagttgacttgctcttattttaaattctcctcgtcttttattttacaattttcttttttgtcgacagtgttctccatcaaggaactagtgagtaccaagatattgctctgttggacaccaaacgttttggaaaggtacattttgtcaattattcttatgaaacaatatctttacttaaagttcatgtttattttgtatagttttgattattaaaaattccttatagtgatattataaggcggaaactaattagtaaaagttaaaacaggtgcttgcgattgatgggaaaacgcaaagtgctgagagagatgagtttatctaccatgaatgtttgatccatcccgcccttcttttccatcccaagtatgcactttattttacttcactcacaatgttttttgtaaatgaataaaaaagattttctggtattcaactgtagtgcttcatatttgaacctaaaatagcctactgattctactaatatttagaagattatttcacatgaacattttatat

SEQ ID NO: 31993 - DNA, 1027 bp, Arabidopsis thaliana landsberg
gcatcttacattcggctagggtatttctaaactgatcgaatacgtgtaatgtttttgaggacaaatgtattgtttacacgagatttttttttttttttttttcacgagaaaataaatattttcatcatttttgcatttccagtagtgagaatcataaaataaagcttaaaaagctaaaagttggatcaataacgaggtttaaattaaaaaaaaaaatctagaacaatcccatatttttttttcttagaaacgttacacaaaaaggttctacatgaattaccctatttcaaccgaacatgaaaaaaaacactaaaacaaaaacattaatgagtatacatccaaaagcatatcagtcaatcgtttttaattccaagtaacaaaatattcagattcgtgttgggattggcattttttttctccctgaaacaacataacaaaaaaatgttagagcaattaaccaaataaacaaacacacttgagatatggaagaagaaagctaaaaccttaaaaagcatttcttaagatttgctttttcttatggataaaagtgtcaatcacattttgtttcttcaagcttctttccgagtaatcctgatgaaaaaaaacagattaatcttgtcaaattttgtaaacttaaaacaataaaatggtaagaagaaagagtatcttaatcttaattctaacctgaagcagtagattccaagtgcagttgtgatctcatgaatgactgaagttgcaaaatgcgcatatagtgacaatgtgaatatacaatatccaagaagaacccaaaactcatccacaagaggaaccctgagaagaggattcaaatcaattctgatatgaatctgacgaagacgaaaaagcgaaagaaaagaaacatacccgtcgttgagtctagcggttagagcatttgctagtgcaaatggaaggtaaagcagtgactgtgcaagagagaaagttagtgaggacaacgaagaaacattttgatccaccaaaagaaaagtattggacttttacctacacatgt

SEQ ID NO: 31994 - DNA, 450 bp, Arabidopsis thaliana landsberg
tctactttatattttcagcaaatggcaccaactaaacaagcttaggtgattaaagatttccagaagcagtcggcacagctggacatgacggtaagcgaaacatctcataatcttaagagcttactttatccaacaagtacagattagtttgcaggatttgacattgaacatttgatgtgttgttggatttgcagatagagatgatgtcagaggcaattgatgaaacacttgataaagatgaggctgaagaagaaacagaagatctgactaaccaagttcttgatgagattggtgttggtgttgcatctcaggtcgggtttcttttcataaaagcaaattaatttcttcttttttggtttcttgggtcagtcaaacactaaaacatgtcttcttttttatttgctttaaacagttatcttaagcttcaaaaggtcggattgttacaaaaac

SEQ ID NO: 31995 - DNA, 374 bp, Arabidopsis thaliana landsberg
tttgaaccaaaagctgcttcctctttttttttgtgtgaaaactttctctctttgttgagttatgagcagataccggtatattctgagaatcatagattatgtatgttagactttattcttttcccctaaaatatttaagaattcgtttatgtgttttgacttttcagaaacaataaaattcatgtgtttcaggtcaaggaaaaaatcgagaggaggtgtattcaaaagtatatgagtttggaagaaaccatgacttatatgtatgatcatgaccatattcctaaacatatcactgcaacaagtaagtaaaagaaaatcaatttgatttcggattgggaaacatataaactagaaaagcttttcttttatttttt

SEQ ID NO: 31996 - DNA, 3013 bp, Arabidopsis thaliana landsberg
tgttggagatgagaatgtctattcctggaacccacttttaaatcttacaatgttgtcttggagattttggtttctggtaattgtcataaagttgcagctaatgtgttctacgatatgcttagccgaaagattcctccaacgcttttcacatttggtgttgtgatgaaagctttttgtgctgttaatgagatagattcggctctgtctctgcttagggaacatgacgaaacatggatgtgtcccaaactctgttatttaccagactcttatacattcgttatcgaagtgtaatagagtgaacgaagcgcttcagcttttagaggagatgtttctgatgggatgtgttcctgatgctgagactttcaacgatgttatccttggtctctgtaagtttgatcggattaacgaagctgctaaaatggtgaaccggatgctgattagagggtttgctcctgatgatataacttatggttatttgatgaatggtctatgtaagataggccgggttgatgctgcaaaagatcttttttacagaattccgaagccggaaattgtgatcttcaatactcttattcacgggtttgtgactcacggaagacttgatgatgctaaagctgttttatcagatatggtcacgtcttatggcattgttcctgatgtctgcacatataactcactgatctatggatattggaaggagggtcttgtaggtttagctctggaagttcttcatgacatgaggaataagggatgtaagcctaacgtctactcttatactattttagttgatggtttctgtaaattaggaaagatagatgaagcctacaatgttcttaatgaaatgtctgccgatggactgaaacccaacactgttggttttaactgtttgatatcggctttctgcaaggaacacagaatccccgaggccgtagagattttcagagagatgccgagaaaaggctgtaaacccgatgtgtatacatattaattcgctgatatatggactatgtgaggtcgacgaaataaagcatgccttgtggttacttagagatatgatatcagaaggtgttgttgctaatactgttacttacaacacgctgatcaacgcgtttcttagaagaggtgaaatcaaagaagctcgtaaactagtaaacgagatggttttccagggatccccgcttgatgagataacctacaacagtctgataaaagggctgtgcagggccggggaggtagataaggcgagaagcttgtttgaaaagatgttaagagacgggcttgcaccaagcaacatctcctgcaacatacttataaacgggctctgcagaagcgggatggtggaagaagcggttgagtttcagaaagagatggttctgagaggatcgacaccggacattgtgacatttaacagtctgataaacggtctgtgtagggccggtaggatcgaagatggtttgacgatgtttaggaagcttcaggctgaaggaataccgcctgatacggtgacgtttaacactttgatgagttggttgtgcaaagtaggttttgtttatcatgcttgcttacttgtggatgaaggtattgaagatggttatgttccaaatcatagaacttggtcaattttgttacagagtattattccccaagaaacacttgatagacgaaggttttataatgcagctttttgaaactaaatacaaaatttgtttggttaatgttactgtggtatgtgtatgctgtcacccaaattatgattttttcccttatagtttcaagttcctcaattattcaattaaactatctattgggctactattaaggcctcaaggcccagtttgtttttatggatatgtcaatttgataataatgctgtaaattcttcatttggtcaaaaaaactttttggtagaattcttcatttggtcattgggctaatttgtttactagttagtcttttatatgcaaaaagattctgatgatataatttagacatgttaccatagttttcttgaagtaattttacaccttttttaatttgttaaattattaataacgtgtatagatcatgattttgtttcaattgattaacaatattgttcatgtagatcatgattttgtttcgcttttccttagtcattgcacttaattagtttgcttaattagtaagacaaatatatgcataattattgtgacaattaatttaggcatgctacattacttttcttgagctaaattacacgttttgttattttaagtgattgtactgcagatcacgattattcagatttcagaccataataatttgaagttaatatttccatagaaagttatttagaaaatctgataaatcatatagatagataaatattggatagatacaaacgcgcataggatcagccgaagaaagaaaaaaattctaagaaaataatagaaagaagagaaaaataatgaatcatcatctctctcacaaaactctaatatctctaaaataaataaataaaatcaaagaagcttcattgatcggaacaacctagataaccaaaacggcagcagttaacataaccgccacagatccgaaactggcgaatttgttcgaaactgcgccgccctgagcaggaccaggagcttcagtcggagaatcggagatcgcagatggagacaaagccggggagtcagcggtaggagaatcagctagaggcggcgatggtggtgaagcagaggattctggagtcaatgcggctgccggagaaggagaaggagaaacttcaggtgcaggagcaggagcagtcatcttcttaggtgaaggagccggtgagatccgtctacctccgacgttagatggagctggagccggagattgagccactgcggaagaaatcaaaagagcagcgagaagaacaaacactagagatttggaaaaagccatatttcaaaaaagagagagattcgaatttagctacttcttcttctttttttggtttgggagtgtttttgctttgttgttgttgttaacg

SEQ ID NO: 31997 - DNA, 1007 bp, Arabidopsis thaliana landsberg
tgctcgcgtagatcgactcaccgcctgttccgttcccggcggtgaaatgtcctccctggcacatgaagttagggatcacacggtgatacttagatcccttgaagtgaaggggttttccggtaccgccaacacctttctctccggtgcagagagctctgaaattctcggcagtcctgggagtcttatcggtgtacagctccatcacgatccttcccgcgggctggccgtcgatttctcgtgttatgtataccttagggaacgccattcttgctgtttgaaacgtgagatctctaaaagactgaagaagaggtttgttgtggatgatgaatagaggatttatcggtgaggttatctgatttatagccggccaaggggaagcggcgaatatctcacagataaacaagattattacacgtgggaaaatctcaacggctttaagatcttaaccgtggttaggttaagagtttgaccaccggttaagtaggggtcagccagtcagtgcgttggagtatctcagacttggcaaatgcccctcctggagcaacgtgccacacgtgtcccacaatttctaaacaacttgctaaaaacaacgtcttttaatcctaaaaattaattttatttactgtcagttcaaattcaaaaaaattgaaccgttaaactttagtagtaacgcatactatatgcatgactttcaattaacactatcaatgctttgcgcaatagtccacccctcataaatgttagctgtaatgagtggttttcttttttagggttaaatttttcctcatagtaagtaaacgtgttcaagagtagagggaattcgaaaatcagaataatctagaataagtgattatcaaaagttagttgaataagaattattcggaactgcactttctgcggtctagagtcagagagagaaccaatcaaaagaatttgttgagaggtaagccatttaaaaaaaatgaaagcaacgagcggccccaaaggagtggacagcaagaaccaaa

SEQ ID NO: 31998 - DNA, 479 bp, Arabidopsis thaliana landsberg
atgctgtcggagcgtaggctcgacatcaagagtgtcatagggagtggaaatatcgtcactagtataggccactcaggttttgcaggtctacatatcgctccgctatgtcagccatagatttacctcgggccctatagttatatgacttatcagcatcttaatcatagtgaaagtgtgcttatgtatctcaaacaaagagtagtctctataagatgccgaatcgtcgtcatgccgcattgctcggataccgttaactgagattctgagataggtaagagagagggttttatatacgattatttatagctgcgtgttatcaggtaggtgtgtgagtgtcctaatataaccggagccacataggcccagtaacttcggctcgtttaggttagccaattccgcatggtgccacacttaagctcgaagggcacaagatcatttcagagggatatgatctctttctcccttcgccggaatcagac

SEQ ID NO: 31999 - DNA, 499 bp, Arabidopsis thaliana landsberg
gatgttctcggaatctgttgtacatcggaagttcctataatcgcgaatattctcaagtcacttgacggcggtagagaatattccgtcatcgttccctcgagaaccgtgattgttgttcacgacagtctcctcatctctcccttccaaattggtaaatcttttttttctttgtgataataaagatttttttaaaaaaaaaaattggtaaatcattataaataaatagttatttaatatttctctaatttttaattttactcagtcaaaaaataataattaaaaagcataaataattattttatattacacgaaaagctcacttcatcttatttctatttataaattagtggttttgcgtcatggtttgatattttaattagtcaaatatatgtgatccaacaagtcacttcaactgaaaatatttaatattctaccactcaaatttaatttgctttcccaaatcatttcttcttaagaaaactagtttagatccaattct

SEQ ID NO: 32000 - DNA, 902 bp, Arabidopsis thaliana landsberg
tccggttaaaaagcagcattgattttttgaccgcgagctgcttcaaactagaaaaggccattgaatatatcacaagcaaagattacactgatcatcagaaaaaacaattggatgggttcttttttttcttctaacttgaagcttagggaattcttcattgtgaagaaggaaaacgaaacgagcaacaattccagatcgtattagatcttttgtaccaagaggcaagtttctttgcattcctggacagatataagagcacaaaacttaaagaaatgttaaaagatgaaatctttcagatcgaaacagaggaagttttatttaccatctgatagaatcctgttgatcttgatagctgaatcaagctgtatcaaaggatcttttgaataaaggccattggctaaactcattgctgctgaaactttgtgtgagaatcgtttagaggaagcttgggtcttaagcaacgtgggttttctatattctttgccctatgcagaggtatttgcaaaacttcaagagaaatctgagctgatatgtaaaacaggcaaaaaaattttgcaattcagtgcaagaatgcaaacaagaatggagggtaaataacagatacatttagttcgaccatatcgttatcagaaccggcttgtttggtttgatttaatttcgactgaacccggttcagtttaaccatattgattcagtttggctatgggtttaaatctggtttaataaaacccaaatttcagcatgttaggcgtgttggtcaggatcatcggatcattgccaatctcgaattgcccccctaatcggagtcaaactagggtttgtatgtttaatctcgttagcgccaaaatgtcgaagaaaacggtcagcacaattcttcctgtggtttctctgttcgatcataa

SEQ ID NO: 32001 - DNA, 667 bp, Arabidopsis thaliana landsberg
ccagttttttttttgtatacctattgtcccacttaattcaataacgcaaacatcagcagaatccttttctccatcaacaggaataaccgcaactctctcgatccaatcttgaattgcatcagtgacatgaggaacaacctaaaaatcatatcaaccaaaacactttttaagacttacaagaaaccaacaccagagaaagagataagttgaagaaaggtacctgaacagtctttcccaaataatctcctttcctctctttagcaataacatgctgtgacccagacatagaagtgtataagaagatttagtaagcctaactcatcaatcaaaccaccaaattagttgagatctaattcttcttacctgataaattttcccagtagtgatgttattgtctcttgttaatttgatatctagaaacctttcgtagtttacaagatcaagatccacctttttcccaaaaaagactcaaaagttctcaaaagctgaagacttgtaagtttttttaaaaagttacgaaagaaataaaagtcatatttatttacctcaccaccatcgcccaagacaaaaacttcatcgcgttcaaatggagacatagttccagcatcagtgttcagataaggatctgaaagattgagtgcttcgtaagcaatataaacattacttg

SEQ ID NO: 32002 - DNA, 1732 bp, Arabidopsis thaliana landsberg
  unsure (1)..(1732): unsure at all n locations
atgtccgcagcaagtccatcaacttgtccccttacttcttgcaactgggcatccaccatgtcgtgtgctcctgccatagttagcgcaacaccaaaacaccaaaaggagaaaaacaaacgacaaaaacaggggtgtactgctcacaaggcgctcacactagtgctgttatcaagttcttatccgttcttaccaagccacagtggtgaactgcaaccaacaggtggaaccggtgaaagattggatgagcgattgcctggagaaacagaaaccttctcgtcgtagaaatatgtggagttttgggtaggctgcactcaagtcaaggattagcacgatcaaacaataatgcaaagttgaattatagtgcaaaacatgaaactatattgctggccacaagtgcaaaggacggatggaactagcagaatggcagtaccgtaaatattgtactagcgaggccactagtaggaatcacaagtgattttgtttttatggttttgtatgatctgcttgataattttctcagcacaaagagcaacaaactaggagctacacgaaatttcacctcaaacagagttcagatgtggtctacagaaaatcaggaagtagtgcgagaactttgacggatttttttctttattttcctgaatttttttgacaattttgtcaaagccaaaccgacctttggtccatttgacggcctcagaatggtgccaacaagctcctgtaaaaatttcagattttttgaacaaccgagcgaaaggttatgcccggtttaaggaaggtatgtttaaaacgaccgagatgagacaaccgctttgtatcccttctccttcgttttttttgtttctgttttttttttgacgtaaccgaaggagaaaaacaaggaagcggcgttgactcggtttgtggcgtgatcaaacgggagatggtggcggcacgctagggtttgaattgtggaagaaagaaggatggtgaaaaaaaacacaatgcaaccagcaacaaatgacacgcgagcacaaaaattcaacaatgcagattattgaaagaaagtgcgaggctcaaaagggtgctgggataaggtctaacctgaatttttatgtggttttgtggactgtaggagaaaaaacactcgataaactcaccgatcaacctggaaatctgataccacttgatataattgaggtgcccgatctttcggtgagtggagataatttcgatttggcggaagatgacccttgcgatccgactacgacgagcaagccgaggcaccaatgaatcgtgaaccaactccctgtggttaccgaccttgctgatgtgagatcggcctgatcatgaagatcgtttcctgtgcgcaatcgaagaacgaacaagaaaaagatgcgagcaatctaatttattactcgagggtggagttctaaatacacgaagacagcgctgatttgcacatgttcgagagtagctaaagctaacgtaaaacaaaactcaaagaacaaaggaggcacagctcctggataaatagagagagggggcgcactangctggcggccaaagggggaaaacgcaaccctaggtcgcccactatgggccgtagttgggctggtcgtctattcttctgggctctcattcttcagtagcatgacgaagttaagatctctggcacgggcccaagtgattagcccagctaatgaaggaagtggcgcttgatgtggaggtgctgctggtgtagtcgtactca

SEQ ID NO: 32003 - DNA, 646 bp, Arabidopsis thaliana landsberg
  unsure (1)..(646): unsure at all n locations
acatcagttcatattgttccgtagcatgttgcatatagtttaattttggtcttaagtaacaccaccacctgacacgtacgtacgaccaattatgcatgtctcaaatccctccatgatttctatatggaagaccaaggtttcaagattagcaattttaacggattaaaaccggttcaagattttattttttatttatttttgctaaatcctacaatttggtctcatgacaaaaaaaatataaaaacatagaaacaaataacaatgaatctatcgacatcaacaaaagcaattaaactttccgaatcaatgaagcgataaccggtagtatctnnnnnnnnnnnnnnnnnatcaaaatgctaaagtaactattcataatcttttattaataatgaattatcaaagcttctataattcatacgacaaagacaaaggaatagcaacaagttatgttcatttcgctgtcgtttaattcaacaatgaaacgttaacgaaacgattttgtcgagatttttaaacgtctttttcaggttctacggctaaaattcctaacatttcatcacctgtcgttatcgttaatatacgccttgtcagcagaaaagaatgaaatcaggataagttgtaacttctatgaaaaaacatatcttac

SEQ ID NO: 32004 - DNA, 1607 bp, Arabidopsis thaliana landsberg
  unsure (1)..(1607): unsure at all n locations
tgtctttagagaacatctctgcctgtaacagtgacactaaaagattgcttctcgttcactttcttaaaatacagaacactaggcgtgaccttgacgctgagcttagatccgtgacctgcgactacctttgatttgtatgtagagtttggcgtgccgacgttggtcaacgttctgttgaaagtcacagtgaaggtgctatcggttcctgacaattttgccgacattgaaggatagttaaggtttctaggcaagattttgtttttcttggagcacttaacggtatcacccgatatgattttaagggtcttcgaagtgtagttcatgccgcagagaaaggcaatgtggtcagctttgtccaattcatagacaagtccaggatttaaagcggctatcgggtcgacatgtccagctccataagcaaactcggtcgatgcgatgccacgtcccctagcttttacgggccaagctgcaaagattagacaaagtgtaaacaaaggttacttgtggcacaagaaactaaaaaattgcattcagttattgcttaccagttgtcatgatggcagattgaatcatggaaggagaccatttagggtaaaacgtcttgacatacgcagccacccctgcaacgtgcggacaagccattgaagttccagagaaaacagagtacttcacacgtctgatgtcatcttcggacggttcaccactaggtgaaaatgcagcaaggatctccactcctggtgctgttatatccggctgcaattcatccaccattgtctctcagaccggagtaataaacagaaccgagagcataaatattttgtatatttttaccttgagaatatcaacagcgatggtgtttggaccacgagaagagaaggaagctataacaagagatgtcctattgaagattgtttccgtttttagaacagccgcttgtggagaactgagaaaacaacacacataaattttaggataaagatggagaatctgaagcagatgtataaagcgtagagactagagaagatgattgtttactcttgggactcaatgtaagagacgagagacttaaagtcttttgcttttaaaccagaggcaggtaaatggtgagtgaatgcaacgtcgggtctaggggatttatcaatgattgcaatagctccaactgatttagctatcttgtaaccactcggaccaccacacactaagatctttcccttcacacggcttttgtttagacacgctggcgcacaaagtctgcaaaaaaaattgagctcattacattgattaattgacactgtcatcatcacaatttagatactgtttagtagggagagatttttacgctgccgttttggcgtcacaagcagatgnnnnnnnnnnnnnnnnnnacactagagggttcttttttcctttcatatcgaacgcattcactgaccttccctgttacgtcaaaggaacagaggattcattgtaaggaagagaaagattaccataaaagagttgtactcgatactcacggcaagtgtcttgctcgttccgagaacaactttggtgataaacccacggatcgtggtgctggctgcaacggtataaatccctggcgcttcatg

SEQ ID NO: 32005 - DNA, 635 bp, Arabidopsis thaliana landsberg
tcctaattatgtaaattggggaagtttccacaactgatccccctaattatcaaaggttttcaaatcgatcgtatatgttttaaaatacagcacttgtgagtgacaaatgccacgtcacattaatctccagtctctcagctttcttagtccaaatggcaaaatccattaaccatcattaccttcaatctccgcggcttttttgctctaccgcgcaacaatggcggtttttagtggcgctactactttaggttctgtttcattcgcctctcatctcttcgaccaacaatccactttcctctcttgcccacttagactccttccttcctcgtcttcttcttcttccaatagaaactctctcgtctgcatagtcaaatccttctcaagctccgccacagcagataccgatagaaactccgatcaatcagcctcttgctcagtcctctccgcttgcaattctcttctccgtgatacctccgacgaagcttcagctgcaggaccaagcgattggaaaacagcaaaagcttattgtaaaagtggtgatacatttgaaggtgaagttcaaggctttaatggtggtggcttacttattcgttgtcattctcttgtggggtttcttccttatccacaattaagtc

SEQ ID NO: 32006 - DNA, 657 bp, Arabidopsis thaliana landsberg
tgatcttctaacattaaatataactataactattcaaatgtgtatctaacaatgattactttagtgggtgcaaatatatcaaattccagcagtgttgaaaatttgttagatttctttattcatatataaataataatatgcccaaaagtttctaatattaattaaagctaaattttcgaaagaaaaaaaaatgttatttgactgcaacgataatgaaaaattaaaaattagttggattgattaactcaattataaacaaaaatacgaccgaaatatcttttattaatcaaaaattcaaaactataacttttgtacatacataataaattattacacgatttagtatgaacatataaaatcacaacgatgattaaaattagttagatttattaatttaaatatttaaaattacgcgcgaaaggcgaaagcttctatataatatcaaaaaattcaaaactatgtaatttctttctatttttctccaaaaatttaaaactcttcaagtcacaataaattcatttatgataaaatcttcaagaaattatattcatagtcttatcttttttgttttcttcattcataggtgtatctactttactcatttatgcatataaaataagaaaatgcagtccttagtacttaatcttcagtttgaaa

SEQ ID NO: 32007 - DNA, 354 bp, Arabidopsis thaliana landsberg
acgaagttatattcctgggcctacatattcctacttatattactcatggtccatttatttcttaccgattatttcaactttattgatacaaaatgtctcaaacattaataacatttaacacttacccaaaaatctgaaacacttagataacgaatgccttaactatttttgacgttacaaacatcttaggatgtcggatgctcaaacacgctgccaggagcaaaaattcttctgaaacaacttgaagtacacaaaggccgggcatcgatggtgacacttataacatatcgggggaggatgaaaactgtcgtactgaattatcattgatgctaaggcgaaataaagggtgaaccc

SEQ ID NO: 32008 - DNA, 1129 bp, Arabidopsis thaliana landsberg
tatgggttctgacaaattgaatctcacgtaaagtacagtattaagttttccgtagacatattttaatgatgagaggtaacaaatgaaataaggacaatttgtttggtgtagaagaagtaagagtcatgtagcacaaaaagattgtctattaaatggtctctgaatttattgggtcggctcgcacatcggcacatgtgatgaccttaccattcttgtctctgcatttaatattctttatccaaataatgatacaagtgaagttggtaacaaaatcgatcgccaatgttttgtaatttctttcctttttccaaaaggatgtcaagttgtcgtgcagccattggctattttgatttgttataattcaagtttagcgtttatcttgcttcgatggaaagacatttaatcaaaattatgatctttgtatcaaggaaatgaattcgtaacacttatgttacgctcttttcaatttgtttccggttcttctaatagaaaagttaaaacgttattttcaaaatgattgtgacactttggattgtatttcagtttcaaatttaaaagcaagactggcacatgatcgatgatacattaaacacacataagctataacagtttgaagtaattctcgtacttttttgtcagaaagatcaaactcgtagaatttatatgttcaaccttttcatttacttcaaagtgaagttctatgttacaattgatttccaaaatgctaactacaaaataaaaataaaagagcttttggatcggcgtaaaagagacagcagagagataaaaaggcaaaatacgaaaaggtgaaaaagctttttgagtcgattccttttgcagggattgcgtgtgatttacagatatttcgtttttttaaaacaaaacataaaacccaacgaatacaaaaaaactcacacgttttcaatagcgcgtgacatacaccgatcaccacctaagctgatcacgagtcagaaaaggcactcaagcaattatcgtacacgcgccactttaaaacgcgtgaacactttttgtctcattactatgactagattcaaactttaatttcgtcatcaaaactttattagttgctacctttttcttttttttcccacattcatctaaacttagt

SEQ ID NO: 32009 - DNA, 717 bp, Arabidopsis thaliana landsberg
tagtcggagaaaaacctgattatgattatttgcattttattttgtacaaatatatacactatggttatatatggtcttaagactatgcacaagtgcaccgactcgtttactgagcggcgatgtataaggttgttggtgtctgttgttttgtgggatttaaagtatattgttgtctacatgatgctagacaagtaatgcctttctgtcttgcaaattgcaatatagaaacttttaaaaatcaagattcgaaaaaattccaaatattggtatatataaatacatggaggagtatactgtaggagatagctaaagacaaagttggttggatatataatggatgaaaaaaggagccaaatgtcgcaaacgattttttgttgataaaagtgttggatcgattggtgccttttaacttctcataatgctataaaattctacgtaaaaacgatcttttttttgtcaacaacatcaaatgctaattattcatgaatatttttttatttttttttgataaactgtttcattcatgaatattttgattttaataacatgcagaatgcgaatttgagtctagttatgtatgaaaaacataacacagactacttgtatgtctcattcactacaatagaaacaaaatacaaagaatttttaagtgttacatattttcaattcatgtcctaattaatagtcgacatttttatatatgaaagatacccacac

SEQ ID NO: 32010 - DNA, 1135 bp, Arabidopsis thaliana landsberg
  unsure (1)..(1135): unsure at all n locations
aataaatcatcctttatgtatattcgattttttaaaataatcaagtatatttaaaataactagcgcacaaaaaaaaaaagaacattgtattttgaaatctgcggtgaaatataaaaatattgttgtataaactttcataatttgtattttcttattaatacattccacttattgaacaataagatggtgaggccagattctcgcaaagcatttccgtttattaacacattcgcctctaaacgggtagttgcattcgcagacaagtacctctatggactatggcgaattcgacgaagccaaagatcatatatttttatgagtcctttctccttcaaaaccgggcctcaagttggtggtcctctactaagctcgcatctcactcctgattggatgcatatgcaaccccacctcgtcaatggcactatcaaaattctcagcttctatctcttatgtttgttgtgagctatagtgtaatgactatattcaatttttaccgtacgaaacagtaaaccgtcagctcttgtgatcgacaaaataacagatcgggtctcctcgcacctatattttaatatgacttgtcttcacgacctcattagatgttggctcgaaggaagaagtactgatcaagattgtttcttttcaacttccattcttctaaaagtctattntgttcttttcaatcttcattcttttaaaagtctatcttttctttcaaacttttgaaattctcttttaattaaaatataaatatctttgttgaagctaaattttacattccaacagaaaaagagaaagttaaactaatagaaatgtacagacggcacttattcccaaaatgtaagttacatttctataataaaactaacaacactgagaaatgagaatgatcttatcaaaaagagaatgataaaaaaaaaaagaaaaaaaaaagagggaatgatcccatcaagttttcggagtattgcttgtacacacttggtctaggaaaaatcttaggaggtgaaatgttacttttgcatttaggcccaattatatcttctgtttttaagaagttctgactagtctgtttatttgtaatctgggctaaactaaatttatttgtaaaagcaaaggtacatttaaaaaaaaaaaaaga

SEQ ID NO: 32011 - DNA, 4809 bp, Arabidopsis thaliana landsberg
  unsure (1)..(4809): unsure at all n locations
gaatcaacacattttaataaaatagttacgagacttgattacactttgttttgttttggttataaaaaaaaaatgatcaggcaatggaaaacctaagttagccgattaaaattaggttggtgggtacaagaaagtatttataaaacgtgatcgaatgagccctcttatttttgtaatttatgttctgacagataacattactttatcaacgcaattattagatgccttaaacaaaaattagtgatctaattatcgaaaccaactttcattatagtgtctatactttaatttatactatccatcattggccccgaaagaccaataaaccttttttctttcacttttgtcaaatttggtagagatgttaaaaaaaaatcagtgtatcgtctgatgatgcactttattatccataaataagctgagaggcttctctcaaaaagcttcatgaaaatcaagattttattcttagggtacctctctctactttgttttactggtagagtgtttcttgctagatcagtcacttcttccaatattcgaatggtcttggtcacaaaaccaagaatctttggttatgaatcaaaaggccgagtaaaagaagccaacctagattttatagttgtggaagttcttttgttatcagaccatgttccaacctaaaccgcaaactagtttgaaggtatcatcaattatttcatacttcagtacctatccattattgagagtcgatatgcaatcaataagatagattccatcgactaggtctcccgtctcgcgcgctaatccgacctttcattcataattaattttcttaagctagttaaatcattcaagtnnnnnnnnnnnnnnnnnnnnnnnnnnnnnnaaaattgaaagcctcacaaagccataaagatacttattaaactacaaaaggaaagagaacacagaggtggcaacattacattaagaggtacatttagttccacttttattaaacctctcataaaacacaaaccacatcaccaagaagatgaacacatcttaagctgggaatgaatacttggcaacagtctccttccacgcaggacggctgctaatatcatcccaccacgcgctcacgtgtttcctatctttgatcatgtaagctttcccaatcggaccaaccaagtaatcagtgaacgggaggtgagccaaatcagccaagctcacgaagtcaccggccaagtacttgctctttgagagatgtgcctcgtagacatcaagaacacccgcaagcttctcttcactctccttgatcagcttctcatcagatgggaatcccatgactgatgcgaacattatgtgaagcgttaagttcaatagcggtgggtggtaagtggtcgcttccacatcaagccattgttcaacttgacctctgtcttcaacggttttccccaaaagatcaggtccttgtgacctgtacttctcagctacgtacctcatcaccgcacgggactctgtcaaaagatcaaaaaccatctcttagcatcactatagatacatacaaccaaaacaaacatgagccaacacaaatcataactatagaacttgacctaaaacagaacttggttgttctgtgacgaaattgaccttattatagaaacaatcaaaacagatactgaaattttcttaaagatcttaccgaagattttgtagtcaccgtcaacaacagcaggaacagtaccaaaaggctgcataggaagaagaatcaagaaaccatcagaatcggagaaaaaaggaagaaatcagagaagatgaaggaagaagaagaagaaggaaggaacctgtagagcgagataagcaggctgcttgtgttctcctttcatgagatcgacggggatggtctcgaaggcaacgcccttctcgatcagtgtgaccaaagctctctttggtgaagcaaagtgaggtccgtacacctttagcaccatttttctttcttctcttttttactcacagtttatggttaagctttgttgagtgaagttttaagagtgtccacgacacaagttttatagagaaagatgggagagagagtgagagagaatcgcgactcgtggcggaacgtggcgttgcgtttccgttgttgattggtggaaaagtgtgttattatcaaatccatacaatcaaaaaaattatgacaaaatttatcagatataactatttcggaaaactaattacataaaatattactggtattgaaaactgattttccaacattaatattacttatcctctttgcatataatttttattttctatattaagaattttaatgttgtatgaaatcaaaatctcaatctgttgaattttatttttttgaatgttgatttttaaaaatgtgacctgaacacttgttagttgttgctttgaaaatgaatattgtcaccattttgtagaacacaaattatttgctactcttgtgtggataatatacaattttgttaccaaataataataacttagatatttctatcttgtcggagttgattggccagagcccacaggtcaatatctatccatgtcacccaccctaacccatctttgggttcaaaactcttgtaagaacgtcgtaatatctggtcaaccgatgaaaataaaacatttagatatttctatctcactcaattagaagtatatgtcatttcattgaagtcgaacaatgcaaatctactttgtatattgaggatacttctacatacaatatttagaatcaaagttttccatgaagttatataagtatcattttttgggttcaaaactagattctaaactcaaacagtcaattagtaaaagaactcattgtttttgacgtttaagaaaaagaactaggtttcgttgaatataataaaaagggatcccataataaaaataaaattgattgatgatgctttgttttttttatgagaaaaggaaaatcaaatgaaggaaagacgtagagaatgaaacaaagatggttagtggtttgaagtgggtaggtggagccaaaataaaacgtgagagaatgagcccatccgtttagctaaccactgaaccacatgcctcaattggttcttttggtaggtgcgtatgactggacttattatttgttgtaagatcgagggtaaatgaaaaaaaaaaaaaaaactaaaaatcatatgatattcaatttactttttgtaaaaacaaatatgatgcatattaattattttataagctgaatacaccaatcataaataataaacaaagtaaagattatctattaggtatttacttcttctaatatgtttttttttttttatatataaagggaagctatacatgaaatgacaaaaattcatgacatgtagagtgtaactattaatgtctattgacgtaacaatagtggattgaaaaacaaattacttttgttttagcttgatgtatactacactaatcagctgaaagaaagaaaaaaaaatccctccaattgagatagtaagagtaaaaacttattttacttaatacaaactgaaaattttaccctagatcctcctaacttttctttattctctttccaacataactattctaaaatttagtcaatcacacacatctctactttactgattagatagtatccgactttagtttctgatttctctattaatatcgttagtcattatctccaattctctcaatcattagtcccttttcaacacacaccgctcgtattttgcatcagttacacgttgaaagtattaaatattggaatattttaataaatagtcatcgtggggatgtagctcagatggtagagcgctcgcttagcatgcgagaggtacggggatcgataccccgcatctccatcttagcattttttaatgtttttaaatgtgtttttactcttaaacaaattctgttagctttgaaaacaatggaagattatgatggagatgtggacatgcggtgataaaagaaagagaacatctttgagtagcaattgtaaattgtgaaatacgttgttatgattttttatttttttaggtaaaatgtgaaaaaatttaagattttattacgatactaaataacttaaaacaatttaatgttgtattttatgaaaagaaatttgtcaaccaaacaaaatggaggatatttggatccggtagtaacgattgatatacagaatttagtggtataaaaactactttttctatttctaattaagtgtaatttaaagggtttttatttttttcaatataagtgttgttttgactttttttatgtaaacattaaatgtatttaatcgtttttaactaattatatttgatatcatatttttttattggttggattagttataattaatgatgtttttatagagaatagataaattaaataagatttatatgttttcttaatttgtgtgcaaaaaccttaaactataaatattcagaaacagagggagtattaaacgggtattaagatgaacttaaatgatatttggatagtctatatataatcgataaccttttatttaaaaattattttgcatcctttttttctgtttatccaacttctgtttgttaagagttaatactaatgttgtaagttttaacttaagaaaatacagtataactagagattgtttgatcattagctatttgttaaaaaaaaacttgcctgttcataatgtattagatgggcaacctcgcgataagagctacaaatgatacaggctncgataangntcttctccgtagggaagggtcttgtctcgagaggagaaggtcaccgctctttgntttgtctgggcntatttttcttaagttt

SEQ ID NO: 32012 - DNA, 3879 bp, Arabidopsis thaliana landsberg
  unsure (1)..(3879): unsure at all n locations
atattgaatgcctgtaacagctgtcatcaaactcaaacttctgttccttgcacagcaactgagtgattggtctagcgatcttggaaaaatctttaatgaacctcttgtagaaacccgcgtgtcccaagaagctcctgattcctttcactgaatttggcgactgcatactcatcatcacatcaatcttagcactgtcaacctcaatacccttttctgaaatcttgtacccgagcacaataccatccctcaccatgaaatgacatttctcccagttcaagaccaagtgtttgtcctcgcagcgccgaagtaccctggacaagttagacaaacaagtagcgaaagacgagccatgcacagaaaaatcaaccataaaatccttaatcatgtcactaaagatagacattctggagaatagcgctacattcatgactgatcaacacagctccttcttcaagggtccttttgttagtcaaaatgctcttcaaatgtttccggcagatagaaacattctcaactaactcaagaaatggaagttgtacatggcgctgcctcataatctcatcaaacagagcatacttcttttctctctgtatcttcctctggcgactcggaaaaggcaacttaggcacatatggtggtagcacagtcttttcaaccttctccttctcagggaaagttttctcagcttctactccttcaaccaatggctcaacatcagactccttcccagtattatcctcttctaagtcatcagatacagcattagatttctccttagccttctccttcttcagaattggattaagttctctgccactcctcagggagatgaattgaacatactctttaccactgtagtctttcgggttcgtgattggtttagccggaagaacccttgtttgtcatgtagaagcagaaactgtctgagctacttgattctcaagtgtcttaacatgtgaagctaatgtctcaaatttcccatgaagatcgtttttcatgccatcaaccttcatgttgatatcagcagcattctttttctggccctcaagaaattgctgcatcatcatcttcatctcattgtctcctgaagaagatgcagaattagcgcttggaggtgcttggtaacttccctggaagttgttaaactgaggtttttgctgaaaaccttcctgattatacccacaataacttgttatgtccggtttctttgggcctaaaaatttaatagtcctaatccgccccataccgtatttagattatgcaaagcccactatttaagagcccgcattaacaccccttggcacattgtatattatccaaatattgtttcgagatgattaaactttccaaagtttgtatacaaaactttattattatttaagtgaattttcttttcttttaatataatttatttttgttcatggtactcctgaatttggacataatgcatatattctacaaatatccacaattagaaaagaactaaaattatcggcgcatacatggaggagggggttaaataatctgggtgctagccggaagcaacaaatccgatctaaagaacggcgaatacaaagtccactgctttgcgatcatgtcaacgtattgaaatcatagaccgaataaccacctgaccaagacaatataatcgtaaagatttggaagaagattgtatatttaaacgtaaataccaggggttaagttttaaccgtagttagaacttttgttagtaaagataacagtcattaactcgaaaattcaattttatcaaaagttttaaatagcatctaaagttaaacgaggtattttttcaaatttaaaactaaaaatattaaacggtcaaataaaaattagataacaattttcgaagttttttttaaaaagaaagacatattcttataaatatgattcgtaacggtagattgcgtagatcgtaaagaatttgatttatctttttaaaataacgatagtttggtttcgccaaattttacagaaacttgattttttctttttttttttttttttaaattgtgactttgacacatgacacaaatacaattgataaaataatttatgatttataagataaatgattgataaaggataagattaaggatcaaggatgtaaagttttgaacaacctaaaaaatacaatgtatctttatttggaaaaacaaaatcagcgtatttatcgttaatttcccacaatagaaaaaaaaatatttacgtttagttttagcaaaattttgagaaagagacaactgaagcaccaaccgacacaagtttggatctcaaattgtgtctgcgaccgcgttgtttctaacactttgagcaaggtaagtcctactttccggtttttattcgatttgactttagatgtctttggtttagttgtattgacaaatgtatggattcctttacgcaaatttgtgttatggtttgattgatatggcatcaaatttatggatccgttgtactgggtttggagaataaagatagaatctttgagatctcttgccaatttatggctttatgcttaagaaaaatcgaaactttgaaaaagttcggtagagtgggattgttttaggaacttgggagaggtttatgttttgtcttaatcaaagcttgacactggttatgtgtgatgaagtttatgttttgtcttaatcaaagcttacccttttaatctcttttcatgattnnnnnnnnnnnnnnnnnnnnnnnnnnnnnnnnnnnnnnnnnnnnnnnnnnnnnncaagcttgtcatgcagataggaaaaagaagaggtttaatatacagttattagaaacattaaagtttcttttgtgtgttttgtagaacaaggagatgatgcggtacaaagaggtattattactttctgatttctagtttgtttcttcactagattaggtgatgcaccgttatgtgttctttgaacttctttttgtgtgtgtctacatgaatcaggagaaagaggtaaagaaggaagctttcaggaagtatttggagtcaagtggagttcttgattctcttactaaaggtataatcttacttcacctattgcaacagtttttaattgaatagttttgattctctttatactcttttgtatgttgtggaacatgacgaggttttgattttgaattgtagttctggtttctctgtatgagcagaatgacaagccttcctctgctctagagtaagtttctggatcttgactgttattcattagtttctagctgagtattattatagattttgtatagaaactattttgtgtattgacttataatcttttctttcatggactacatataccaagaaattgatagttgtgtctcctatgtcgatctttagttaacagatcttcaagttgaagttcacgaatgcaacttttacaaaatttgttacgtattaggctaactgtttacgtgtttgtctatcaagttggttatgtaagattttgcattctcctctatgtgatttcttagttttggtttttggaaatctcagctcttcaggttataacgttactcgattttccggtggttttcttcagattcattcaacaaaagctaggtggtccatcagtctctgactatgagaagcttcaagctgagaagtctgatcttcaaataaagtacaatgagcttttggctaaacatcaggaaaccctgagagaggtatcaattagagtcgttgaaccatctatagttgttgattaacacattagttgtctcatgaaaacaagagtgtttaaatctgtttaacacattctatatatggttaatgtttgcagttaaatgaagtgaagagcttgcattaaaaaaactcttcaaaagatgaagcagacagagagacccttaagcgaacaccga

SEQ ID NO: 32013 - DNA, 1700 bp, Arabidopsis thaliana landsberg
  unsure (1)..(1700): unsure at all n locations
cgtgtttttgactataagaaagaagaaggagcaggcaagctcgacattaattgggaaggaccttacaatgttatcgaagtggttcagaatggtgtttacaggttaaaagatctagaagacaggccagtccaacgtccttggaatgtggtgaatttaaagaagttttatgtttaaggaacacgcgttttttgttatgtacatnnnnnnnnnnnnnnnnnnnnnnnnnnnnnnnnnnnnnnnnnnnnnnnnnnnnnnnnnagctactaataaaaaaaatttcttcattaaaagggaaaggagttcgactgtgcgaacaaataaagcaaggttaagtttgattgtgcgaacattcaaatacaggaaacaaaactacacttatttaagcagtaagcaaagaagacggagtcttaacacgcgcacacttcgaattaagaaactcttctcgatttgcaaaacacttggagtccttaaccagcgaggtcaaggatcggcatcatacagtccggtatgcgagcgaactcggagattccaagctcgatccaatctccgaggtgggagttcagggtgtgaagttcccttgatatcgcggtgaccctgcgtaacattcggttaatctttttgcagattttcctcctctccaaagtacgcttctggtgctgaacagcaagagttttgatgaatgtcatcgcgatttcttgatctctatccgaaagtcccttgatcagtgcacatggagctcagatttgggacctgaagaagccacgaggtggagaaggccctcttctcggcacgtttgggatgtcttcgttcatcatcccgaccctggaaaagtctggcatagattccgaacatcgaaggttaaactccatagctgcaaaaagaaaagaaagtttagataaaaaaaaatgaagagaacttggagttgcaatttatagggattttgtaacccttgaagatcgcaattccattcgggatcagagtgattcgcggaaaaatggccttccagtctgccctgcatttaaaacaaatctccaaaacagatatttcgaaatcaagaaaatagaaaagttccatggattaaaaatgggccggagcccataacgagttcaaaagaaaataaaaaataagctttttaatttttgggacatttattgaagaggctccggaacagcctccttcatcgtcggttcagtgttagaagttgatagtaggattttactcaattaatcctaaaacactatcatgtcgttgtagtattttaggttgtcaatccagtccggtgtgatgcaaacatatgagatatgattagaaagctctaagtcaagccaagcagagagttggttggtattaacagtcctattatgcaataacagaaatgaaatgaaactaaaagcagaaatggcaataacaggtaggtgaataacaaagcagaaatgataacaagcaatcaaatggataaacgattcctaaggatggggtaatcgaatagtgtcgcctcctaaatatattcaggcggttgacaaaacttcacagaagctatccctagacaacaagttcaacaacagattaattcactcctgtgatagaaatcctcaagccaagcttagacactgatctaattctcattagcgatctctaactaagtaggcaatttcgaataaaattgttaaagccaaatccatcttttcaagccaatccct

SEQ ID NO: 32014 - DNA, 1014 bp, Arabidopsis thaliana landsberg
  unsure (1)..(1014): unsure at all n locations
gagggaaaacattttattaaaataacagtgtgttttccattagctattttcagatttttatccttttatttgactcatttgtagtttatgttaaagttctaattggtctaattttagggatttgaagaaacaaaatcttttatttctgttttgtaaaggaaattagcataatgatataaaaaatagaaattgactttgactgaaattttaaataatataatggtgaaatgaaaataggtaaaaacatttatttgacttctataataggaatggtagtataataattaagaaagaatcattatattatgcaaaatctatgaactgtcatgtaacctacttattgttttggtcaaatcatgtagcagtttgtggtgatttgattttttctttattctaaggattggtttcttaattattattccaccatcctattatagaattttaccattaaagaaacaatcttaagaaaagagaaaaaatataatcacattaagtgctacatggtttgaccaaaaataagtaggttacatgaatgtccatagattttgtagaatcgaaaatttctttcttaataattattctaccatcctattagagaagtcaaaattttttttccatgttcttcatttgaccattataatatataaatttttagtcaaagtcaatttctatttgtatttcatttgctaatttactttacaaaaagaaataaaagattttgtttctacaaatccaaaatttataccaattagagctttaacataaaatagaaaaacagtcaaataaaaagataaggatctgaaaacaactaattgaaaacaaactaccatatgaatattttttttttcccttttttgaactttgagcctattatttaagaagtgagtatggaaacacctctcaaattccatactcacttcaacttttgctttctggtatcttctctagttaaatacctcatatattcctnctaaagttgcttcattattctctaacccttagttctttaaactc

SEQ ID NO: 32015 - DNA, 337 bp, Arabidopsis thaliana landsberg
gcatctaggaaccgacccggaaaagcctcccagctggtatacttttgagaacctatataattcattactagttttacataaaagtaaatcattccggatatatttagtccacaaatttacttatatagtaaaatgttgattagggctcacaatcacaagaaggggatgaggaagagacgagagatcttagaagccgtgggctatgtctagtgccgttatcatgcatgacttatgttaccggagatggtggggatggaggaggcggtgttggtactggtttttggccaacgccacctggttttggtggcggaacttagccgtggacttaacaaaccgt

SEQ ID NO: 32016 - DNA, 1028 bp, Arabidopsis thaliana landsberg
ccaatgttatcttagcaaattgaatacaaaaatactattattagtttttacaaacgtccttttaatcttatagtatatcgattatcgaataagctctaactttgatcacgatctatatccgacgttgttgccactttgtgctagcactaatcaagactcaagagcttcattgtttgtatagtttctagggaaaaaaaagtgagaaattttaagggttgtaataagacagaaaaagcagaagttgcgtctttgtccgagtctgacgaattctgaaatgtcacggacaataacccatacacgctacgaatctcaagcattcccccacttctttctatctaaacacagtactaccaattatttttcttctagtaatatatagtatacacacatacttccaaatataaaaatatttggttaagctaaatattggaaaaattttagtaacatacactgtttgaaaattcccaacacgaaacgatgctaaaggaaacaaaaaaaggagggatcaaattttgtcaaaaaatgaagaaaataggaaacccagttttactatttgcaaaaagtaacattttgaccaagatgaaaaaacaaatattcctgctgctttctctagaatactgtgggttgattaaaacatcatgcacaaagttaaacagttttggatgattctcttattgaaatctgtatatgtggatgtgatgttttttattgcataattgataagtctatttaatatttatatattacaattacatgtttctatgcttatgaatgtgtttatgcattcatgaggatattgcgccttcccattaaaagggttggattattacctctaaagaaaatttggcctataacaaatttaactttgaaccacaataattacaccaattacattttcaggatttatcaatcacattgactatacctacacttttactgccctacatggttgttagacccatgtatcccttgacttttttcacccattttcatccacataagatattttttttcaattttagaaccct

SEQ ID NO: 32017 - DNA, 948 bp, Arabidopsis thaliana landsberg
aagcctttaaactacacttaattagaaccagagagagtaggttaatcattaatgtatattaatgggcttaattatgttatattttatacattaattaggttataattatgttaatgtataattaagcccattaatatacattaacctattattttatcctttttgtaatctaaaacagtttccgcttcttctaatcgtcttctttgtttttttttttctaatcattaattgtgagtttatgagttgtgtgagattataatcaagtaatcaacaaagacttaagattggaattccaggtacttttctatttttgttttggtatattaaatctaatattgaaagaagttgtgcttgatttgagttttgttactaattcttgccgatgttatcatgttaatcgtctattaaattggtagtttagtactagcaatagactaatagtaatcttagtagtctcgtacaagtaaggaattatatattgatttactgattttggttagtaagatgatacggacatacggtctacgtatgtatgatgaaagtagttctccacaaattgtgggcggaaataaaaattatgtggttttggaagatttttttttttgactccgatggattaatacggtggttccgccactggataatcaagtaattagtttaatctgtatatacattatcgcaaatgcaaagacaattggaaaaataatcaaactcaacgtaaaagaaagaaatttattttgatacaatttttaagctcgtttttttttccaatttttcttttcattttcttttagtttttttaatattcaacttttaaccatgtaattgtatttttctttgttgatcaataaattttatatttcagcaacaaaatagtacataaattattactacgattattgagatggaaaaacatatgagatatgacatttctttttacatttatcg

SEQ ID NO: 32018 - DNA, 997 bp, Arabidopsis thaliana landsberg
gtttgtagctcaagtgtcttcgttcaatttttttggcatgcttattcattgttttcatttatttttatcgtcgttgataacaatgttccataatttggtttagatagtcgtctatcttgtggcacaaagtcactaatatttttccatgagcgtattcagatccaagaaatttcccaaatgtattgggaggactattaatagatgataagttcttgtgattgtcacgatcctatccatgagatcaaaaccaattggagccgctaagaagactgtcttggtggtatgcaattatttaacctttaaattctatgtgtctttgaaaaccaattgacaatcagtggattgtgacttgtgagaataaacctcttctagtgatttatcctcaaaaattatattataggctggaataattttgagcatgatccataaaaaactaaaaataaacacacttatggaaaaagttattgttacaagtttcgtaaaaatattaccattaatttagagattatttttacccgcaaatcaattatattatatcataagatttttatttgattttatgaccaaaatatgtgtgtctataaaaaaatttaggtatggaaagtatttgcgtaaatatacgaacaagttagtattgataaatatgaaaaattcaaactaatgaaacttgtcactgaagtcgccacgtgatagtgaagaaattttgtaggttttctacgatcgtgaaagctctacaaaattcacctccgtctaccaaaacataaaaaaaattcaaaagagctaaagagtttgattggtcattgatatatgcattttttcagaaaaacaaaaaatcgttgaaagatgcaatgatataaatattagttactacactatgatgtcgaataagaaaaggaactatttactacattactaataacgtctcgagtctcgactaagctctcatcctttagacacatttagcactccatttagctctgctacgaacgtctccatc

SEQ ID NO: 32019 - DNA, 5860 bp, Arabidopsis thaliana landsberg
  unsure (1)..(5860): unsure at all n locations
tgcttttacatatctgccaccgttatcttcctcaacctatcagtaatatcatttttatcctccttgcacaaacgacaaatcataaaagtgaggatcttttcacgtgtaatatctccaagatgttgacagtcaatggccaatgttgcactttcatattatatgtcaccacaaaaatacagttctaagagaagctgcccatcaattttctgttttctaattttagtaatgaaagaagtcgagagataattaacgccaacataactaaaccaacttactttgttttgcctttcagcaacgggcatgtcattattggtgtcttaatgtttgctgcagctgtcatcaaaatctcttgtaaacgtggaattccaagtgtcacattcatctctccacgtccagcaagatggaaagtattcaacctgttaattgacagaacaaaggattttatatgcaaatatttcaggaaagatgcaaaagcaaaggcaaaagctgcaagcatcctcatattactcagagatttaagatttataaatatgagtaccaatgtgattcagttcctaatttgcacggtgaaagaattagcaagcccacaacataaaaaaggaaaaaaaaaactcacgtcatctgtgttgatggctctcctacagattgagcagcaagtacacctacaggctcccctggctgcgcaagacttgcaaagaattttgacttcaccagcttcagtagttcttcttgtctcacaaatttagaagcaatacgttcattcataggcattgcctctacaaacttctcagctcccttcttaagactaataggcagatcactgatgtaactactagctccagatagcatgtcttcactgcatttttgaaggaccatatcttgattctgaaccaaagtaagttaaaataaccacataagtttcccaagagcagataaagaaaaggtaaactgtcaaaaacgaaggcttactattgtcagttctttgaacttttcaatgaagctagaccgatgaacatccacaccatcttcaccatattggaactgaatgatggacccatcagcatcccggacagtacaatcatagttgactttaagactctcaagatttttcatcaagcatctttgcagatacccactacgcgatgtcttcactgcagtatcaactaacctgcagaccagaatttttaagtgttcacaatgcgacgaaataaagataacaaaccagctgatgctgaccgactcttaacaaaattttcgtaaggattacaacagaaaacctcaaccaagtaaaagtttaacacaaaaaccagatatatcaaagtgaatgcccacacatcaatttgcaatgcgacagcatccttcaaagaatagcatatcttttgaaagtcgaagagtagaaaatttgacagctccactatcagaaaagaagtttgaaacaccttctatcttaaaagtaattaacatataatttatgtaggataagtattagttacccttctcgtccagccatgcaatggaagtaatattcttgggggcgaagaccacttaggaatctgtcactaataaatcccccagctctaggggaccagtcccatggatggaaacaaggtaatgtcttcccagaaaccattcggggaactctttttccttctaaatcttgctggccaaggtgtgaagagatttgctggaagttaacctgctcaaagtagacaacaaaagaatgaaatgataaagcttcgcctcccaaaaattgtaatttactctccacaaaactatatccctataatatatgatgtttagagctagcaactccacctagttgaatgcagagaaagttgtaaaatttactttcagagctaataggcttcattggaaaaacaacaaaagtaaatctatatcaaattgataataataagttatctatattttcaaaaaccaacttgtttatctccttccctaaatattaaaagttatagcttggaaaagttggcatgagctaaaaaatctgcagaaggatgacaagatgggttctaagaacacagaagctacaaaccgacttctagatactgaaaatgcgtacttaaactatcaacaacaccgtgcatattgaaggaggcaccacaaactcaccttactgcccttagccccagatatcgtcattagcgatatacaattccttccaggtgtttttagtaacccatcagacagtaaatcgttcatcacacccttgcttgaacactggttgagataatttacgatgctcctgtccaaagatgccaaagcagattccccgtcctcataaagaattcgttctattctggatctcatgtcctgaggatctgcaggcaagacagtatatatatcaagtttatttgataaactacaatttcaatgcctcatactataacagagggacatccgtgctccagaatgtaacaaatgaccatggtggcaagtctgaacacattaatgcaatacatactttccagcaagatatacatacctatctgaacatcaacatctatgccaaaggttttacggagtactctttcaccaacattatcacattcttgaagttgcttcgtcctctcttcatccatatctataaaaataataagaacatcaacgccacaggtgaaaccgtgggtctgaaagttgtaaaaacaaggattcaggatgcaaaactctgtaacaaatgacaataacattatcaacaacacgagagcacacctgaagaaagactgtaaagagacgactaaaaacagagagcagatttcctgcagcatttgaaccataaagctcatgcactgtatgaaccagcccatagtcagcaaactgagccttgtcgatcacaccgcagacgaattcattttttctgatgtgcaatttatcttcattaagattctgtttccatgactcgtcaatctctttctttttggtcaaatctccactgttaggttttacttctctagatctacatttgaagaaatcaactggaagtttggtagctttctctacggtgaaaggcgggtgacctttgnnnnnnnnnnnnnnnnnnnnnntgatgacctagcagagacgaataaccagaactcagctcatgagaagtaaaagcatttagtgaacccattgatgactccctagatacagtttgtataccaaaagcacatagccacatgtggaaaaaccaacttatataagaactaagataacaaaacagagcatacaaagattacctgcttcccagtccaaagaggcactggcttcaaaatagcaggcgtgactgtcaacagttctgcatcagaagctgataccatgactttcttgccagatcttccagaaaaagtactgagtaccatgtcagtgacaccggaactgaagagaagctgattaaaatgatctttgtccaaaaatgtgtccgttttagtaagcaaaacggaactgacaatatgatcctattaagaaaatacaaagtcaataaatatcactggtaaacaacccaattcgtgaaatcaagacaatgataaaagcaaactaaaggtttgaagaaatagcatggaagttaaacctgaattaaagctcgaagtggctcgccattagaaggcctagcatattggttgttagcattgacaatattgtaggcctcagcacgtgaaatctcatcttgtggaaaatgcacattcatctcatcaccatcaaaatctgcattgtatgtactgcaaccaaagcaatattttaagccacttttgagataaaagtcaaatgcatgtggaaaataaaccgagacatggtaaaggtccacaaatgtaaatttgaaaggagattgcaaacaaggtaaataatgacatctgggagatccggcattctctatatccacaggagtctacctgcaatttgcatagtggagacgaagtgttttctcccccttcagaacacggaccttgtgcgccattaagctaggtttatgtaatgttggctgccagtgaaaaaaaatagttgagaacataaatttaacatttagcacagacaaaaaggtgtacaccaaacaatgcctgagtccgtattaaatactgaagaaagaaatgaaaaaacgtcctgggaaacccacttcgcaaaatttgagaaacattttatataggcaacattgatgaaataaaacaatatgtgtccacacctgacgattcacaaggacgatgtcaccatctcgcatatgtcgatggacagttttaccttcaaagttgatatcacaagttttcccaagttctgtagtggctcctcgtgaggacagtaattttcttgcaattgcccttcgtgctttttcggtagagggcaacttcattgtagatgatttgtcagagtaatgtgtagctccaggatgaatgtcaggaccattaatgatagcttcccttaacttctccacattccaaggagtcaccctctgcagcaatacatttaactttcacttccggaaaaacaaacataaggctccactataggttggacaagtatctttgtaaatctaaggatagctacaagtcatctccaccaaaagaggaaaatgatgcaaaatctgaaaagaataacccaacattttctccatctaagagtgttgggacgtgtgatttaacagccaaagataatgatgtgtcaagagtgcaatttaccgacatatgacatcatacctcgggatacgtcaatttcaaagcaaaacaaggaggaattccgatgtcattaacagcgatataaggatctggagatatcacagatctgcacgcatgattcactctctttcccatcattttttgccgaaatagcccctctttcttctccagcaattgacatattccagagctgtctctctggctttgaactgcaaaggaaattagcgataatagtcggtctacaccaatacaagatgctctaaagaggctgtcaagtcaacaagacaacagataaaaaagtggggtagccggttgctatacataactagagaaaactaaggaagctctttagtaatagatacatatcaaacaatggcaagaagctaacctgtggcagttttgctatcaaacaagacattgactgattcttgaagattcctccatctgaaaattaccttcgactgatctaatttgttagtacaggcattcccgagtatattattggattctatgaccttatttagtcctacggtttgaggatgttccataacctgaaagaaacaaaatcgtaagagaattatgatcatacatgagttaatgggaacaaccatctgttagtataggagatataaaactggaaaaggaagatcgagagaacatggacagaaagtgacgcacagaggtaatgccaaaagttacaaaattaaaagtaactccaaaaattagagaggatatagaagcatcaaaacattataatttgtagggaattacttacactatcacctcctgttgttggaggtctaaatttagtagggggcacaagaacactctccaaaaaaaacatagagtagtcaattttttcagacccactctgccaaagatcaccaatgaaggagcaaaactcgtgctcattctgccacagatgttttaagatattcctgacctgatacaagtgaataatagcaagacactattacaaatttggaaaattttaaccgtgccttattataaagttaggccatattagaaacaaacctcactcggtaaaaggtctcttttagaattatgctcttcaaactctgcagctacttccgtggacttttctcttgtctctttatcaacatcttcaacttctgataatgcatcaatgccactatcatcaaagccatctggattttcaacactgctagtgggcttct

SEQ ID NO: 32020 - DNA, 1065 bp, Arabidopsis thaliana landsberg
  unsure (1)..(1065): unsure at all n locations
ttaattaattaagacttgtagtcttcccgttcacaggtttttttttctttttctaaaaataattggtacaatataattagctatatatgcatgcatgcacgtaaatcgaaatagacgcattcacctcttaagtctggtccgaaaaaattgtgtgcataaagccctggttacaaaattgttacttccgttatctaccatgaccagcgaatgtcgtcgtggcgatggagaaaaattggtctgagtcagcagtggtaatatataaaggaagagaaatttcataggttttaaagaaagtcaaattgaaaattttattgggctattgaattaggcctctagtcccaagtccaacagtggtctgtgaaatttgacctcctccactatctgatcgttaaaatcgaataaataaattttaacaactaatacatactattcgtaaagaccaatgcaatcattataatataagaagtttttgtttaccaaaaatataagaaaatttgctaattcaattgagtttcacgtacaattttttcgaaaatttctatgattgaactatatagcgattgttaactagagtctttttatgtccaagtatacaccatccagaaaagaatgcaggattagagccattttgttttgtattctctgatatttttgggatcagacccaacccagattttgtaatgatcaccaaaccaaaaatattttttctcttcatcaaaattttctctcattttttaaaacattatttaatcataatgtatgatcttcatatccaaattcgaaccaatattaattattttggatatggtctagatcgatatatagcaaaccacaattcccaattactaaccttacgatatgaatcctctaccatgagattcaaatctttcttctaaatcaacggtgtagaaccactcgtagagaaaatataatttagagacatatccatcagtttgtccgcgctttagcgttacacatgttgaagacatggngcgtttttcataattgggacacgaaaagngaattatttacaactttttttcagatctacctcataaattaaat

SEQ ID NO: 32021 - DNA, 1158 bp, Arabidopsis thaliana landsberg
  unsure (1)..(1158): unsure at all n locations
tttctttgaccaatattcacttatgtatggacactcacattattatataacatttagtcattcttaaactattctcttgtgtatgtacacgttcaaacaaatttataatggacactctattaaggaaacacatcattgtcataacatgatacaagataatgagatctaaaattcctcaattaatagtaaatagtaaccacattattgatcttgtcttgtataaacattgagctttatgatggtgctaagaatttgatcgagttggactccaatgttaatgttgaatgagcaaacaaaaaagtgttaattttatcgagctataaacacattcgcagcaaatcaaagacatacttgtccattaatgaatgtccaagaagtccagtccatatggttatctagtgactcacatggtagtttcatactaatacataagtttatacatgaacaagaaactatccaagcagtctagtccatatggtcatctaatgactcacatggtcgtttcatactaatacataagtttatacgaggaacaataaacgtcaatccaaagtacattatccattatgaccatttatccacatgtgtatagacagttaagtaacaatgatatgtaaccaagtttcttgatgtgcatctcaggtctcaaagtatactctaacactttacaagtagccatccacaagcgaccatttcgtgttgaccatatatagttatacttgtacggatcaattacaaattgaagaatagttatgatttataaggataaccaaaacccaaaattattaaacttaaatggacaccatcaattgaaaaaaagagattgaaaaaatagttttttgagttaatagtcgatggaaactattttgggtacaaaagaggaaaccaacatacaaaaatggtcaccaaacctgnnnnnnnnnnnnnnnnnnnnnnnnnnnnnnaaatggataccacaacattggaaatagaagcatataatgaattttttggtgttcaattaatctatattggatcatacacttgaaatggttcatttgatatgaatactttggctttgacgagacgttaaatactcaaaaagccatattaatttgacaacaaacttagagaccaagttcaagtaaagtacgagaggaaggtaaagagaaacgtgtt

SEQ ID NO: 32022 - DNA, 806 bp, Arabidopsis thaliana landsberg
caggctaaccggggtatcccggtaaatcaaattcttgattttatttacattttcctttggtttaaaccggtattgtcggaggtgtcaattcctgcaccaacaagtgctattggctcgaaggatcgggatgggatatggtgagactaaatcactaccttccagttaatataatacaaaggttgtttgcggtagtgtcgtgcgagctgtgacaggcataggcgataagttgtcttggcaaggattcctaatggcaagttttcggtacggtagacatattctttattaatagcagataaggaacaatgatcatgtatggcaaattactacaaatagatttggaatgtgttagcaccggagagagtgggtgtttttctctggctggttagccatcaagtactaatgacgaatgtagaacgttttagacgtcatattagggaaacaatgattcatttgttgagagaccttgatggatggtatttggaggaggttggtgcctcaacgacgtctaccatgcatttttttactaaatctcttttggaatggttgtttgaaagtctaggtaccggaggaagcacaagcgaggaaggttggcctacattgttcagtatggcagttttggtggagttggaagtggcggtgtagtgatgtttttggtgaaagacgaacacaccgagtataaagtgggttaaacttactacctttggtcgtggccacccagggctcacaactgcttgagggtgaaccggtatgggaagggattatggctaggagggttcgcgctaaacatgggtctatgctcaacgcag

SEQ ID NO: 32023 - DNA, 934 bp, Arabidopsis thaliana landsberg
agcaagaaatattaaataatgattatgatttccttgacctataacgatggaagttgaattttattaatgtcaacgtcacccatttttaaaaaaaatcatagaaatgcatattgtttattttttattattatttaattgcaaatttgcaatcgtgaaggactcaaaagccgtatataaacgaattatgtaaattactaataacatttttggaaaaaatgtgaatattcaggatataaaaatagtgtgagactcgagtcagtgttcgtccaagaatgacacgtgtctgcaaacgcgttgacttcgtaggcctaattaaaacgcttatgaaattgccaataaacacacacgggaaaatagtaacatcaaaacattgcatggagaagagtttaaggtttgtgaaggaatttgagaattttcttccttactttttttttttcctgaaattaaaatttgttttcttccttcaattttgatgaagaagaaaacacataaacgttgcaaaacgacactatacatgttgacttttggtaggcgtaaatgattcgttttactggcaaattatgaaaagttagggctttttaataacattttttaatgatccgacacaataataattttgcatgatgattagaaataagaagacttgaccttatagataggttggttacatatgttttcacagaagtagtactcccaaacatagccttgcgagatatgtagccaacaaagtaatatatgtatttggtaacgtgacccaaagaatcttaaaaagcgtataatcttattaaattccacgattggtgaattaaaatgaaggaagcataatgtagggttacaatgatcatatgtgtgtttatgagactggaactggtcgtttggaaagagcaagggatgagaaaacggataaaacggcaagagagatgaatgcgagagt

SEQ ID NO: 32024 - DNA, 4082 bp, Arabidopsis thaliana landsberg
  unsure (1)..(4082): unsure at all n locations
taccggtttaaaattccgcttgtctcctgaagcaaaaaaggcgttgttcgagtggtttgttgctgaagtgaagttcctagatagatatgtgtcaaacttttcaagatgcgtaaagcaagggcaaaagtcttctggtatgaaaagtcataattgtcatgtattcatgcaacgattactgccatttgtgttagtagagttgatacgagcaaatattcatgaagcaattgtaggtaagatatatatatttatatacatactatatatattcttttactcaattattacttgacgactattaacttacattaaataaatacatgataggcatcagagtatttttaagggacctatgtacaagaacattgacaatagataccatcgaacaattagacaagaatatcccaatgttgctctgtaacttggagaaattatttcccctggcttttttgacgtgatgaaacatttgctaattcattttccaaatgaagctgctcttgatggannnnnnnnnnnnnnnnnnatgtatccttttgagcgattcatgaaatctcttaaagaaaggcaaaaaaccttgctagagttgagggatcgatagtcgcaggaagtttaaccgaggaaacgtttcacttcacgtcgtattactttaatccaagcgttagaactaaaatgactcatcctcgacgatatgaagatcgaggtgttgcatctacatataacgttcctgctgttctagataccttttcccaaataggtagacttgcagggaaattgaaagaagtttggtgggacgaccatgcgctttctcgagcagctcacaattacatacttcgaaatattgattacattcaataatttgagaggtataaagccattcagttttattcaaaagttttttatatataataattactgtgatactaatgaaggaagctaagcatctatgttttaatttgtaggttatttgattcacaactccgtgaagtatgtcctgaattagaagaaaaagaatatgaaacttacaaagatcgtgattttgctggatggttaaaatacgggaaaaatgtcaaaaaaatcactaactttcaaatttgggacgatttaatcttgaacatcacgaaagacacataaatcgtaaagtttttgttgactttcgaaataaatgacaaagttattgttgacttgccatttcagtcatgtcgttaaataggttatcaaaaatattttacggcgttaatgtctcgtttattttctctattaaaaaaaaacgatgtcatctacttcaacttccttcttctgttttctctttttttgttcgatttgatttgggctgaggaacattgtttgtctcctcaccagatgggattcaaatcgattcggcctctataggatttgagataatgaaatcgatttggggatttagggtttaaatttgtttcaacagacaaaacgacgtcgtttgtctctgtaataaacgacattgttttgttctaacagagcagataaacggaacattaacgtcgtaaaaaattctattaacctatttaacaacatgattcaaatggaaagtcaacaaaaactttgtcatttatttagaaagtcaacaaaaactttacgatttatttgtcttctatgaagttcaagattaaatcgtcccaaatttaaaaattggtgatttttttgacattttcccgttaaaatactatgtaagtataagaataattggaaaattcgtttacttatttacttataaaaaatgataattaaacttaacattttctttgtctaggttacaaatggatgtggaaacgaaccattaccactttggttgcatgagctcgttcaagaaccaagatctaagatcacaactgctccgatgtacttcactcgcggctatactttccatacgtatccatatggaagtcgaagggcaactgcaaattatggaatccatgtggaaggtgaaactgagttttatgggattctacaacaaattctagaagtcgaatatccgagacttttgaatttgaaatgcgtccttttcaagtgtgattggtttgatccggtgataggtcgaggggtacgagtaaataacttaggcgtgttcgatgtcaatgcaaacaagaattatgccaagttcgaaccatttattctagcatcacaagcagagcaagtaagctttctaccttatccgcgtgtgaggtcacggcgtgaagtgtggttatcagttattaaagttaattcgcgaggtcgtatagtcggcctagttgatgatgttgttatgcaacaagatagtgtccgagaagtttctataccagacataacaaaagaagatgttatccacgttgatctactgaacagagaattcgaagatatcactcatgaaggttctgaagaagaagaaccatcagatgaattcgacgaatctgatgaagacattgagtcagaaaacgattgtaatgattcagaaaatgaatcagaataaatgttattatatatatattgtttactttgaatgtttttaccaaatatattataaataaacgaataaattcattaaatgattttaaaaattgaaagttataatttcttaattttaaagttattattttcaaaatatttttattttattttatttaaaacatattcctaggaaatccatagcaattcgcgatggatttacaacaactaatcgagaattccttgcaaagtggtcgcaatttgcgaagaatttgcgagggttctcgcaattccctcgcaaattatgcctcgaaaccctaattctatttttgcaaggaatttgcgagggtcctcgtaactccctcgcaaagtaagcctcgaaaccctaattctatttttgcaaggtatttgcgaggaccctcgcaactctctcgcaaatagagccgcgaaaccctaattctatttttgcaaggaatttgcgaggacactcgcaactccctcgcaaattaaaccgcgaaatcctaatggagtaaccctaattttgcgaggaatttgcgagggtcgttgcaattccctcgcactataagccgcgaaaccctaattctaactttgcgaggaatttgcgggggtcctcgcaattccctcgcaaaattaaagcgatttcattggttagctggtcggttcctcgcaaatcactcgtaaatattgcgacgagtttgcgaggccatttatttctatatatacaaaggacgcgagtttgagcgcagctcaaaccactccgcctccagacaaaccctaaaaaattctctctcgttttcacctcaccgccgttcttcttcgccggcggatcttctcttctccgtcgccgttcttctcatctaagctgtcttctccggcggatctactcttgtccgtcgccgttgatttatccgcccttcttcgccggatcgttcttcttctccggcggctctcctcttctccgtcgcctccactgtcttctccggcgagtttccgaaacaaacaaggtaatgtttctaaactctcagttcttcattcggttatttttgtgattattagggtttcattcatagatctatttagggtttcgatctatgataattccttgtagatctatttagggtttcgtgtttttgttgatttcgttgtgtatcttatgtgggtttgcttatttgtttgactaacacaatgatttcttcattgcaagatgtcgttccgtggaaatgactattcaaggttccggtctcaacagcagcgtggaaacactcatagcagtgaagggaacacttctgcagttcatagtactggccaaaactccagacctcagacgcctatcaactctcaagcaggcggcggtgcctctcctcagcagggaaatcagtctcccaacggttctgtcaatcatgctaatcctttagcttctcggctcaacgacatgactctagatgagttacttgatagtcctggtcgtgctgggttaccgagattagaccctagccgtcctccgggaactttttggtacgcctcttgtgtttcttttccttaagcataggtagtactagtcttagttaacagtttattgcctaatggaaccttgtgttggtagg

SEQ ID NO: 32025 - DNA, 1354 bp, Arabidopsis thaliana landsberg
gttttgtccatgtttttttttttttttgtccatgtttccatgtctctgtatctatcttggtgctatttattgcatattactgcccaagttttttttttctcagatgttaatattcctaacatgctcttttaaatgaaaatcttattggttcatttcaatctaaatcttactctaatatcagcgataaatcctagttaggttattctacttgagtcaacaactttgatttgatatcatattaagtttcataaaattaaataaaattttaatctaatattttcgtcgtagatctcaatccatgtttttttatcacttaagttctcaatctcgttttagacaaaaaaaaaaaaaaaaaaaaaaaggttctcaatctggtcccatttccaattgggatatccccaaccaaatttttaaacaaatctggtcgcacttaccttattttccaaacatttcatatggaaattgtgtcatttcacatattacatgttctaatctcaatttatacggtttaccctcaacttctaagccaacagaaaaaaaattactaaatcattttatttgaccagttaaaatgatgtcgtgctctttaggtccattaaaaccccggtaagtgaactactcgacagttatattcattttagaaagattagtcgagttgtaaaaatcaaaaccacaacatcaatgttcaaaccataaccaaagaccgagtaacatactcacaattcacgccgaaattataatgtaaatttattagatatgtatctgtttaaaatatcccgaagaaaaatagaatataggtcatctgattaagacaattgaaaagtcaaaattgtttgtaaatatctttggaatttccatccatgatttaactggacacaatatgcgaccaagatttattcttgagttttgcataatttatctatgaaattgcttaaattcaatattttaatttttcaatctttgattttctttatttatttggatgatcattgcctccatctgaattctgatatttcaggctaagctacgattacgtttggtatcatcccgtacgttaatacaatgtgaagaaataaacaaaatcaaatgcaattataccgtagtaatggtatatgttttgtcattttgttaatttactcacctcatctctttatatttatcttgattttttcttttgttgagaatattgctcatcaagcttataatatttagtgaaaaacatagatttctatatgccaatgaataaattattaaaaacaaaatttaaatttttaaatattgttatacggtgtaatacttcaatttaaggaatacaatagtgtatgcgcatagatttaaatgaattgatttgacc

SEQ ID NO: 32026 - DNA, 465 bp, Arabidopsis thaliana landsberg
tctcgctccatctccttctccggcgaattctccatcggtttctccaccattaccgaatgattctcaatctccttcttcttctgcttctccgtctccgtcaccggaagctagcgatgtgaatcacagtgatattactgggatcgaaggggagaagttgccgtcgggaagcggtggaggaatgagcggcgggaagaaagttggagttgcttttggagcgattgcggcggtttgtgtggttggagtcagccggatttgtgtacaagaaacggcaagagaatattcgcaggtctcgttacggttacgccgccagagagattctgtaattagagagagagagagagacccagcgaggatagattgatttaattttgaatttcttgttactctatcattcagaacacatttattgataattagtatatcttttgtatagtgtaatcaatatttggaattgttcctcagatg

SEQ ID NO: 32027 - DNA, 778 bp, Arabidopsis thaliana landsberg
  unsure (1)..(778): unsure at all n locations
tacttgcgatggttggattagaaaaatcgtttgattttgtcttatttcttttgtttatgtctcatgttgtttgggttgtaggattgatcgtgtatttgggtttacgagtagatgttttcaatcgaaaccggtaattcaataatttgctgtctccttggcattttgttactctagtttttggcaagtgttagtctttgtaagtgatttgagattttttttcgtggaatttggatttgatgttttgtggctacaccacttcacatttcaggaatcttttattatcctgagctttaagggaagtgagaagagtgccatggatggatataagaagcagaagatggtaaatttagtgtggagacccatctccactcaaacctcttcagttattgctggttaggatctttaatttagcagtttaatcgaatattccatcccggttttgaaagttnnnnnnnnnnnnnnnnnnnnnnnnnnnnnnnnnagctggaaatgaagtccaagaagtagctcagtgtagcaaatcaagtgatgtttctaaggaagttattgaaggagagacagcttcagttgtttcagctggaaagcattcagtttctcttgaggttctttgttccttctgttacttgaagtttctttgtgctcttttgtttcaactacttaacagactttatgtaattggtttcagggtggggcttctttgattaagttcattagagggaaagagtaagagctctagtttggtaatcttatcctgcgaggtatacttacgtgctaacgg

SEQ ID NO: 32028 - DNA, 680 bp, Arabidopsis thaliana landsberg
atcagcgttgttcgatagcatcatgagcaaagtcgaaagcaactgctcggcaaaaggattctacacttatgaggctttcattactgctttcaaatcttttggagcttacaaaggaaaggtggctaaacgtgagatcgctgctatattggctcatttctcatacggatctaaaagtaagttcattatattattaaaaaccaaaaataaaaaatttgcattggcgtttttacctttaatgcgtaagatatttgaaaatcatggatacatgcaattttggttttttggaagcttaaagataatacattttatttttacgtaaaggtttttgttacaaagaagaaatatcgaacgagagatattgttcaaagagcaagaagtacccttgtgaaccggggaaaaactactatggtcgtggtttgctacaatcaatcacatggaacgagtattacggtgccgccggcaagcacctcgggctacctctactgaaggatccagatctggtgtctcgtagtccagaagttgctttcaaagtggcaatgtggttctggaatagaaacgtgcgttccgctttgtacttaggatttggagaaatcacaaagagagttgatggccgtgaatgtggtaactggcgttgcgatgatacgaagaacaaagttaagcaatacatagagttctgcgag

SEQ ID NO: 32029 - DNA, 874 bp, Arabidopsis thaliana landsberg
  unsure (1)..(874): unsure at all n locations
ggccaatgaaactagctgcaaagatgtacgctattcgagttctatatgaccaacttctactataaccagcacatagaatcaaatagttaaatggaaaaaaatactaatgatgccttcatactattgagtttcaagcaaaggaactcaatagagcatgttcaaagtcaacatgaattcagtgtcatctgaaattagcacaaaggaagataaaatgacaagacaataagtcttgtcaatcatctcatcatatgccatggatatgcagtgcagaaatattccgcactaaaaatttataatataagtacagtatttgatcaatagtaaggtaaaactcatggggacaaatggatcaagagtcaacaactaaaaaacaaaataaggacttcgaagtccagtggataccttgtgagagttgcttttagaattaaacttctcaacagtgccaggatagaaactggtaaaaaaggacaaaaaaaatattaccgaagctccagcatatatatttggccaagtataagaaattttttaccatccatctgtgggagagagtaatttaatccgctgcncaatgattgcttcgccgtggttgctaatatcctgtgacaattattaactggtatcacaggaagatatggatagtcaaataaagatctaacatatactaatgtacttacttttaaagcagatactacnccggagtgtttggaagatgtaattttattgcttacacttgctttgacactctcctttgcacaagtagtgtgtctttctagcttctttattggaatttccgactcaactgttctcanagataaggagttacaagaaatatgttctcncagatgagttcgcttcctgctacacctcgtgttat

SEQ ID NO: 32030 - DNA, 2350 bp, Arabidopsis thaliana landsberg
aagcgcgaggatgtgttcatcacgtccatactatggtattctgcgtcactatggttcaaacgctttaatagtcttttgctaatcagttgtcaagtctatgtagcttctaacctggtgactagctcatatgataggtgtacttaccatgatcctcaagaagtgcctgaggcacttaacagaactctacaggatctgcagcttgactacgtcgatctgtatctcgtaagtaatatatttgaaaacgttgttttgtttgtctatgtgcttttctcttcagcataatatcaatccattttggtacttcagacttattgatgtggttttaactaccaatattatcactgcaatttttaaaagtctcaaggctagtgtgatatattgttcaaacatctaaactccttttacttgatttcttataccgatttgtggaaccatttcgattgactaatagttgttttgattcttttgaagattcactggcctgttagcctcaagaaaggatctactggctttaaaccagagaacattttgccaactgatattcctagcacatggaaagcaatggaatcactctttgattcaggcaaggcccgtgctattggtgtaagtaatttctcctcaaagaaactcgcagatctcttggtggtggctcgtgttcctcccgctgttaaccaggtggagtgtcacccttcatggcaacaaaacgtgctcagggatttctgcaaatctaaaggcgttcatctctcagtatgtagagcaaacatgtctatatcctttatgaaaaaactaacaaaagatctcggaaattaaacatgacttgatatttttttaggggtactctcctttgggttctccaggaacaacgtggctaacgagcgatgttttgaagaaccctattcttggtggtgttgctgagaagctcggcaagactcctgcacaggttgcattacgctggggtctccaaatgggtcaaagtgttcttccaaaaagcacccatgaagacaggatcaaacagaatttcgatgttttcaactggtccatacccgaagacatgttatccaagttttctgatattgaacatgcagtaattttccacacattgtagtccaaatgggtcaaagggcgtcctttgttttgctcaaaacacttgggttatcgaaattgtagacgtgtgttttcaatgttgcagggcaggttggtgcgaggcatgtcattattcattagatgagtccttataagagtcttgaagaactctgggacggtgagatatgagactcagctgatttgattgtcatagatttgtcattagtaatgcacgttgtttcattacaaaggtacaacattttacttataaactccctccagcagtcccacctgaaaagacattaatgttctaattatgctgaattgatgatccattgttacgaagttagtatggtaagttgcgtataattaaagatggtaacaagtatatttttaacaaaacaaatattgcatcatcaaacgagaaagaaagcatagataattgcgtgacgttagatcccaaccgttagagccatcaaaagcacccgttaaggacttcgacagctggcccagcaatgatgttgcaaacgaccccaacagttaaatccatcaaaatactaaacatttttcttcctttactccgacccggttcttgaacctgaccttgatttgcatatccgtgaacctgaccttgatttgtatatccgtgattgtaataagcatggtggtagtaatactcagaatggtaaaattgcggttgtggagacccaaaacacctttgctgtatctccgttgctgctaccgatgcagatgaactaatgcattccatgtgaacatctaacccgcatggaccgcatttgtaccgccaagaccggattgcaccgcggcaaaccatgcagatgctgctagctccccactgactcagctctaagagatgggccgggtgagggacgtgtctaacgtgctgaggaagctgcgtgcacagtgggtgaacatcaaagccacaaggctcacattggtaatagagcccctcggctgattcatcgcatatgtcgcacatacgtttgttctggtgcgtatgctctggtcctctaaagactagccggagctcgtgctgcggatgcataaaggtggcgagggtagaggggcacgtggcacaatgatcgtgaagattgtagtcacaccgggtgcaacggtaggtcttcccaaagccgtaggttttgcagccatcgcatgtgaactcaccatatccgtcaaccttcgttaatggatggatatgggtaaaatgttggactactagctgttctgggctcgatgaagacatctt

SEQ ID NO: 32031 - DNA, 868 bp, Arabidopsis thaliana landsberg
gagattggatggatatacaaggctaaaactggccaaaacccacataccctagtctctgttattttcccatagctctcatactccggtgctgtagggaacaatgcattgttgatacgtgactttaaactaggaagcagtgccttgatgtgttgaacaaggacctgcaaagaagggaaaaagaactagctcccatcagacagctcataattttagtaataatattaccagctatgaaacttatgagatgccatctttagaaaaaggtctactccattcacagaaaaagaatccaccatatgaatcaacaacaatagtgagaagatgtcgctgagtttttcaaatatatacacactaatgtcctacaaagatcctagctcctcctgctaaatgaaataagaaacatgaatgttacatacaaaagccaatttattgtctcaattagagacacattggaaaatccagaaagtgtattccttatgacactcgtgtcttgactgcataacaagataatcataacaaagaaattagacgatctcaagactgcagataatacctgatttaatttctttgccagttgagggacacccaaacgatctgtgagaccgctgtaaacctgtttattagaaaacaaaccaaaacagaacatataagcagaagagtcaaggaaacgctatcagaaaacaaatcgagagaatgatgcagtcttactggacgactacgaaagaacttttcctctgcaacaagagcattcttgatgctacggttcatcaaaatatcctgttaaggaattaacacccacatttgttattgccttgcgtagagggcagtggccacctagtaagagcaaaccaaaaaatgaatataagag

SEQ ID NO: 32032 - DNA, 2174 bp, Arabidopsis thaliana landsberg
  unsure (1)..(2174): unsure at all n locations
tgtggggctaagccgatgaaccgtgatactaacacgcgcccctcatcgccatggatagcatgtgtagtaatcgctggttcttcaccgtctccatctgcagaatcataatcgtcattttctgcaactcttttcccgttatcatcaacaaataacccacgacgagtttgatttgggcaggcagtttgccggtgacctggttctccacacgcaaaacagcgtaaaaacaatgggacaagtcgagcgacgcaatgttggtcttcttctttcgaacgttacgagtagcactagtatcgcttgactcagctccttcacgtgatgtcgtgtttggtgaattggaaatctgatctggagggcggtttcaagagtatgtcgagttagtggagctgcgaaattgttgttcaaaggatgatgctcgcctatgtgcttctacaacagtggacagatcaaactgagccaaagcgttcttaatttgagcttgcagaccacctataaaacgtgagaccatctgcacttcgctgtcatgaatctcattgcgcgttactaggagatagaactcctcagcgtaatcatcaacagaacgggaaccttgtcgcaagttctgtaaacgattgtacattgtacgatcgtagttatgtggcagaaaagtatctcgcaatttcttcttaagtttctcccatgtacgaattggttctttaccggtacgacaacgtgttgatttgagttgctgccaccaagatgcggcgtgtcctcgaaatcgggtagcaaccaaagaaactcttcgattatctggtactcctttgaaatcaagcacctcttctactgcaaccaaccaatcgagaagcgaatctcctctaattccacctacaaactctggaatatccaccttaaatcctgattcccaacgtgtgtcgtgatgacgctgctcttgttgtctaaagtggacaagctcgcgctgttgtggattgtcaaagttcatcaggtcttgccggtgtacctgaacaagagctatatcatcaatgtgttgctggtcttctcggcgtacttgatctgggggggctgcagctggtggctaaatatctgcaccgatatgacgaagcaaagcgtgacttaactcttgaatagatgtttgcatcgcaagttgtgaggtctacaacgctgtgtgtgatgctaggagagcatcgcgaaactcaacccaattgatggtgttgtctgctgctttatctccttcgtgtttagggggcatggttgtgatatggaattcaaatccaggaaagacaagaatctgataccaactgatagagaggcggaagcacaataacaaacaagaactcaaaatctccaggaggtgacgaattcaagcttggattttgcttaacacgacgtttgattgtcgagaaagcaataaggggtgagaatccttttctcagggcttaaaagctcttgtattaaaactgaattcaaaagtcaaagatgattacaatgcttgtcgaaaacaactacttatagcatctaaaagataacaacaaggagatttagatactcctaaatctaatctaaagaagattgaagttaatccttctaaaagaaaaacaaaagagaagagaaagcgtaaaaactaatgaacgtatgcgacgaaacctataaacgtatgaatgtatgcgacgaagcctatgaacatatgaacgtatacgtgaagcccatgaacgtatacatgaagtccatgaacgtatacgtgaaannnnnnnnnnnnnnnnnnnnnnnnnnnnnnnnnnncataatgactttcactttccacatcaaaatatggttaccaatgaaccagctaaggatcttggaagtaagaacaaaaaaagaatgagcataactgcatcatataaaacggtgaaatttttaattattttggtgtcttgtatgtatctttgctttcttctacatgtcgtcactttaagtaatcaataaaataataaataatatgttatatgtgttgtgtttatatatgttatttatttaaatgcttacaatactcatcaattaaacactacttaatttattttttcaaaaaagaacaaaaccaaagtgaaaaaggcggccaaattttcaccatttattttgtaagtaacgctgatatattaaaggaaattcatcttctctttcacttaaaataaaggaacaaa

SEQ ID NO: 32033 - DNA, 631 bp, Arabidopsis thaliana landsberg
tcaatatccaacgggtctccaaagtcgttggagtcccttgtctgatctcagattccatttcatctccatataacagcctcgacaaaacggaatcaagatcatctttttcgtcccaaagggttgaccttctctccatacaaagtcccagtcaacgagatcatcagccatcgtttcgatatttttgtgcccaactgacatccctccatatggctcagagttttttacgttgttcgactcacatgaggacgcgtggacagcatgagagtcgtccaatagaaaacaagaatcgaaaatgtcgtcattgagacacaaagctccatcgtcgccattaatgcttgggttacaatcgccatcgtctccataaccacatggtcctaaaccgggttcctctgctccacttaagctactacttgacaacaccattaatgcgtcttctttgtctccctctccattctctattgtcgtagttggcaaaacgatgtcacttttgtttgctttaaaagaattaggggttttgtggtttttagggtttaggaaagattagcgaggatcggctgtggcggtggagggtacatgccaccgctgaggaggcggaggcgcatacttctcggcattgccgaccgatggtttt

SEQ ID NO: 32034 - DNA, 331 bp, Arabidopsis thaliana landsberg
gctattaccgggtccttttgtttgaatggttataacatagcataatgagaaactctaggtatagcaatacgagagtaactaagtgaggatagtgttagtgttagtgtgtttccacaagaagttaccttgtggtttcctataattatctatgttgtaggactagaattttcgtaggtgtgttgatttggaaggttggcgttctaattttagacctaagtgttttggttaaacgcttttttttcaacgtgaatatatatctaacgagtaacgagttgtttagtcaacaaaaagcaggggaacattaataatacaaaaattaaaatccaaaaga

SEQ ID NO: 32035 - DNA, 895 bp, Arabidopsis thaliana landsberg
cattgttttgtttgtgtcgcacatttatgttgaaacgactctagttcattcattacttagcctacacgttatctttacaaatcgaactttcaatagacataccaccaacaaatcatgttctgctttttcactttggcgatcagatttctccatctacgaactgattgctcttccacagtgtagttctctaaacacaaacatacagattagacaagacattttcaaacaacttcagctgactatccaaaccagatccatggatgtaaaaaattttaaatcataaaactttgtcaaacagatcctaacttcatgaacaagaaaactgaaactatgagttaccaaattccactcaccatcattgaagctcaagtttcacatttcttcaggtactttctatcaatgaatatccgactacacctttaaccgagcattcctgctaatggactgaacaagaacggcgttttcagagtggagaaaagatgggtgatgtctatacaccatgaaatcaactccatattgtaaccctgatctcacaatctagttctttgatcgtagatgccaataagctgtgtacaagatcgttaaatttggcttaaaggatcttatggatcgccataaatctacctcgttttccagagaacgaccgtgaaggcaaatcttgatgcatttcagtttgtaaaacaaaaagattgcctcttcaaaggataactgaatccatctcttatctttctcggcactaacaactagtctaccaaaacaacaacgatccaaaagctcagcttgctctgactcaaccgataaaagtacgttacaacttgagaggaaacctaaagcctcggtttgggtcaatgaagattgaagctccaagactgttttcgaaacaggttctgcaagt

SEQ ID NO: 32036 - DNA, 886 bp, Arabidopsis thaliana landsberg
tcatatcaagtgtatgtatgtaatgtaaagaaatgaatagatacgtaactaaatttatttactttataaaacttgctctactttagcatgtcaaccaataatgtaatagacctagaaattaaatccacatatagtttaagggacttaaacaaaattgagaaaaaatgaatttgtttaaaccaaaattgatatatcaacaaataatgactcaaaatataaagtttaagtgtgattatattagaccatcctcataaaataagtcatccatattcatatcatattagctatctttgggattttttacgtgtcatcgaaagcctataatgagaggaagagacagctgcatagtcatagatgacttgccgggctagcttggttacactttttgccccaacacacatatataaataagtaaatactttttcgtattatattacgtacgaaaaaaaatcaactaaaactatgtagataagtaaatatatataaaccatcatctccataatataaatcgaatatagagtaatcataatacaagctaccggcaagtcatccttggctgaacaacaatggcctttttcccacattcaaggctttagatgagacaatccattcacaccttcattttcattctgtaagattccctaaccataattaatactcataatggacgaaaaaaaaaaaatgagagcaaaagaggtgttgtgaaaattctctcgtttgtgaatgtagtttttgttccaagaattgtggagataaatagcaaacgaaaaaaaaacatttggagaaaagatgaagagatctttcaagtttgtatgtggcaatgtcttgctctcttgaagtataaggtgtatcgtacttatagatctttctaccagtttccaatgct

SEQ ID NO: 32037 - DNA, 1143 bp, Arabidopsis thaliana landsberg
acataggtattttaaaaaacgaagtgcgtttagacatgtcagtaattagcattttttgtcattatgttagtttatattattaaattttaacaaatttttatactaagatatttatgaaaaggaaaacagttatggaaagaagaaaatctataattcagttattacaatatagaaataataaatttctatactaagatatttatgaaaaggaaaaattgttatcgaaataagaaaatgtataattcagttattaaaatatagaaatattaatgtcattgttagtcacactatgttagcttccaaataaattaagaaaaaatcttaattctaaattaatatagataattagaattcaaataaatgaagaaattttctacaaattaagaaaaagatagtgataaacaaccaagccaaagttttttgaaagtctaagaaagttaaagtttaaacgaaaaggaaaagcttaatgacataaatgaaaacctcttcttaacaaataaagagactaataaagtcttaaataataaagcagtggtgtctatataaataaacatctatagaccatttatagtcgattaacaacaaagagaaaatcccgagaaaatctccagaagataaagatttatcactgccgcctcaaagataacaacaaatctcccaagaatatcgcgaggggcggctcaaagccttatataaagcacctcaagggatgagagaaggggcacgcacaaaaacgctctcaacttcaggctatcaaaaacgctctgactttgaaggcaaaaacacttattttcatattctagaacacttgtacgatcaaatcattactttctcattaatacaatcaagaacaccgtccgcggtaattgagaattttgttgttctttgagaatctcacaaagattcgttctttgaagaatcccttaaaacaatttctattgtgcgagttttgactctcgcattgacttaacttagctacctctcgacgagcttgaaaaaagtttatactaacaaggaaaggaagggattttcaaagaagaaatttggagtgcatgcaaaactcatcagaaagagaaacaaataaaacaagtgcttaaacacgataaagagagtgattttttcgactactctgatggtgcctca

SEQ ID NO: 32038 - DNA, 657 bp, Arabidopsis thaliana landsberg
gattgataacaaagcaaagccgggcggtaaaccctaaaacaaagtaagggtgagaggtaaaaaaaaataataatgaaaggtttgtccaataaatagcacagccaccaaaagaacgatcagaaactagttttagtgagagctattcacaatatgaatgcagaccacatttatagtgtaatagtatcgtaaaccaaaagtcaactgtgttagcagaggtgcagtcaatacatatgctgaagggaactgttcagtggcaggggcgggtaaattagccgttctattcatctgtaacacctaaccatgaaacaaccaccacacgcatcttccctcctcttgcagctgtaggtttctctctcttcataactctctccatctgtttctgcaaattcaaccgcaaacgccgatctcccgccgccgtagcctcctcctttacaccggcgcagaaacaaccggtacactatttttactacgggtgtctccgaagagccaccgcttctttctcaccggagaatccactaggtcaaggcggattccgctccgtattccgtggaacgttatctccgtcctccggggggggaaatgtcgccgttaaagtaatggatccacggttctcttcaaggaagaaagagagtttcaaaacggagcttttcttcgctg

SEQ ID NO: 32039 - DNA, 371 bp, Arabidopsis thaliana landsberg
agacaagtctctgaaaccaaaacatcaaaaaacatgagtctttaagttaaaaagtaagaataattttcaaactttatatactcacaagaaagagaggtgagggatttgagacagagaagcaggaaagggcccagataatgagttgttgttcaacctggtaatcaaatcattacacaaacgtacgaggtttaagttaatgaagaccaatctttgattgattaaaatctgaaagagagagagagacttaccgatattggagattactcagctggttaacagaacccgggatttcaccggagaaccgggtattggataaatccacaagtcggtaattgggaagaagaccaaacttccgtgggaatttacccgag

SEQ ID NO: 32040 - DNA, 2520 bp, Arabidopsis thaliana landsberg
atcgggatctgaaagaatcttgagtatccatcaaggaaacatttttatttatgatttgctaacatctccaacatctgatcgataaatggtaagggaaaatggtctttcctggtagcagcattcatcatgggaacatcaataagaattccatctggaattcgggtagaacgatatgccaagacaagagtaataaaggtaggctcaagattggaatacccaagacgcataacaactgaacgaggcatcagattcacactagaaccgagatcacataaagctcttgggaaagaatcgtgattgatggtgaaactaagtacaaaagttccatgatcaagtagcttccttgggattcgttcctgaatgatgtcgccgccctgctctgaaatcatcataacactgcattcattcgtcaaattctcagtgaccattgtcttaacataccttttgattgtgggagatagatgaatagcttcaactagaggcatctgaacaatcagcttatcaatcatagccttgcatctgagatcatctaaggcttgtcttgactttttaggacttttggggaagggaattcgccgatttgctgacttggttgcagctggaatttgcacattgtctgaacgaattgggtgtcgatcgacaggagctgggtgtggatcgaaaccatcaggaatagtttcctcctccacaacaataaaaactgaatattgatatgattattatagtcacaataaaaagatattcggtcacaataattttcttgtgtcgaaactgaaacgaattttagaatgttacaataaaatcgtcacaaatctatgtatgtctcaaaaaagtctcaaacgaatgtgacgattaacaacagtaacaatttgtcactgattgtgatgacgttattatagtcgcaaaaacggatacaattcgtgacggacgatactgtcacaactatgccacaactagtgacaataaaatcgtaacatacttgtcacagattattaccatatttaagtcaccggcccgttacattttacgaccaaaatacaattacaaatccgtcacaattagtgactcgattatagtcacacaaacgccacaaattgattttatgttgtgacattttttcttactaaactcgtatcaatttgttacaaaactagtttcatgaacaacacatggacgtttggtcacaaacgtatgattaccattttttgcttttactaattgcagtcattctctttataaaattatagcgaaccatattttatagaaattattaaacaacatctgataaacaatctacaatacttagactaatagaagccataatttatagaaatcataaaacaatatccaaataaacaaaatacaatacttaggttaatgcaaataaaacaaaccataacatccaaataaagtcaaactagaaacacaacttaaagaaaatacaaactaaacaatacttaggctaaaaggaaccatacataaactagattaagtggacgttcttggtggtggatttggatctagacattttgacttgcaaaagtctcaacaagtttttccatagcttcaagtattttctgaatttgcagattctcttcaaggctctttttaagatcagtttccatctcttgtagccgatgcgttatcgtctctacttcttccgaagcttgtggtgcacttgaagaagcaccaacagatggtagagtctccattagtgccccaagtccaaatatatggccatgtttagatgatacatcagcctagaatgaaagactaaatatattagcaaatacagaaaacactacaagtcatctaacaaggcttgtagaacaaatgataaaacgatatcatctaacaaggcttgtagaacaaatgataaaacgatatgcacatattttgttttggatgtgaacttggatatcttttaggaaccaaatttgataaccaattctaaaccggacctaatgaaggaacttacttgttgagaagtaaaaaaaacacgctttataaaatgataaaagttagggccgttgagaagcaagcacaaaacacgtcaacactaaacctgaagcaaacaacactaaacatctaacaagttttataaaacgatagttttatctacacatatcacaagaacaaatgaatgtaaaaccagagactaagaaggctaaagtgaatgtaaaactatagactaacaagcctaaagtgagtgtaaaaccagcctaatgtttagaattattaccttgatataaatttcatttttctcatggttgtcaatagtttcagctctcagattctcttccccagcagattcaagtagacacaagcgttcttgtacatgcttttcataagtgtttgcaaccaaccgtgctcgttgatcaatgtacgagccatcaggtttctgatgtgttttcttcatcacagcaataaaagagtagtcttcattgtttgcttcctgtaaaagaaacaataaaccaaagtgaaacagcagaaaaattatcacgattagaaattaacaag

SEQ ID NO: 32041 - DNA, 959 bp, Arabidopsis thaliana landsberg
  unsure (1)..(959): unsure at all n locations
tttgcatatcattgttctgtgatatgatactaaaatagcttaatatattttgcagagccgggtcctctgatacagctgagctgtggaatgacatcaggagcccttggagcatcatgtgtttacccgttacaggtagtaagaacaaggtaaaaacccgaaattccgaaaacttgtaaccgatttttttttatgtcttgtctgcgattgtaaaaaacaactttgatccttgtcatgtcagaatgcaagcggatagttcgaagacgacaatgaagcaagagtttatgaatacgatgaaaggagaaggtcttagaggtttctacagaggactattacccaatcttctcaaagtagttccagcggcaagcatcacgtacattgtttatgaagctatgaagaaaaatatggctcttgattagccaatacggtcttgaaattntctccgagttagtttattcttttttgttcccaaggggtcactctctctaggttatgtgagaaattcaaaaacaagacagagattgtaacatgtcttcgttgatgtgttcaagatcaagactcaagtctgtaaactcacatctccaaaaaagattttgaatggttaagtcatgaactcacatctccaaaaatgattttgaatggttacatcattaaagatatctatcaactaatttttttaaaaaggtcttactgcattttataaataataaatgaatttttatataaatcgtgatcagttgtaagtcacttttctaatattttaaagtgtataacctatttaagtatatgatctgatttaattaaatggaaaacaaaatattaaaagtatattcttgaaattgggacatatatttttatggtgataaaatttaattatagatttgtaatttgatggaatttttttgataaatagttatcagcaatataataaagttacacttttataacaacttaacaaaaaa

SEQ ID NO: 32042 - DNA, 4508 bp, Arabidopsis thaliana landsberg
ggcttagtatagacatggcttgcacatgccacatagtatatactcacataattggattagaaatcgaaaacatacatgatataatataagattacatagaccccctcgtggtattaatatatgtcctatgcagtacacagaatgaaacagtacggaagcctacattactcaaaacatatgtatgtatatagattgtacggtgaattaggaagaacaatggcatgtggttcaacgtggagttatgcttctcatgcgtcggtggattactttgtttccattttttttattgaagaagacaaagaggacccacgataacataatagtcaaaaacttaaaagactttacagagattacaagagagaagataaggtaaaatggttcagagtgacaaaagagtcaaattttgttactcgaccaagaatctttctatagttttctccaacgtctctctaggcacagctccaatgatgctatctttcttctcaccgcctttgaagatgattactgttggaacgcttcgtatcccgtaacggtttgctgtatttgggctctcgtcagtgttgattttgtagaatttgaacttccctgcgaaatctttggctagctggtcaactatggggtgaatcatacggcaaggtccacaccatggtgcccagaactcgaccagaactgggacatctgattccagaacctttgtttgccattctgaatcagacagatttggtactgcaacatcaaacaaactagttagatatatctcaatggtgattgaaattatgcaactatcagagagaaccgttctgtgaaatagtatacagagcacatcaatgctcaatgccaacaagactctggttctttcttgagttatttaaaccatatgctaaaatcttatcacagagtatctttgctatcaatttgtataatcaatcctggtttgatcatacaacaacttgatagatgaagaagttgagtattcaataacgttgactacaatgttttatcagaatccactccctatgaatcctagttttagagaactaaatcagataatactaaagactaacaatccaagtaattatatagatgatgaagttgaatcctcactgatttaaggttcagatctacgagttgtactataagaaaactgaagttaccttcgacggcggcggcagtggtgtcctgagcctcacaggcgattcgtccaccgcgagcgattctggttctacgattcgcacccagactggccgactgagtcaccaaactccgcgaagacttcaaacctctgaattccagaaacctggcgggagaaatccggcgtcgtgaaaccgacggagcagctgaagaagacgagaccgaagccgcaatcggcagagaaaacacgcgggtcacggtgacggaatcgagtaacgacgccattggagcagagcagagatatttttttgagtggttagagggtttttggcagatacgggtgacaatttgaatgacttgagaacacacacagaggcgaatgcgattttatcctcgccacgtcattctttcctttgagataacgacaacgtttagaggactcctgtaaaccgtcaattgttttagtagaccgactatcaaatttgatttcggttaggcagcacatctgatttcggttaggcagcaccgcaccaattcggttaggcagcactgctataaggtcgattctatttacgaagacggacatgttcttttttcattagttaaggttgaggattggactcttatatcactttatgaaagggtgtctatattatatatagtttaacttttctttggagagtaattttttttcttaaaacagatttgcataaatacatatggattctattactaagcgttatgatcacataaattagagaaaacttgttcaaaactcgattccaaatagtattgagcttgttttgagagaaaaaaaaaagaagacaaaactcgatttgggatgttataataatctaatcaccatcgtctaatcgataccattttaatagtttactgagatagttgcaacattttcgtcagtttgagaatttttttgttctttcccccgaatgtcacatatatcattgataaccaaaaccacagatttaatagttaaaatgggatgtgaagaaaaatatactggacaaagaagaagaaattgtcattttagaaccatttcatcaaagaaggtttatgtctaaagccattaatctcaagcaaacaaaaaacagaaagcattttgtgaagaatgaagagttacttcttcttccttgtgtacttgtcatcctcctcttcctcatcatcttcgtcagaatcttcatcgtcttcaaagtcaacgtcatcaatctcgtcttcatcaaaatccgtgtcctcctctgaatcagcatctttgttgtccaccactcgctttccatgagccgcctccattttccctactctctccgaaacggcctccttctgaacgaagccgacacgtaaaccggatttcataaccggaaaagtttcagagtaaacagggtattggctagccgccggcatctggttaaaacaaagcagagatcgaatggccggtccattgttctgtactgtctcggtgagattgatcttacgtccacggaggaatagattcgtcaacgattttccgtcgcggatgagtgatctcgccgccgatgatgaagctgaagccatttttgatcgcagtgtactgggactgatagagtttaggacggctaatataaagagagggaagggtttagggtttttagtaggagttgacacgtggatagacacgtgtacatttacgtatctctttttcagaactgtagtttagattttcagttgaaagtacaacaacacgtcggtaaagtaaatctggttcacatcttttgtcttgattaggagggataataaagcttaaaagtcaaaatccaaaccttgtatcgttgacttttactcacttctctggtagctcagaaaattgaggctataataaatctgactgataaagggaactgtacatatgagagtgacttctcagttctcaatagtcttttaagatttatgtcatagttaagagaaaaaaagaggatccatgattgtaagaagggagaaactaattaagtcaccggtttcttcagaaattaagaaaaattaaggacaaaaaaaagggagcaatggagatcaactagaagaaactctgtctctcttggactttgatctggtacatttgggactctctgcaaggattatagtctcaggtgttttttcttcttcttccggttcgagaccaaggacacctagaagaataaactctttcaacagcactgtctccacaaaggtagccacatctgtcctaaacttcagagagctcatgcccgcgctattctcttccacatctggagcccccttcaccagatatcccggtgtagctccgtttctgtaagcattacacgccttcaacacgtcgtgagcacagctgaagaaatgtccatacgcaaagtcttcaaaatactgtagcattcgaaaaaccaccagaaacaatcaatctcaagttttagtgaaaaggtttacgcttttttattagtagagagagacaagtgtaatgggatgaggtttttgcttttaccttgggtggtctcctcatggtgtaaaccatagtctttaaagacagtatgaatgtgttttcgctgtaagctttagaggtactctcaccatgtgcagaacctgctgacctctcgtagccgggctcgttgaagtaaggtttttgatttaagattagaccttggatcgagacaagaacttgtagcatcgtcgaagtgttggggatccatttctccctctggttaccactccaagtgccgagaagactcagacacactttcccacaattgtacagatttgggttgattcttagcccaccagaatggtaatgaacaatcttgtaaaaccaagaggaaattcacatatcaaatgagacaacctttagaaaacaataaaaaaaactcaacttgagaaagttcagttgacttaccggtggcgtagaagggtatgtatccgggaagaagatatcaaaaaagaagagaccatcatggtagggagttccttgggctccgataattacagcccttaaaagatccatcctagattcataagctctgacaaatatcatctctgttccaataacaaagaatgtaagaaaaaattactgataaaagccacagagattgttgtataagacagcgtgtataccaacctggtaaatctttctcaagaattctccactcgtcttggatccttttcgcccaatcctttgaatgctgataagacaaagaaaaaagttaaatcttgaaaaaacataagaagcattccattataaagattaacttatgctcatctggcaacctgctttgaagttgttcccttagaagcatagtggtgatctgaaaaatcttcgacgatgtcaaatcttttgaaaaacaaataaagcccaagataat

SEQ ID NO: 32043 - DNA, 4766 bp, Arabidopsis thaliana landsberg
  unsure (1)..(4766): unsure at all n locations
atatagatatcaagtacaatgaaaatcaacaaccctttgaaatagaatagatccatacactcttactttgacaaaatagaataggcacacacttatttgactatgattttgttaattttgaaatcacatttatagtcttcaattatgttgtaaacaacctaaactttcacaatttcgtccaacaattctttgaaattctcaaaagagcttcctttcatagagaaatcttcatggagtttttctttaagcttcttggcattagccttcatcgtcttaccatcatcatgaacaaaaacatcattcaaacacttctcaaatccttctttcgtgaagactccattatccatcatcactccaaccttccacacaacctccactgctcttccgttgagcctattatccgccaaaatcggtctgccgatcatgggtacacctgccgacacactctccaacactgagttccatccacaatgtgtcacattcacacccattgcctcgtgtttcagcagttccacttgtggagcccaaggaaccactatcccttgctctcttgtccgatccaaaaacccttttggtagatgaaccatgttcttctccttcagcgaccaaacaaacnnnnnnnnnnnnnnnnnnnnnccttgtgctatcgccagaagctcttcaggaggaggttccatgaccgtaccaaagctaatgtacgccacagaaccagtagatcttttctccatccaagccaaacaacggtgaggatcttgcactagttgttgcaatgtagaagataataacccgagaggaccgatgttcagatatcgtttaaatctcgatctgaggttattcgtcaatgtaggatccaaatcttcaaaagaattgatgaaaacagcagtggcacgaggcaaagcaagacccatttgatgaagcatctttgagaaaacagagtctaaattcccaaacacaactccttctggtgtatctttgactctgatcttctccattcctgagataacccctattgtctcctccatacgctcacctacttctgtaaattagaatggaatcataaacattaccacaaatacatataaatcttcaaatcaatagtatcttaacctctgtttcttcttttagctaaattttcctctagttgcatatttatttatgagataaaagacaaaatcacaagtcggaattgggaagcattcaaaaatttgtatatattacctttgacaccgatggtttctctgatgagatctgtgtagagatgagcagagagtgagtttgctccggcggtccaaaacgcaatccacgacgcatttatctccgcagccgccgtctccgctgctaaccagaggaacgcatccgtaaggatgcacttgaacttcctgccaacttcggtctcggccgccttgatttctcttcggaaaatctctggcgccgcttcaagaaacagctcaacagcgtgctgtggattccccgtcaacacgaatccctcagaagcacggtcatcgacgttgtggacacgaatgtttgtggggatatcggaggagagtaacgacgagttggatcgtgcggtgctgaagaaggagaagacggtggagggagcagcggtggcgagacggcacgtgacggcgaggagaggagctgcatgagtgccgaaggggaaaacgagaactgccacgtgggagtctcgcgttggctgcgagggtttggccatgatgcaggcaatgctaaagagagaaaaatgtgcgtagttacattaatcaaatagaagtatgctaaagagagagtaatgtgcgtagttacattaaatagaagtacgctaaagagagttcgtacgctaaagagagttcgtagatgagccaccgagcaagtatagactctttctctcttaatcaaatttaagtatacctttattttgtcctttgtttatgtccctgctatattgttttggtaggtagaatttgtggttcttatattatatggtgagttttctcatcaagtctcatctgtctttcattcaatgttctaaagtaagcccctagatcgacagacgtatagatatttttttatatggagactagtctacacgatagatatttttttctcaaaacatatatctaccgacatacaatttgtttagatatgtatatattaattacaaagttaccataacagaaaaaaataaaaaataaaaacaaaggataaagattctcactttcactttttttttacaaaaaaggtcttttcattttcattccaaaacagaacatgtttatttgtttatttatccaaagtctatttgcttcaaactttcataacttcgtccaacaaacctttgaaattctcaaaggagcttccttccgtagagacagcttcttgtgctagttctttaagcttcttggcattaaacttcatcttcttgccatcatcttgaaccaaaacccgatccaaactctcctcaaatccatccttcgtgaagactccactactaatcgtcattccaatttcccacacagcctccacggatcttgcattgagtgcgtgatccccgaaaatcggtctacaaatcattggtacacctgccgatacactctccaacactgagttccacccaccatgcgacacaaacacacccattgcttcatggtttagcagctccacttgtggtgcccatgggaccaccattccttgctctcttgtcccatccaaaaacccttttggtaaatgaaccatgttcttctcttggagcgaccaaacaaaaggcactttactcgattccaatccttgtgctatcactacaagctctccaggaggcggtgtcatgactctaccgaaggcaatgtaaactacagaagcagtggaccgcttcttgatccaagccaagcagccgtgtggatcatgcaatggtgtttctctttgcgaattagagaataacaacgcatgatgttttgattctcaggtaacgtttgaatttcaatctgaggttatcggtcaatgtagggtctaattcttcaaaagaattcatgtaaaccgtagtggcacgaggcaaagcaagtcccatttggtgcaacatcttcgagaaaacagagtctaaattcccaaacacaactccttctggtgtatctttaactctgatcttctccattccagaaatacaccctaatgtttcctccatacgcccatctacttatgtaaattagaaaggatcatatcattatcaaaaaaaaaatatatatatatatatatatatatatatatatgaatcttgtaatttcttttatttaaatttgaataacctttatagtgacatatacaaataattctttttgtctctttttttggtaaaaatgacataattcttttaacctttgtttcccattttaggaactttcctttaatagcatgtctaatgacaaagtcacaaggttggaatatatataaacctttgacagcgatggtttctctgatgagatcagtgtagagatgagcacagagtgagtttgctccgccggcccagaaggcaacccaagtcgcgttcagctcagccgctatgtccgctgcgaaccagaagaaggcatctgttagcatgcatgtcactttctttccaacctctatctctgccgccgcgatttcgctccggaaaatacgtggagccgcttcgagaaacagctcgaccatctccagtggattccggagcatggttccctccggaacaccgtcagagacgtcgtggaccttgatgttctcgggatgatcagaggagaacaacgacgcgtttgatcttgcggtgttgaagaaagaaaagatggtggagggagaagcggcggcgagacggcgagtgacggctaagagaggaccggcatgagcgccaacggggaaaaacgcgagaactgccacgtgggagtctctgattggctcggagaatttggtcatggttagtgtcgtgagtgaatgataagaaggaagcagaagcaaagagggtcattaaataagaatacggaatagagcaagtaagtagtaaagagctatggccagtgaatttaattgctctggacagtggttggtaccacttgaagaacgcttaccaaacttagagattaaactaagcttgaaaacaaatctaattaagagattaaacttagagattaaatatacacttacaagtacttgcttagtttttctataattttctctctctatgaaagaatgaagtgtttcctataaacattgcgaacaattaatggtgtctaaattacctctctttcgatcttatttggcttcttcttcgtttttagattctaggtcaaaagtcttgatcaatcaagagtgtctttaaagatgtctttactctttgaatggatgtaacggacaaagcggtctaatttgtctacggtttagtctacttcatttttggagcagacaataaaccgttgtggaccaagtttatttgtatgtaaaagcggtccgcagataagccgctgcggttttcttttatcttttttggtccagaccactgtggagtataattgatgaataataaataaaaagtggtatgatcggttgacggttttgtccgccgtaaccattcaaaccttaatgtctttttgttctctttcttcatgtgtgtctttaatcaaatattaaaaaattaggtaagacacctccatttatcaccgctcggtcatcctttgagagtaaaaaaatcccctcatgttcataaatgtaatattaattatttatggtcccatcccatcccatcagtaaagtaa

SEQ ID NO: 32044 - DNA, 1065 bp, Arabidopsis thaliana landsberg
aatgctgctggggtgagtatgtatgacaccatcacccctaggaaaaatgactagcaatatttctttttcttctgttttgctttaagggatcccagaaaatgattttgttcatatatgatgaacaattagtagtattcttctaatttgtggtttcagaatgtatgaaaataatcgttaggaattttgtttgtaaaaacactatttttaaaaaaaaaatctgaacttgtgtgatcatcatcaggcttgccatcaggatcgttaataatttacttgctcaaatccccaattcctgtctaaacaatgtaaaaagaatcgaaccaagcatgtaaatattgagaagaggcttttgacctttgagcataacattcaaaatctgattcaattagcaagaatataagatggaaagtgagatcaacataaatcacctgtcactgaatccttcaatttaaaaaatatttcaatggttactttacttcaatttattttattgttttaaaaaaatatattcaatggttataagaacggttaacaataaattagtatcagggttatcgtcttatcgacccgatgttagaaattttttataatttttcttttgttaaaatgacaatcttaattcttaatggcaattatatgttcaatcttaatggcaatcttaaaccgatcgattattcaaattatatgttccgtattttttttagattgaatgttattgatagagttatcagaaaaaaatactactttttagtttaaattactgtgattatgataaaaaattaaaacgcgccaaacttaacgatttttttccaaaatttctacaaatgactcgttacccaaattattttttctgtattttttgaatatattaaaactaatgtgactatgataaaacaattaaaacgcgcaaatttaacaattctctatttttgaaaccactggatgtgaattaacaataaatataaagtaatatgtgtacaaataatcagagttgaatatttttttttgtgtttattacttgcatgagtacaagtttgatttccgtctcatcaaataaactctattatt

SEQ ID NO: 32045 - DNA, 1294 bp, Arabidopsis thaliana landsberg
tcgagtgccggctgtattttagctgagctattggcgggaagacctattatgcccggtcggacagaggtatcttatcaatccatcatcttaatatttccctccatatgcaagttatgtcctctatttccctagtatctaaaatctgcttgtatgcatgcttatgttcatcatgaaataggtagagcagctacataagatttacaagctgtgtggttcaccatcagaggattattggaaaaaagggaaattcacacatggagccatatacaaaccccgtgaaccatacaaaagaagcataagagagacatttaaagattttccaccatcatctcttccgctcattgacgctcttctttcaatcgagccagaagaccgccaaactgcatctgctgctttaaaaagtgaagtaagttcttaggtttgatttttctgctaatttacataaattgttctgatgatgctgagtagatttgaatctgtttactctgcaatttttcctttccagttctttacaagtgaaccatatgcctgtgaacctgctgatctgccaaagtatcccccgagcaaagaaattgatgcaaagcgacgagatgaagaaactcggaggtttgtaacatcttctctgtagtgttttaatcatcgctaacctcaactggtggcgtgggttttttatgaaactagagaactacatctctaattcttgcgggcatgaatgacatgccaatatgattgaatattcatgctcagcatatatgaatcttaccatgacctttgctgaagatgcaaatggttgaaatgctatgtatattttggtgtactccacttaaatcatgattcatatactatttccgggtaggaatgaaccacaaaaaaaaacatgtcccacttcgtatttagttgtgcctctcgattttcttaatggagagcttttccgaccataccagataccaatttaggcttcaactttggctggatagaccatccagatttgtcagcatgcttaattttagaaattccgatattattgttgcgtttaccattacttgtagctattttatactgtatttgtcagcatgcatagactaacagttttctcctgtgcagacaaagagctgctagtaaagcccaaggggatggtgcaaggaagaatcggcacagagatcgttcaaatcgagctcttccagctcctgaagctaatgcagaacttcagtcaaatgtcgatgtatgtccttcccaactgtgttcttttcgataacgtctcttcttttctacatttattcctctgactcgaatc

SEQ ID NO: 32046 - DNA, 554 bp, Arabidopsis thaliana landsberg
ctaggctattgttgatttggatttgacgatacctaggtatcgcaagtatcacagacaacgcatgcctttatgtctgtactggtcgcggtattgaagaaaaggttttcttcgaccgaggcgatatcatcttgtttcgtggagactttgttcacgcaggcaccgagtcgaaagatggacattttggacgcatccacgtgcatctggatagcgagcaggtggtatacgccattagtaatactgatccgccgccatgtacattatttactgtgccacgcgcgcttcgcttccgagcggtaactgagatagttgtgacaacacctccggcgctccaaccagaaccaagtggaggcagaaaacgtgccaagcctaattcccgaactcgctctagcacgaaggaagtgaaagcttcaagcaaaagagcaaagaaatgagtatgacacaatatcacaagcaacttcccccagtttattcgacaatgttgcaaaagggttaccaatttcaatccaagttttcgaatcatattatgtgttgtagtgtttagccagtggtcaaag

SEQ ID NO: 32047 - DNA, 819 bp, Arabidopsis thaliana landsberg
gaaacaaaaagatgaagagagatgtgtgattttgtttgcgttgtttgattcggtgctgctaatatgtcttttttgttgggttatgcaaggaaatgagaaaatcgggtgggaggttgtcttacacgtcgacgtaagtttttgcttggtgaataacttttcttattttcgcttttgttgtatcgcatggtaagtgacaactttacgtgtcttttttgcagattgaattgctttggcccttaattttttgagcctatataaataaataaatagtcaatatataattcaactattgattagataacctaaaattctatcaagtgatcaagcctattgtcactcattttttttatttttttgcaagtgatcaagtctattctaatgatttttgccaggtaaaactctcaattaaaggaatttttttttttgtgtgaccaaactcaactagaggatcctttataagtaactttcaattagaggatcttaattaagaagagatttaagagagaaaacgggcattttgaataatcttgtgtctcctaaaaacatagggcactagtcaaacaaattttgaagaatcattgtttttttttcattcaaaatgaaaatatgtaattaaagagattcaggttttcaactgttaatattttgaaataatgttggggtcgtatgtaattcgtgaatactcattagttatgtgtatatagactataagaaagcattcaaagcggttggattttttgggaagatcatgaggctgatgttgatttaggatttattccaatgaaatatgtttaggtggggatacatcgaaattaattg

SEQ ID NO: 32048 - DNA, 436 bp, Arabidopsis thaliana landsberg
agctgtgccagttacgaatattatgtcaactgcacttacacacatgtctctgagacgcagttattcctatcatatgtagtcgttgacgagttggtgaagtcatacacttatttttttttcttgggaggtaacatgccatactctgacacgaatggagagcggtcattagatggtaattatgattcaaaatattaaatttatcagtcagtacgaaatcttatttatggagtgaatccttacatgtgaacacagaacagcctgaagcgtcaagttgcctaatcaataacacataaatgggaataaaatgcgttacatggacatggcacaacgtgttcatttctccaaaaaatagtatagcttacccatttaaaaaaaataactagattttaaatccgcggtattatcgggggaaccgatttatttttttaaagaggta

SEQ ID NO: 32049 - DNA, 1218 bp, Arabidopsis thaliana landsberg
tattattcgacgcaaaaaaatagacttcaaacagattgaataatgtctttttgagaatgtttttaactcatcagaaatttaaaatggtttggacagtaatatgtatctgacgcatttagaagattgaaactaattaccatctcttgagaaaacaaagttacacaatcaaactctttgtttggcataggtccactggcctaaattttttttttgttcccatttgcaaaaattagattcgaactcgtaaaacatatatatcaagtcgctaatagccattaaactcatttactggtcaaactataactgttatttgtcaaatccgttattgtttgaatatgtctatcctcaaaagaagatctcgaagcagaagctcaagtaaaatttatatatgtattatgaatgtatccaagttttgtccataagaattcctctaatattaatagctaaattaaggaaacacctataaaccagatatagatgattaaacttgttataatcatttactataaataggcacaataggagtatatttgattaatcaatattccttcttgatatttcaataacgattacctaactccattggcactaatcttttatttttgtcaccaaatctttaagttcatttacgcatgagatcatcttgtcccctttcagatctaatttgtcacaatttctttaaatttaattaagatgccattcgctttaaatttagacttggtcaatgattataattataatcgatcgactcatcaccttttgagtcgtgtgactcgtgcgtataaaaaccatttttgttgtcagatattttaacttgattttgccatctcttcactattgttacatcagtaaatcgcttcgtaagtggagattaatttgcaaaatttggaactaattactgaccagtgatccactctatatatggttgtattagtacttgattggcaaataacaacgaaaaaacttaaataaaaaaactgtgttattcttaaatttatagtatatggattagttctaagagtgtggttgggaaatatacgaaagtccaagaatctgattagttcgttcacaattgtatagggatgttgtcactaattttaaccaaattatacctttttatctttttgcctaacatttttttgacgttgcccaaaacgaagcaatgagttgagggttagtggtaaaataatcaaaagattatatgcatagatttatgtg

SEQ ID NO: 32050 - DNA, 608 bp, Arabidopsis thaliana landsberg
ctaggtttcagaatgatactatatagttaaagagagtaaatgcaacgcacttatgcctttgagttggtaaattatatggaggccacatcaatgtccatgtggtattacttaatttaggtattgagcctactaataaaacgggaaaatcataaatatacatgagtctggaaatctaaattttctttctatacgtttcaagaaaacttttcttagttttccttcatcatcagaaaacattttatattagagatgctatggcgaaataacaagcagctgatgctatatacaaccatattttgtactttgaaataatggtgtttgtaagatccaaaatgcttttacaatgtgattcgagcttaaatgattattaccaatatgagaatttttgaaattaggctacaaagaaatggtggactaataggtgcaatttgttgggaagatctatgtttaaaaattgaagtaccttatagtaaaacttatatagtcctgtgaatgaagacaaactatgtagaaacaattgacttagctactcttacgggtgaccggaacgcgcagtttggaatcgatttcttggtagacgaaaatgtcaaactgaagacaggtgacat

SEQ ID NO: 32051 - DNA, 554 bp, Arabidopsis thaliana landsberg
  unsure (1)..(554): unsure at all n locations
cccaggtatcttcttcttaattctttcctcttgtgttttgttaactttttttctagcattctttttctgttgttcttgtcacttgttttgttttctggtaagagaatagaatcttgttgtaataaagttaaactctgtctttcagttgctaatctaagctttggttccagtagatcttagggtccacacattttactaattaatccactctctctactttttgaacatggatcatcacacctttttggtattataatggatctctttgtcttttgcttttaatttaatgtatttcggttacttactaatcacctttttgcatagtgaattgggtttagtttaatcaccaatctggtcaagaatctgaatgattcataccaaagtacannnnnnnnnnnnnnnnnnnnnnnnnnnnnacaaaagtctttagattcttgatctggattttgattgacttttggtttttgatcanggatcatcaatccaatggcttagatcttatcagcttttccaacatgttagatgagagtgcctaaccactcatcagtcattgg

SEQ ID NO: 32052 - DNA, 1114 bp, Arabidopsis thaliana landsberg
gcaaatgaatccaaatcatctattttacaatatcatatacatgagatcaaattattgtatgatccaatcctaagattttaaatgttggtttttatacagttcaaagcaattaggttttgttataatcatgagttgatatagatcaaataacataatatatggagggatatcattagaccaattagataaatctaaccttatctctttaactgataatcttgtttatgaaatgtggctaacttaagtctattaattgtgtctaaagggtatcttcctgttttgctttacctctggcattttattttagaaaattcaatggtggactatgaaacattttttaagatattacttttttgtcatcctgttattaaattaattatcaaaatctgttaagctcttaatgttaatgtatttcctcttgtttataattacgttgttagactttagatcttgacgatgatactgaaaagaattggtagtttgacttgtataaatcgaatatgtgaactagctgtgttgttgtttgctagtgacttgatgaatgattgccgcatttttttttaattgaacatgttagttgtgtgtatatttgtgtcgtgtgtatatttgtccgcatttatataatcgagttgatagacacaaaattacttccaacactcgtataacctatatagccagtttaaacttttgagtctgaagtatataagtttcaacccatcaaataaatagatgggttatattctcccataagaaatctcgaactgagtcaaccagttcaattaatctaatggataacattttgcatgtatttatggcctcataatatagaaatacatctggaagcccaagcccaaccttctcccacttatactcagagccgacatttggtgtcggcaacgccaatatattattgaagaagttgaaggaagactcatgttgtgtagcttcagagaatgatgccaaaaatacgagaactagacagacccgtgagtgatatcaattattttactcgtcgacacagacaaaaggaaaacacgcttaccatcaaaaacctcttactcaatgaaatgtgaaacctgatcttcatttttagcaacttctgagccaagttttg

SEQ ID NO: 32053 - DNA, 842 bp, Arabidopsis thaliana landsberg
tttttattattgcaaatacgcacgacataaatatttgtgatagatgttgtacatttatgtatgagcaaatgatagagcttttattataacctatcctccgctcaaccacccaacctataaattctacttgtgaattattggtaatacgaatcatctttacaattttgttattatgaaatattgctagaatatacatgtatagtctatttataggcaggcatagtcattaatgtaagggatatgttcttctcatttttggaatcatcgtataaataaatactagatgcatggttgttctaagtcatgtgcaagtacatatttgaaaaacagaacaaaggaatattccggattttccccctatctcctgtattttatgggtacaatttataagtttatgtattttaaggatactaaaaaatcatgtattttattggacatcaaaaagtgtttgtattttaaaggaaactagattctgacccgcacatacgtgcggggtttcatattttaagaaatgtattagaatacatttttagtgaaagatattgtagtgtataaattataatgtgcatagaaaagtgtatagtgttatttatgatacaataactaaattttttttattaatttatattatttatatttcatttgtgttttgcatagtaaatcgaatgttagatttgttttgatttgcggaataatatagagatatttggaaaatctgtgtatttttgttagtttgatgtatatacaaatgaattgtttttgtttgaaatttgatcaattagatgatataatgtaaactttactccggtgtacaccgttgttcgatttttttgtaactaaaa

SEQ ID NO: 32054 - DNA, 1059 bp, Arabidopsis thaliana landsberg
actctttatcccttttttggataaaaaatagatttaagattttacatttatagtgttctaacatattctagtcggagagcttactccgtcctcggttcagactacagtaaccgtaagatttaagccggtgtgcactatatgtatgcgaatatacatataggattagtgtgtagtggttgagatgctctatatagcatggactttgctttttggcaagggattaattgtgcgtggctatcgctgacacaattgttattcatagttacatacttggtagatcctgattgaactaaagttgtaatgcaaaacccgtcaaaagcgtcgtgagtgggtctcatcctttgtcgcctgggggttctattccataggactgtctgctaggaacagttgggtgatgctttgggaaaatgatctctaactagtttcaaactattcgtttcatgtgtcgtcgtaatacttcttatatccttatctgtcggcaaaaaatcaccacaacaaaaacagttacgacaaattttattcacgctaataaatcttttataacactagttactttttcagttaccaaactgttttttttttaagttttttttttaccaaattgttaatgtgtcctagtgtcattacacgatggaggatatgaacaatacaataatataggaatagtttgaaaaatacaataattattactattaccttttcattttcaaatattagcattaagaaatcaaactaacattcttgatcgattcaaaaagaaacagttacgaatttttctttcgctaaaataaaagaactatttttcttggtttaattatagcaatcccaaattaaagatttgtaggatttttggtaaatgatcgggagacaatgatttccactttttattcataaactaacataacaatcaaacataaattcgtcttggacatatagatctaagtttatatatcctcccaacaatttttccaaactcaactggaacaataaatcaaaagtaaaactgtagtagtaacgaataatcatagttagtcaatacatttgctagacgattgatct

SEQ ID NO: 32055 - DNA, 415 bp, Arabidopsis thaliana landsberg
taccggagttcaaacctttatctgtatatcacagtttcgatgtggtttatggttggttcttgggtgtttgcaccatttatattcaatccttcggggtttgagtggcaaaagacagttgacgattggactgattggaaacgatggcttggagatcggggtggtataggcatcccggttgaaaaaagctgggaatcgtggtggaacgtatagcaagaacacctcaaacatacaagtattagagggaggattctggaaatcacacttgctctccgctttttcatttatcagtacggaattgtttaccagctcaatatctctcagcgcagcaggagcttttttggtataaaaaaatggttcttcacttttcatgcatcaagagctttttatgatcctttagtctcagtctcttttttac

SEQ ID NO: 32056 - DNA, 684 bp, Arabidopsis thaliana landsberg
tggaaacattcgcatcctcaccgaatagacgatttaaagatgtgtgtatgtgcctacacttctctcatgctgatgtttagactatttttcattgttcttctccctacaccagcatttcccttttgcatcatcgcaacaaattcttcgtaatcaatccgtccatcctgtaagaaacaaaaatagaaactctatcagcaaacaccaatggtgaagagtggaagaatcatgtcaagaggcaaagcttacgttgtcttgatctacttctttgattatgtcttcaagaaaaacatcggtcatcccatgttcaatgcaagattgttgcagctcatcaatggtgatgtaaccacttccatctttgtcaaagtactaaaatgcagagacaagatgctcttctctctctagtttatttagatggatcgtcgctgcaataaactcgctgtaatctattttaccaatattctacacattaaaataagatacaagacacagagtatggttatagtcatctatatagcgaaatgaaatagaatatttctcaaaaagatgtatttttaccgcttacataagatcttggatctcggtgttttttaaggtataaccatatcttctaaagccagctttgaatatataaaaaattattgcacagctgttatcaatatacattgtcttaaacatttttattaa

SEQ ID NO: 32057 - DNA, 851 bp, Arabidopsis thaliana landsberg
actcttactaaaatacaaagcaaaagacaaaactaaaataaacgaaaatcaataatggatgaaagaaaaaaagccgttttaaccaaagttttttggtttcagctttaattggtcttggacagaagagtttaggtaacgttaatagctttttaaaattttattttgagatgttttcatatgttatgctttcggagaaattctatcaaattgagtttctattaaatctccttaattatgaaaactgggtgcacatgtgcttgtctgtctcttcgactttatttttttttgttaattaaccaatctttattgttgttgtgtttaaagtgaaaatgccttttagttttaagttatctgtgaagtaccaatcacagggattttgtaaggaagccttttatcatcttttagatatcaaaatgatatttgtatatcccatgtgctcccctctgtgcgcatagcctacccatcaactatctcaattatttagcaccattataatttcatatataatgcccagtcccaaaaatatagacaattaagcaaagcgaaaattatgttggtttttcttcctatcataatactgaaatttgaacttattctgtttctatctagtaaagtcgcgaattaattgatcatttgtaaaaaatgaaattagtattgatgctttctctgcttattttcattttatctgcttatgtagttcaatgcaattttttattttcttcaggaattagcgtatatattttaacgtcagtgtaaaccttatttcaataataaatatcttgtaggggatattattattctgcgtattcagatggagttataaagatagaaattgtatgaagcttctttgt

SEQ ID NO: 32058 - DNA, 648 bp, Arabidopsis thaliana landsberg
caaatcttggataaaagttagattcatcgctagaaagaagaaaccaggtatcagaggtaggtgggtgataatgattgcaaaatgagggattttgaaatacaccttccaccggaacagaaaggaggagacgaagaagacatagtaatcatcagaataaggaagattcggctaaggcaagccattgctccactccactgggtactactgctacatcgctgaaacgaggaacagaaagatgttcccgatgcgttaacgacgtcgtttagtaagttgtgtccttcgaagcttttcttttatcaaagttaacttagaaaaatgccaaattttcaaaactaccccaaaaatatatatatttttcattttcggagtatcatcgttttggctcattttcatttatgcattcaaaatggagacaaaatatgaaaatgatttgatcaatgtgtaagcaaacgtcaagtggacactaacgccaagtcgccaagcgatttgccatattttagtattcatgcaaaaaaaagtaaaaaaaaaaaatagaatgtatgaatgaatggatggatgatgtgtacacacatatagattgctaaaaatagagaagaaagtgcttgaaaaaggggatggttaggcgaattttaaggtttgataaaaaag

SEQ ID NO: 32059 - DNA, 922 bp, Arabidopsis thaliana landsberg
tttctttttttaccattctttctcacaaggtagattgtctgctagagatagctcaaaaaaaaaaaaattccttttcgtagcttcatcgacgatgtcagaattatatagaattaggaagaagatgcaaaaaaaaaataactaaagctataaagtcttttaatactgtatttttagattcaataactctgtaaaatgtatttcttaactatttaaaaaataaaataaatcattatctttttaaataacctaacaagtgaataaataaaaaatgatatacgaacacatgattggatagtagctttttttgtttgcaataattagtaccaactaattgaaataactgcggtgggagaattctagggcttggtacctctctttgaaaatataagtgtgtatgtataccaataagatagtggttctactatttataattggtggaatgtttatatatcacagtattagatgttttttaaaaataaatttgcctttcaatttttgggtgtagtgggcacattttcctcacattcactttggattaaagctggatggcaacaagaaaggcaagcaattagaccagtcagttgcaggccaaaagtctaatggctattactaaagcctttatatatatacacacatatatacacttatacgtatatatatgtgtatagatatatatgcgtgtgtatgatttatgtttatctttgtacgtacgcattaatgaatgtgtaagcagagagctgatgatggaaagagatcaggcgaggaagaagatgatcatataaccttacatatatatacatgtatgaatatatgttcccttcttttttcttgcgtgtgcttcatctataacttcatttctagttttattctcctaataagtgaagtctataaatttgaacctaaaatgtttaggaagaatctt

SEQ ID NO: 32060 - DNA, 601 bp, Arabidopsis thaliana landsberg
aatcgatgtacagtaaaaacaaaaattcacctgtatattgtatatatgtatgtaccggtattaataataagtaaaccgatcgagactggtcaagaatccaacgcgaacggcgtttgaagaagatcatacggagcccaaagcgcgtctaaaggacaaggccgaccagcatcaagcctagcccatggcttacctttcccactccaatgcaacagactcaccggaccaggatggagatctctacacagtcctctgaaattatcacctcctaaaccgtgttggttccaccgatgattaaccggtttaatcaaaccggcaaaaaccaataaaaacggtggtaacgaaccaagctcgtaaattctcattctcttttgcatcgccatccactcttcgatgcgtgacgtgtacgcgccttcgcgccaccgggaaagatcgatcaccatgactccagtgttgaagtagcatgctttccgatcggcgaaggttaaagagagagtcggattagaccagaaggttgatgtgaagtatgaagtgaaaattggcgttgcagtattccggcgcggcgaggactgaatcacggccgagatctgtggcggcgaagttt

SEQ ID NO: 32061 - DNA, 810 bp, Arabidopsis thaliana landsberg
  unsure (1)..(810): unsure at all n locations
aaaaaaatgaatttaataataaatttgcttatgtcatcacctactgactacgtatctccacggatggtgtatgtcctcataaccagacaaattcagccagccttgcttttctttttttcctcctttaacaacccacaaaattaataaaattaaaaactcaaactttgatttgtgtaattaaactacattctctctgaaattcaaaacttgaaaacaaattattgtcgtcaaaaaactgtattaacaataagaagtgccaaaaaaatataatagtgtatggaagagcttaatcctatcttattgtgagccaaaaaaatatatattctatttcatttcggatatatttaaagataattaaccaaatagtgttttaaaatgtcaaatgtcaaaatatgaaatttatccttgcttcactcggaaataaaactttgttatgaatataacaaacantntcgtttaaataatcaattaacaataattttagatggactgcgtagaatttgttcctgctttggccaatttttagatgaatttagtttgctctatgatatgtcttacaacattaatttatcctatctaagatcaatgtatgctaatgttatttttataaacttttttttggattggacaatgaattttttttttgtaaataaaatttttaannnnnnnnnnnnnnnnnnnnnnnnnnnnnnnnnntacgtatgtgagtgaatggttaacattctttaaataataactaatcaatctttaatcacataaaattagttgaataattggtacttattaacgaactactacttaatgacttta

SEQ ID NO: 32062 - DNA, 868 bp, Arabidopsis thaliana landsberg
gttcataaattcttaacttttagggtttatgaagaattatcgtggttcttccttgttgatctgatgttttgactcgtgaaaaaatcataaattttgttattccttcattgtttttttctatagatgtttcagatgtgctacataatttgtcgattgatccaacaaccaaggctttagctcctgattctgaaacaaaggtatttttctgtggtttagtgttcaccttttgtttagtgattcagaaagcatgccttttggtttcaataagagtaattttcagagtgaacttataaaggctagtgtccattttagttgcagggggcttatggcggaaacggtaatgacttcttgctcaatgatgagttagtgcaggctaccaaaattggtaaacctagtcttttgtctaaagatggaggtgtgaccaaagacaagggatccaaccttaagaaactcgggtaccaaagtgcagcttataacgcaaagggttcatatgggaagggtgcctatgcttatgggtactatcccccagcatatcagtacccaagacatggttacactgggagctatgcttcagggaaaaccaatcttcagtatcagtacctggtatgttcttatttcattcattgagctgtagttataatcacttggtatgtaatcttgacttgtttattcgtttaatttattatcatcttattttgcagactcagcactgagggatcccctcatgatttccccaaagcgcaaccatgtgaggatgaatctcgtgctggtatgggagcagccgccagtaagacataccttgattttgacgacccagagtgccagcaaactttcatgcctgactgtattgatgagagttcccttcgat

SEQ ID NO: 32063 - DNA, 2045 bp, Arabidopsis thaliana landsberg
  unsure (1)..(2045): unsure at all n locations
ctgggtaatcctagtgccatgttgtgtccctgcatagactgtcgcaatttgtgccatcaaccggtagatctagttttggatcatctagtgattaggggtacggaccagaaatacaagaggaatgcttgttggagtttacttggggatgtaaggcctgataagccatctgagaatctgaactctgtttttgaagtttatgatttgattagaacagctttctttgatagtgaaagcaatgcacagacccatagccacaatgaagattcaagagatgagattgatagtaaagaagaatatgagtttaggaaaaactagaagatgctgaaactccactatattctggctgtctcaacttcaccaaggtgtctgcgcttatggggctttacagaattaaagttaagagtgggatgtcggagaattattttgatcagttattgacaatagtggcttccatgcttccaacggataatgttctcccgaggtcaacaaatgagatgaagagtatcttgaagatgtttggttttggatatgatacgattcatgcttgtaagaatgactgcattctttaccggaaggaatacaaggacatggaaagctgtccacggtgtagtgtttcaagatgggaaagggataaacatagtggtgaggaaaagaaagggatcccagctaaagtacttagatactttccaatcaaagacagatttaggcggatgtttagatccaaaaggatagctgaagaggtgcgttggcattcagacaattctagttcagatggaacaatgcgtcatccggttgactcaataacttgggccactgtgaataacaaatggccagagttctcctctgatccaagaaacctccgcctcagactttcaacagatggaatgaagtcattctcgatcgagaataccaagtatagcacatcgccagttctattggtcaactacaacatggagccaacaaagtgtatgaagtcagagaatataatgttgactttattgattccggggccaactgcaccaagcaacaatattgacgtctatctagcacctttgatagatgatcttaatgatctgtggaatgaaggtattatcgtttatgactcatttctaaaagagaattttacactgaaggcaatgttgctgtggagtatcactgattatctagctttggggacattagctgggtgtaaagtgaaagggaaacaagcgtgtgttgtgtatggaaaagatacaccttttatgttataacagatgtgagcaagataacaaaaacgtaaagaacactacacagatttaacgtggttcaccaacacttgttgttggcatacatccacgggcaaagagacagattttattactggagaatacagaattcagaatacaaggaggctaggttaagaagagtacttatacaaaagaaaccctaattaaccctaaactgattgggcctaaagtcatgggcccaatctattcaagtcatatctaacaaatctccaccttgacttgaatcctccaaacagatgtacctgacacactgctcacagtgttgtaccagacttcctcatcagacagatgtaccagacagatgtaccagacttcctcatcagacagatgtaccagattcagctaccaaactgttgtacctgatggattaacacaataccagaagtaccaaccaaatgtagaagacagacgtaccagaattctcctttgcctcagatgtcccatcagggaaccagatgctcaacaagccaactgcttcatcaagacagatgcttcgctgagcgagatgcttcttcagaagtttgatgttttgtcgagcaagactgctccaccaggggcctgatgcctcatcagagannnnnnnnnnnnnnnnnnnnnnnatgcttcatcagaagccagaacgccccactggggccagatgctccatcaggagccttatgcctcttcagaggccaaatgtccctacagggacctgctgccccgttaggggcctgttcgcccttcggggcgattaacagcttgagatatttagcaagtcta

SEQ ID NO: 32064 - DNA, 698 bp, Arabidopsis thaliana landsberg
  unsure (1)..(698): unsure at all n locations
attctttgcttctttcgcatcatacgaccaatccgtgtatagtatttccattctgtttggttacaaataatactacaaaattggtgggcgtataaatatttatttgtaagaggatagaaatcatcgtttatgccaatgatatcaacaaaaaaggagtgaaaatccaaacacgaggtaaccactcgtggtggcaaaccactttataagatagcactcgagaataattctacaaataggcaaaagctaactgtttattttcaaaaaactaaaatgctaaatgtttatgcgtgacgtctctttttctgtctgctcgtttttacaaatctatatgatgatccaattcgaattaatattgcaatattttaatatgtggatagagtgtgaaatggaatttcaccaatgtctatcattcgtaatggatcatacggaaaagccatcaccatatggaaaactttatacacacatcattagcacgatccaagtttcaaaagaaaagaaggattaataatattattcacttattaaacttatcctgttgtagatagtttcctcctagtagacatttcaatattacgatcagtgcatctctataaaaatattggtgtttaaatacttttcatctttattgtacctaatttgtggaacttatctcctctcactctgtatctcatgtccancgaaacagtctcacgtacatc

SEQ ID NO: 32065 - DNA, 567 bp, Arabidopsis thaliana landsberg
agagacagagagagattatttgaatttcagcgggtctgttattctcttcgttagaaaacttcgaacatcattaacgtttaatgttagtcctatagtttagctattaacagaaacaaccttagtgttttttatttcttcttataaatatctttaatttatcacaatttaacattccaccaaggcaccacttgaaatatcatttcacttgctaagttaggatctataaacagttaacatacatgtaaaagttatgtgttgttttgctttcaagaagcaaataatagacccgttaacaaagcaacctaccggtataatttgatatgaaaatgaccttgatgtatctctagaacctaccagcattaggttttactattttcttttaatagggtttactggtaagcgaaaggtggtttaacagttaacctcacaagtaacgatatgttgattttagtagcttaatattttcctaatagaaaccaaaagaactttgtattaaatttgaattctgactttagaactttgcattaaaattagaatctgaccttgatgtgtatttagagcctacca

SEQ ID NO: 32066 - DNA, 700 bp, Arabidopsis thaliana landsberg
  unsure (1)..(700): unsure at all n locations
ttctttgtaccagacctgcaaagttcatggatatctggactggttcctctgttaactgcaatatgtgcaatctcagaagcttgtaatggcgagggtgctatggtctcatttgaaggacatggttcattcttttcttcaacctttgaacatgatgtcttcaatggtgaagtatctacggattgagggtgcacacacattgtatgagtttgtgaggctttttttcttgaaccctgaggtgattccaccgcctcaaaatctcccatgctctctaatgcagcttgattcgagtttttgctcttattaacaaccagagtatctgtagtcttgtaattttggctctctttttcagctgaagcttttgcctgaacatctgtgtttgccttggagggaacttgtctagttattggtaagtctagaccaaagtccaaatcgtctgacttatcactcttactacttgcacaaatttcttcacagtccatgctcttggtcgtagtcttgcttcccttcttcggggggcttgaaccaagatcaaagtcgtctaacctgcttgcagaagaacataacatggcgttaagcaattttagatgacatagataattctaaaggaaattgatttactgaaggattcatacgcatcacagtcgtaagagaaggcaaatggattctttttctggtttgaatttccactangtttatcatc

SEQ ID NO: 32067 - DNA, 2250 bp, Arabidopsis thaliana landsberg
ctcaccatccggataaaatccaaaccatgtggaatcattaggagtaataacctcatcgtcctgaaactgtaaaaaaaaaaaacagagtcatcaagaagggaatgagaagatagttgaaaagtctagatggttttgatgagaccaaaccttgacaagaaccaggttgtgtaaactggcgaaacggtctttgtaaagtaggattctttggtttggtatctcatcggtaagcttacgtagatgcttaaatctttccaagttctgtttcatatcctgagaataaataaacgagctacatacattctgctaaaactatatgtaggtggtttgaatatcaatcactcatttgttgattctgcaagttttcttataaacaaatggtgaatggacttacattatggattttgtagtaaccactaggagcaaggtgagcctgcagagtcattgaagattttttattattttctaattgagtctttaatcatgatatatatagagaaagagatatatatacttgaatggtctcgctatagagagctcccttgatcaactcattaaatttcttacatgctggatcggacgttaacttaaaagaaaagaaacaaaacaaaacaatcgttgttgttactttgattgattaaaattaaattacagataaaagttttagataatttgaggaaaaataaaaaaagcttacaccacaaagacccctaggaagagaagaaatgccagcatgaggaccagctaaggatatatagttgaaaacaggaggtccaccgtcgcagaactcgatcaagcctcgagccactaggttcccctgttccattattaatcaacatccatgaaacttaaacactatgtaaataatgatcaagaacctattttaggattttcaagaaagtgtatcaagaacctgagatcttccaacaatgttgtatccttgactcaactctttcatttgcttcaccttctcacacgctatttccgcttgtcgtgtaagcggcattaaccatgaatcggcaactccatttccaatttctctggattcattagaacaaatccatcaacatagttgagccactttggacgttatcgtcttatagatagcaagaatacataactcttcttctacatgtcccgatcttttggttatcaaaacgcataaactattttgtggattgacttacaagcaaaagccaggagagccagagagggtagtgagaagctgtgtgaagttagcatccctagcattagaacattgagctgagatcccatgaagcattatgaacggaactgaaacagagacatgaaccatggctagtaatgcaactcaccaccgcaacaccagaccgcttcaaacctttctctcccattgaaagacaagaaagttgcgattggcgtttatgtttatagtttttttctttttctttttttaatgtttatgtgtctccaagaacttttgagatgggaatatataagggaatagaaagagtgtgtgatgtggttggaagttgcggccaagtaagaaagaattagatgacaaaaatggacggtgctgattagttactatcttcttgcagttgcattaactctcttcttcaccatcttcttcttcttcctcttcctcctatattatcttctcgctgcctcttttaatagggcacgtatatatgtgtctatgcatttataccataattttcatattttgatctttacaataacttatatagaaatatgttaactcttgtatagaaatatagaaagagtttgtttcacaacaaatttttgtgaattaactcttgtatagaaatatagatttgatcatttatttgtctatttaaatattttaaatttctgtttatcaatgaaaattgattataagatttagaaactacttgtgctgtaaactttaaagacacacagaaaaataataaaataaaaagatatatgtgaatgtgtgttgttgtcgagggataaattgtcactgtcacttgttaacttattgtgcttctttcgttagccaatcacatttctagatcttattttggttccatctccccccaggtaaaaatatctccaaaactatattccaataaaatatatttgggagtacatgttttgacgtttgatatcgaatactatttgttataactttgtcccatatttggaatgaaaaaattaataagggaacatatgaagtataagctaccaagaaatcaataatcccgaccatactctctcatgccactactt

SEQ ID NO: 32068 - DNA, 706 bp, Arabidopsis thaliana landsberg
gtcagaccccgtgcgatgtttatgccattgaacttcagaatcacgtcgccgggctcaacccccgcgctgtctgcaggggcatcgttagcaactttgctgaccatggcgccctcggctatatccaggcctattgccttggccacgtggacggacacttcgccgatctgcacacctatgcggccacgcgtaactttgccatgtgccttgagttggcgtaccacacgcatgacttcatcaatggggatcgcaagggaaatgcccatgaagccaccactgcgcgagatgatttcggaattgatgcccacaactttgccgtccaggtttataagcgggccgcccgaattaccgggattgacggcgacatcggtctggatgaacggcagataatcacctgtatcgcggtttatggcgctgacaataccggcggtaacggtggagtccaggccaaacggcgaaccgatagccagcacccactgccccttcttgagcttgtctgaatcgccaatcggcatcggcgtgaccccatggatgtcgatcttgataagagcaatatcggtgcgtggatcggtaccgatgaccttcgccttgtattccttgccatcggtaagtgtgacataaataccgttggaatctttcaccacgtgggtattggtcagaatatagccatcgctggaaataaagaaaccccaacccactccacggggta

SEQ ID NO: 32069 - DNA, 554 bp, Arabidopsis thaliana landsberg
agcaataccatactaaggttcgttttacattcttaactccaggtgttcttctagcttcatttaactgattaagtttcatactttccttttgtctttaagcatcacagcttatacaactggtcattgggaagatacacatcaagcaacaagcaagtaaggtcacagatacaaacctggaaggatcggcgcgagcagccaaccaaggctcaaccatggaagctccaaaagcatccacaatctgtccttgaacattcaacttcttaacctcaacgccattgacacgtcgattacccaaagacttacaacaatcagctagattagcctgtttcccaagccaatgaagcactttgactccatcctcaaacgccgcagggtacctattctcaggcgcaagcctataaccaacggccaatacaatgacatcacagactttagcaattctccggcaaaagaagtcattagcagccgaataagaacttgcactaacccaacctgcaccatgaaactgcaacatcactggtagtttccgagaattcctcttcgcagatggcgca

SEQ ID NO: 32070 - DNA, 1032 bp, Arabidopsis thaliana landsberg
gtactctcttcgaaaacaaattgtatcccaacccttactttctgttgcaccgcgtgtaccaacgcgcacataactccgtatatatttaatttattttttttaaaaagggacgtctgagatagtgatgtaaaagcctaaggacagttttagttctatgttgtcaagtcatttgtaatcatgtctcacctagtttataagtatcttcttgatactgttgaactaatggtgtttgttatcaccataataagtagtctattattttatagtaatattgataaaatttaaatgtacacaatgccatagttgaaatatacaattcgttttgatagaacaattcgtaacaaactaaactaaacaatgttaacaaaaaaaatagtgatgaatgaataacaaacatacatcaacaaaataaggaaaaatagcaaacatcattttcttttcttactatatcaagtgatagaatcatttttcccctaaagtcaataaaattaacgtagaaacttttcttcaattgtttataaacattaatagaaatgtgttattcgtttcaaacttgtctttaaaactatgtgtcgcgcatgttcaactccaagttcaacaccgatcacatgtgtgtcattcataatccttttttgtttcaaatgaaaaaatgaaaagtagcttgttgatacaacttgatagaatttgatagttttataaatcgcaatctcaggaataaatattgggaggaggaaaaattgtgttgaaccctcgaatgaataaaaaaacgaaagcgaagcattgaatgaaagtggggctaagttctactgcaaagagagtgagagagagagaaaatagtagaagaagaacaagtaagtgaacagtgtctgaaacgggtaaaaagaagcccaaagaagagcaaagagagtgtgaagaatacgcgcaatgggaagagcgtgaggcgcgagagactttccaaaagaagataggaaacagatgtcggggcattaaccaattgggcatttggatttgtaacccgttttgcccgggtcc

SEQ ID NO: 32071 - DNA, 354 bp, Arabidopsis thaliana landsberg
aatgtcgtggcggcttgatagaaggtatcctacgaaagaaaatggtggagaatatagaaggttctcaaggagaagaaggaagaagaatgaagaagaagaagattgaagaagataaaaactataaaaaaggttagagaagaggagaaaagaaaggttcgtgaggaggaaacaaaaaatatgaagcggtggatctagggtttctattttttataagggatccccttttagccgaataaaccgatcggttttgatgaaccgaaccgaaaaagtccgaataccgaaatcaatttaaaattccaccgatcgggttataacagtaaatcggttcggaaccgaaaaccgaaatcctcggtt

SEQ ID NO: 32072 - DNA, 962 bp, Arabidopsis thaliana landsberg
tattttccagtggtcccaccacttcagttattataatgttcgattcctgaatttatgattttgaatggaagattcgtgttatggatcacactctcattcctgtttcttcatctccacttctttcgaaaattgatctatgttaagatttataaattagtttggtattaacctgtatacatttgtcttttaaacctgccaatattattcttgtgaattacgttcttgcctgtttaaaagtttggtggtcatcaaatttttggcttaatatcgtttcgatttggtatgaattgaatagaataaaccaagtcattggatgatgtacaattaggtttctccatttcgctattagtaaactaaatgattaaaaggtgtctgaactgttagtgctaagaaaaagacttagtgctataatatttttaataaacccaaatcatttacataaattgaacttaaaatttaaagatggccatcattattgttataaaatttgggagccacaagtaggtaggggccaaagggaaaatatccatataatgatcatcatcagttatatttggagaccaatgattgtttgtgaatggatcactaaattgttgtaaaaaagagaaagaacgaatgaatcactattttcctggcgggaattggtaataacaaaatgattttttttttccatcctatcaaacatgaaacgaaagaaagagtatagtaagtgggatttattgaatgattgatccgtctctagctacttccattgtcacattaacgttttcgttttcgtagtaaacaaagaaacatgttttcaactaagtagtaagacagaagaaaaaaattctagaggaacaagtaacgatcttattatgatatatactaacatgggttactcattttttttctccacgacacaagatttaacataaatcgtatactatataaagattacgtaaacaataatataaaatata

SEQ ID NO: 32073 - DNA, 1027 bp, Arabidopsis thaliana landsberg
ttttaagttatgataaatcattcgagtttatgatcaattatgaaaactgatgaggatataattgctcttaaaaagaaaagaaatgtaggaatttggaaaaaatggtttacaaaaaaacaacaacatttattatattacatatatatatatatatattatcttttggaactccaaaaatagagaaatgaatcatcaccataattctttcaatcattttgtcattttgcaaatgaatgacaaaataaaataaaaataccaattctacaaaaaaaaaaaaaaattgtttttccaattctacaaattatattttcctttttaaatggtttagaccaatttattttatagcttctttatttatttagtttttggcgattctctataacaatcagagccttgattagaaaatatttttacaattttgccaaaaagaacttaaccagggctttcactgcctttcatcgccttacaaattacaatggttaataagtaaatattaactctgctcattttatcctgaaataagaatgatagccaagaattagtaaacacgccctatataactaggggttggaaggtgggcacaaggcaacatcaaatatttggtagttgctgtaaaatatttcagattacccttccaacttttggatgatattcaattattcataagatttaaccctataatatatttcaggctgtaaacgaaatatgtaatcatttcaaagcacacatatatgttctaaaatcacaaagctcagagaaaaacttaagaatatagaagagaaccaagtgtgatcttccacaaaatcatcagattgtcgccgagaaaaaagctctgatcgttctgtttccctccttcaccgaaaaaactatctcttcatgtcttgtgtcaatagacccaaaacattcagattgtttcgtttcgctcaaaatttaaatactgaaatcattgaaaccggctagaaaggattaactagactagttgaataaactaaaaattaggaaaactatgtgaccctcatctctcatg

SEQ ID NO: 32074 - DNA, 1042 bp, Arabidopsis thaliana landsberg
  unsure (1)..(1042): unsure at all n locations
gaaatggggtccttgattttttttgttcgtcatccttaaaaaaaggagatatatattaaggaatctctgcgatcatgataaaagattgggctacatgttttggtcccaattctaaattattttactctaatactaaagaagaaaccttatacaatctaagtcctgctcatgagtaaaacacacagatactagtcgcgagagtgaagcaaaaatgctcaaatggtaatgaccttgactttacttgtaggatttttaacgtgtaatccactactactatgtcaatctgacaataacttaagaacacaaataaatcagatgtagtatctaccaaaaacaacaagatccggttttcaagtattaccacgtgatacaaattggtccataaatggttataaaagtggctaactcaactaacaaatgatataacttcagctacttcaattcgaagccacagctacttttcaaaacaggttaataaatttataatttatccaaaaaatttcctcctaattgtaggaccaaccaattaagatcaatgcacaaaacagaatatattttcaatatttaataaccgattttaatagggaatggcacaattgtaaataagaacaagcttagctgggatgttgtttgtactgtaaccacatgcccgattacaaaaaaaaatattaattttcaactttaatggcatgctacgtgattttaattcaatcacgcggagtaccactacaagacttacacgtgtccctgactgatttgttgttattttaaagtcaaaccccactagttttgactttttattaatcgttatggcctacgatatgcgcacacatgttagtaagatgcacacacttttgttaatcgtgcatacatctgcttacaaaaataaaaacaaaataaataccatatcttatacacatggttttattgaaatagacttttagtcccattttttgtgtaacgtaaattgacttcttctagtttttaaaaaaaaccgtttttgagcacataatgaantatatatagttattgtgaaaaaacc

SEQ ID NO: 32075 - DNA, 1281 bp, Arabidopsis thaliana landsberg
ggcttgtgaactgaaaactggtcgtcggaggaaaaaagactttaaattgaaatctgtgagtaaaaattggatttaagttaagatttttatctaaccattgacaaattgtccaaacgcgtctttcgactttttcagatgaaaataaatgacaaccattaaaagttgggatttacaggcttttgagtgtccaatagtttgaatcttaataatattttttttgaggaatatataaatagaattctagactttttggtatggggaaatattttctgaaaaggactgccaatttatgttctatgtataaaatctcgttggaaaacaaattatgacgatagtacaactcatgatggactaattcagaatttcagaactatatagctatatagtgtttactgtttacatcttttcaaataatattgacattaaaatcttctacattatacgtgttagaaaagtagaaactcataaatggatttgatataagctaatgcataaataaaatcatatgaaagatatatctgccactttggtgtattttcactaaactatatagtcacatagatacaagtgcgacatatgaaataattatggaaaaaaataaaatcaaattgagaataagaacttttaatcggaaaaaatcatcaacccgagttatggttattcttcacatgattcagattcatgaaaacacaataatattcacattgatgatctccatattcttccttcaagagagatcactatcacagagacatcatcgtgatacctcctacgatctccttggggtatctccaacaattcatgaaaatccatacctaaaatgaaacaaaaataaccaaagatcagatttcaacaatattcagaaatttggcgtttcttttataaaaacacgttatttttttatgttcttaccaaacttgttggcagcacgaaggaggacttcttggattaagtgttgagctggatcgccttcagggaaagcagagatgaaagattcaacctcgaaaatggcttcttggttagagaaatattcatacaatccatcagaagataggattaggaatttgtcacgtgacgttagcttgtgatgacataatgatggtgaacatgtaatatatggtgatgtcccgatataatcgatcctgaacatctctaaaagggcatcgttccatttaggctgcggcaaaaaaacactcaacattaaatacaataagattagtctaagttttggttcatattacaaaccccataatacaaaaaaatttatacataatctaacgt

SEQ ID NO: 32076 - DNA, 1632 bp, Arabidopsis thaliana landsberg
agagagctgtctttaattttattactaatttatactaaagacaccattcaaattctgtctaaagaggatgcttttagggtgaactttgtatagtgacaagtctcactgcaaaacggccccatatccagaaagaattctcacctccggcctagatctacgggctagtatacaccgcttgcctttacacgtatgaaagaatttttatttggagaaactagtaccaccatggtggcagagtgcctcgaacttgagacctctgtcactcatctatgagaaggagtaccactagaccatgcatggccccatatccagaaagaagtctctagctattttgtcttctcatgacatgcatattttgtaaagaattttataataaattaaaattaaaacacacatactaaactcatctgaactctaagtctctaacgaaaacaaaatagctagacttttgagtggcccttggacatacaaaaaatctaaaacaaaatgtaaaattaatcagtttctgtataccccaaatttggggtgtaagccaatttatagtttgctaaaatacatttgtatgacaaaaaacaaatgagaaaatgaaagtgtttgtgtaagataaaaaaaacaaatctgaatgtttggctaacgtggattctctaaaccatatgtgacctttgtttcatgtgaatgtactggactctcaggaaaatccatatcatcttcttgtgcccatgacccaacatactgttgaaccacaagaaccgacacagtagctgcaaagtctgatgaagcaagcaaatctccaatggcaccaagctcaggacactcactccaatcagttaaacccgcggtaagaggagacgacattccttctcctcttccaactataaacaaatcatgagaactgtccattgatctcactgctgcaacagtctcttccccattgctcactagtttttctatatacacaattgactcgtattccgcattttctgccctaaagagattaatgtagtcatcatcaagttgtctttgttttctatggtccatctttggtatctttaggtcactgtcattggtcgctcgtgttgaagctgtgtctgcttcatcttcatcatgaatgaaccgtaaaacagttagagtgatgccaggatgttgagccattctccatgcataagccaaagcttctctatcgtctggaccgccgaaaaacagaacagcaacttgaagagaaacagtgtttgagttgagtcttgtcgctccattgagtcctctatccacgagtattccgaccgaacaaggcgagttttcgagtaggttttggtttgactaaacggtaggccgggttggttgattccatgccttcatcaactgtgcgttgttggtgaaatggtatgattatgaatgagacacgtttgtcctctgctaagctacaaacatcttcatgcattgttgagtaaggtgaaatagctgttaaaggttgttcagcgacaaaggcagcgtgttgttcatagttctcaaaggcgtagaagatatgatccgattgagcttgagttctgttaagcgcgggacgatctgacttacgagtgttgcggacaatcaacatcaccgatgctcggccctgcagctcaccaaggcggagaa

SEQ ID NO: 32077 - DNA, 1146 bp, Arabidopsis thaliana landsberg
gacctctttgtgatgaactcgtgtggggattagctctcaccatggaatctcatctcgctgccgcagaagatgttgaatctgattatctcgaaaactttggcattgtcacaggacaagttatgacagctgtcaaagacgcatgtagagccgccgtgctccagacaaatccacgtatcggggaagcaatgtacttttgcgaactgaacactgcacctgagtatttgggtccaatgctcgctgttctaagctgaagacgagctccaatactcaaggaagaaatgcatgaagggtcgtttttattcacagtccacgcgtatgttccagtttcagaaagcttcgggtttgcggacgagctgagaaaaggaacgtctggtggcgcgagtgctctgatggttctgagccattgggaaatgctcgatgaagaccccttctttgttcccaaaaccgtaaaagagatcgaggagtttggtgacggagcaagcgtgctttcaaacaccgtgaggaaactcatcaacgccgtacgacttaggaaaggattacacgttgaggagaaagtggttcaatacgccactaaacaaagaaccttggctcgtaaagtttgagtttatattttcacgtgtcttcctttttgattgggcttcgaattgggcttgtgctcactttggtacaacatgttggagaaattataagtgaagaaagatgatagttttaaattgttttgagaactataatatatgaaccaaaattaatgtacacctacaaggctacaactacaatttttcaagcttttattgtcctatattaaaatatttacgtagagtttgaaatttcagtttttgtaattggtatctaatggatagcctctgatgacaaactagatgatagtatcttcatttacgtataaaaagttacaagataatagtagagtggactttaaattgcttcgaattgggctttggttctatacctctctggtacaatacaagttgggaaaattataaataaataaacctatttttataggtgagcataaaaaggaactttatatttaatttcttcataaatgaataagaaccaaattaaaagtacacctacaacttcgagattttttttttgattcctagtaaagaatacgcaaagcttttt

SEQ ID NO: 32078 - DNA, 717 bp, Arabidopsis thaliana landsberg
cacgtacataacctggaacaaaattttactcgttaagtattttaaaagaatacctttgttatgtaacttattgatattttaaattctaaatataattcctagtcgtatcgttattgtctgattatttttatttaaaatgaacatcctactaattagatgttgatagatccaagtgaaaataataaatattcaaaagcttagagtttataattttttttatttattatcattagttttcatgatgatgatgaagatgatatggcgaaaacaaaaaaaaaaatcaagatgacactatagtaaatttggaaacagtctacacatacaaatctattcacatttataacttttcataattttttgatatagttgaagaaaacaacaccacacaaaatttgatgcaataaaaacttttagcgatgaatgaatatgagaaagttgcaaatttttatataaatatacaactttgtcactaaattctcttactttatttctttaataagttcatatactaactaaattatgaattaattgaattataaattacatttatttatcttttttaagttttttttactttaaatctcacttaattctattaaatttcatactgttataactggggaataaaataaattattatttgatattatttatacatttgtaaaaattcaatgtagtagatttgatttgtcttgttactatttaaatgcttaaaat

SEQ ID NO: 32079 - DNA, 752 bp, Arabidopsis thaliana landsberg
gaattaatgcattccctaagcatacttccacaatgcagagcaatctccttattgtcatagctgtgttcataaacggtgaattcttggtattaactcagaaaggtacagatcaaatcaactacagaacatttcagccagacaaaaaaaatatataaaagtagaatctttagtattataccatacaactaaagagtcaagcaactcaaaatgctcttcaaagtattgcacacagcaataagtgtcgccgaccttttgcttcaacaagatagaccaacaatgcagtaaatcttttcttgtctgcatcatttacccaacaggttcgtaacagattctattaaacacacacagagggagacaattgtaaaaaatctcacttacttcccatcccaaaatatgaagcttatgaataacaagagagacaacatcttctttgcaaaactctaatgctaactgtacagcctgatcagcatttggttcagtctcaccatctccagaaagtattcctcttagagaagaaaaattcttctcaacttcttccaaagcctaaaagacaaaccagagaatacatttctgaattcttcaattgaaagaaatcagatttgccagaatcccatataaccaaaactcaaaatttaagctacaagcaaacatcaatcaaacaaatgagtaaaacccatttcgaaaattaagaagttaggcataaaggtacaaactttttggtagagaataaagagagaaccttctcgagggct

SEQ ID NO: 32080 - DNA, 1104 bp, Arabidopsis thaliana landsberg
gaggatcccctggctttaatcgattttgtagatcgagttaaacgatttggtgtttgatgagatttgaagaattgggtttgcaattttgttgttaaattgagatttctgtgtattggttttagattattaggtatctgaagttgtgtaattttggattgattaaagattttgttgaaagtttctaactttggtttttgtgttgtttagtgtggagcaatggtatgaattttgctctgtatgtattacccatgaaccaaattatattgtgaaataaatcttttatccttgacctgtattttaaactgattaaccttatctcccaaagaaaataaacgaaaaagaagtcaattaatttttctaataatggggataatttgggagtaactaaaaatctggagatgttaaacgaaaaatctggtcaaatagatcgcttaacataaacctcaacgcagatccaaaggaacaaagataagaacataaaccctaaatcctcactgagatcagcatgaggagattaccttttcatatccttgaagagattctcttcaaattagatccaaaatctctggcaatgatgcaatgcacggatcgatctatcaactcgcatatatccgacgatccttatttcaaaactgtatgtaagaattaaggactgtaacgacgacggagtgattcatggatacgactttaaagctaccaagtggggagtcatgggttggattccacggtggtacgatggtaaacgagacctttgtcagtccaaaccgtctttgacgacatcctcttcgatggaactagatgagaaggaggacgtcgacatgatgacgatggttaatgatgatgatgatgatgataaacgtgtctcctctctaagcaaagttatgagactgattagtggaatctcaccatatgctcagagcttgttcaagaaaaaggggaaagatacttggaaaaagattgatgattgaagaagaaacggaatcgaatatgatgatggatgagcctaattcttccaagttcctagacgtggagagaatcaacaaaagaagacgagtcaagtagacaaaattcgtattgtggcttttggttaatgtaatagaagtt

SEQ ID NO: 32081 - DNA, 629 bp, Arabidopsis thaliana landsberg
tatgtatttcacattctggcgatgcaaagctccattgtgacgttagctgctcctatctggtcgcagttgggcgatccaacactcggtcatagatccttaactgtggcattaccatcactgtttttctctcttctctgcatgcatgtggcattctattgtggcgttcttgttgcatttgcacatgttaaggggcttgttattttcctcaacgttagttctgcgatcttcctctttctaatgctctttgtccttggccctcacgtttttctacaaatacctggcattcctgctatctttggtggctatttcgtattatttattctgcttgttgatgaagacaccgatgcaaaggcgtctcctggtaaggatctcatccaagagaaagcaagtagctagaagagagcattcttttctcatatacattgaagttgtttgattcagtacttgttatatttgacattttgtttcagtttctttccctgttgtggtttaatttgcgtgaagttgcttgtttaggtacttgatatatatttgacatcttggttcagtttcatatgctcgtttttaaatactccttggatcagaacacataatattgggaattgttttgtagagttcctaagagtgat

SEQ ID NO: 32082 - DNA, 537 bp, Arabidopsis thaliana landsberg
aacatgagcgactctacgtagacgggtaaatggcccaagtctcttttgttggatgctccagctgaatcagaaggggccttgtggagtcgaggttctcttgtacagagtgctcaggctttcctagccttcccctcagtctccagtttggactgacaagggctgtctacagaatgagtcatgattattgtcaccctaatgtcgtctcaggtagcaggtgcatttccacttggggtgtgtctgtcatgtacctcaccctccccaaaatctttgagagaaacattcattcccatctgtctcagagccaggacatgctaatcctgttagtatagacagggtggtggaccacacaagtggggtctctggatagcctggaattagggtggggctggggcttgtggtagaaatgcacccaaccattcttagctccaacttttgtcttgtgactctcaggcctgaagtggccctggaatcagtttcctctgcatcccacttgctatggaagagaaatttcaggaagtctggtctctggggtctaat

SEQ ID NO: 32083 - DNA, 336 bp, Arabidopsis thaliana landsberg
acataaattgatcgttgataaacataaaaattgtgaagtgagattaaataaagacaacatgaagaaaatgacttttatttgagtaatctacttcactcagaatgccgaactactctgtacctgagatgaaaggaatgcctaaaaatctatacgggattttaattggctaagcatagttccatatatatctaatatgacctgcgatacactttatggatatgccacaatatttttaaagcttatctgctatgaatacactactgcaaccaagacatatcaggtgactcattatacaacaaaccggatatataactttaaatcgcccccaaactaatt

SEQ ID NO: 32084 - DNA, 989 bp, Arabidopsis thaliana landsberg
tagattcatccaactcagttgcgattaaagagatattgatggcttttaaaaagaagtgtgatttattgagtcaagtaggtttaggggtttgagttcttaaaggaggtaacttaagagtagttttaccaaatttgtcgtgcaagaagaatatttttgacacttcgtggaagttgggaatggaaatagcattaacttatgatgtctcctttcccatctttattcaaagagacctaaacacatttggtatcgtctttcttaagggtgtcccattaccaacgagactaaaatctccgtttacaccacgttcccacttttctctcaattttttatttctcttctttgttttcctctccaaatgcatatatgaaacaaatcacatatatgaacgttaaaattcatgcatagacttgttgatgactatatatttatcgtagatttcaaattaacagacaattaataaagtatcttctataagatttttcattaaaaagatctgatcactactaaaacgttgaaaagtcaaatatgcatattacatatgagtgacatattagggccgggaacaatatgccaaagatcagcctaaccaactctcatggcctaatcggggcacaaacaaaatttgacagacgaagattattacgtttttttgttttagtcaaaatcggacagacgaattttttgttccctagttttcgtgtacgacatgaagactttaacgcgcaaggaaacgcacgttttctgagtgcaagcttctgcatacgagagaggccatacattgacatgaatatacaaagcccacaacttattcatcccatcattaaagaaattttattttattttagtgggttaggtttttcaccttagacatttcaaaatttgatgataacttaaaattttcaaataagttaactgaactttgtgataccttgtaaagtgaaataaccaatttaaaggttttcgttttttttgtcaatgtgataacgatg

SEQ ID NO: 32085 - DNA, 573 bp, Arabidopsis thaliana landsberg
aacgctgcacaacaaatagccaaatttgggagggttagagaatgcctctatcgcattgcatttttaccattacagactgctcgatagagcggagaaaacccgactaccatcaaaatggggtagtgtatgtttctaagatcctagcaagtgtatttcggggacttaagcgcatcacacaatttgataacaataagtgttacccattttagaatgaacattttatccttcggtgcaccgcaaaaccgacattgtaaactgttttctatatgccagacccgacaaaccccacaacactatcgtaaagttcgatggaagcaaatgactcattgacaatttaaggagattgaaccatattttgaatgttgctaggatcgtagtgatccactctgtgttacagtgacttaaagcaataatgggcgtttaccaagttactagttaccattagctagttattcatgtgaccaatcattctatgttcctaacagagtacatacatgccaacagggtttattgataaccgaacattagaatgcctaattgataataccatggcctaatacacaaacggatgtc

SEQ ID NO: 32086 - DNA, 339 bp, Arabidopsis thaliana landsberg
aggagacgaaattcaacagatggattgggtcacaatgttttggaagatccgatgattatcacaagaaatagtcgggagataagtacgtgacataattatatgtgtatatgtacgtatgtagctaacaaacaaagagcatgtattttggattcaagatcaacggctctgattgtatcttatcttgcatgcatcttcattataactttataagatatggttgtgtttaagatttagaatgttttacacccatataagcttcataccaccgtttttgctttgtttccctcttttgtcctcattagcttctctttcatctccattttcacattcacctatgat

SEQ ID NO: 32087 - DNA, 825 bp, Arabidopsis thaliana landsberg
tagttttccagtccaaaatagatacaccttggtttcctacagttaattcgagatacaaatatgaaaaagaaagggacaagaaacaaacgtgatattagtagaaactctttaattatacttacctaacatatgttctttaagatctcctttagccatgtactcgtagatgagagataaattttctccttcatcacaatatccaacgaggccaaccaaatttttatggtgaactctgagaaggagttctacctgaaagggtagaaagaatttcaactcaagatttaacaaatcacatcttattgaacattgatttttctacaaatttgtaatctaaaattgttgtataaagtacctctgctttgaattctttatacccttgagatgatgagggtgataacattttaacggctacttgttcagcatcattcacagttccatgatagaccattccaaaccctcctttcccaaggattctttggaagttatttgtcattatcacaacttgtgagtaagtaaaccttttgtttttcgtcactattgctggttcagaggatctcggcgatctaccatctgatgcttgcatgtaagatggtagtgtccctaaggttatataaggcaaaatcttgttatgtttgatgtgcatgtatgctctaatattaatcttgagtttatttattgataccttcaacttttgatgcctttttctttcggaaaacaaggaacagaatgagtgcacctataataacagccaatgaaacaattgatgcaaccactggtacaatgatactctttttttcgccttctcctttgtgcatacatgaacca

SEQ ID NO: 32088 - DNA, 520 bp, Arabidopsis thaliana landsberg
gcattcaatggaagttagtgcagtatcaggagtcgacacgagttcaactcgaccaaaatgctcgaccagccaatctaaactcaaaatatatgaataattcaaaatagatatataaaatattttaaaaataaatataattttctatgatatctgagtaattaattctaaaaaattttatagtaaataaaatatctagttggaatgatatttttcatctacagtcggtcaccgaaaaagttcattaagctaatttttcccgtggattgacgaaagtaacaattggtattttgcaataaattttaaaacactttacatatcctatgattgcatacatattgcattgagagagaattcacatgcttatgtgattatgatagcttagcatctacatatcttgatatattgttatttatatgcctcgggatctgaatctcctaactcaaaattacttttatatgttgtataagggtgggccaaacaaaatttggaattgtgatgatcatattctgaataaatgatg

SEQ ID NO: 32089 - DNA, 275 bp, Arabidopsis thaliana landsberg
atggatggagactcagaatgggtatggcatgctcaaaactgcggaattctactgtttatcctttttacttttgatttgcagttgttttatacgtatgggttgcatttgcatactagtcaacatgagcacactgaacaaaaatgcgcttaatgcagactagagcaaatgacgcatatgatagtggtgaggatggatatgacagttcacgtgacaagatcttatcttgttctttcctatcccaccaaaagctattttaaccagaacatttgggcagt

SEQ ID NO: 32090 - DNA, 1132 bp, Arabidopsis thaliana landsberg
aacggaaatcatgttatccaggaatgtatcgagagtatgcctgctggtaggattggattcgtaattgctgctttccgtggtcaagtcgccactctttctactcatccttatggatgccgagttatccaggtaattggaaaagagcgagctctgtctcctcttgtactctgaacttgaaatattcattattttcctgtctgctttgttatagagaatcttggagcattgctcagatgatgaggagactcattgtataatagatgaaatattggaatctgcgtttgctcttgctcatgatcagtatgggaattatgtcactcaggtcctggttaatttcggatccattgtccctcttggaattgtcttgaaatctttttgttcttagtattgtgctttggtttatgtttttcttgtagcatgtcctggagagagggaagcccgatgaaaggagacagatcattgagaagttgacttggaatgttgttcagatgagtcagcacaaatacgcatctaacgttgtagagaagtgtttggaacacgctgatagtaccgaaagagagttcctgattgaagagataatgggcaaatccgaggaagacaatcacttgctagtaagaacaaaatcctaaagatagctctttgaatcctcctggacttattttaacactcttttgttctgcaggcgatgatgaaggatcagtttgcaaattacgtggtccagaaagtcttggagatcagtaaagatcagcaaagggagattctggtgcagaggatgaaaattcatctccaaagtttgcggaaatacacatacgggaaacacatagtagcccgattcgaacaactgtttggtgaaggtacttttctctaaaactaaaacttgagttgtcaatatgactctgctaaagaaatctgaacgttctaatatgttattgttacagagagtgaagtctcagaagagggaacagaaggttagacagaaaattttcttttgggttgcaaaattgtacaatggttgacttaaacaaatttgtattggaaaaagcttatgtatatatgcttgtatctatgaatggaagtgtgatggattacaatatgtatatggggtggacatgatctgggattaataatttga

SEQ ID NO: 32091 - DNA, 690 bp, Arabidopsis thaliana landsberg
gacgccccggaccaacgggctttcgccaatggcatacccactttaggagcccgcccgcgggcgaagagatcgggccacaccccaacatcacgccatcgcgcgcaggcgcgctcctaccaatgcaaaacgccgcaacaccccgtaggagcccgcccgcgggcgaagagatcttgcccgccccagcatcgcgccatcgcgcgcaggcgcgctcctacaatgcaaaacgccgcagtaccccgtaggagcccgcccgcgggcgaaaggatcttgccacgccccaacatcacgccatcgcgcgcaggcgcgctcctaccggtgtggtttgaagctggagccttgcttttgtaggagcccgcctgcgggcgaaggggatcttgccttgcgccgacatcgggccatcgcgcgcgggcgcgcatggtggtcgcgtgccgggcgtcagtcgatgccgagctttttcagcttgtagcgcagcgcgcggaaggtgatgcccagttggcgcgcgacggcggtcttgttgtagcgggcctgttccagcgcctgcatgatggtgtcgcgctcgatggcggacatgtagtcttccagcggctggtcctggtcgcgggtttccagtgccgcggtgtcttcgaaccccgctccggccacgggtcgattggcgggcgaagaggcataggtgagggtaatgcgctgttt

SEQ ID NO: 32092 - DNA, 560 bp, Arabidopsis thaliana landsberg
gcgacaaagtcaccctcatgttgttttcctcatcttaaaacatactatattcatttcaaatatacacatttgtttcattatgtgcttcttcattctagcttctatttaaattagcatcattttgtgttcctaaagtactgacactatatatgacaaaaaaaaaaaaaaaaaagtactgacattatctcatcaatactctttttgcttcatataaatttcagcaattctaattcaagttccattcatacacatattctcaaaattgatactaccatcacacaaaaaaaaattagatttttaaaaatcttcataggacaacttgtatcagatcttcttaccataaaaagagagattgactcgcatgaaactactatatacagctggttgtgtacattcaagtctatttttctcgcaaccaatataatgaaatagagaatgttcagagaatgactaattttgatatggtttggcaaagtggatacaaaataacgattaaaacagcaacaacacctaactcgcagtgatcattttcagccaaagtgatcaacttcacaattata

SEQ ID NO: 32093 - DNA, 99 bp, Arabidopsis thaliana landsberg
tggccaataccaggtatataagcacgtgatttcaaatcccgaggttaatcgtactctggcaactttacgtaatgcagagtttggttttttgggggcgac

SEQ ID NO: 32094 - DNA, 2473 bp, Arabidopsis thaliana landsberg
acagaaaagagatgatcttatgttaacccaaattttctttcggttttattagaattgaagtgacatataaccggggggggctgatatttagaaccgagattcaaactaaccggacaaacccgagtggaaccggatccaaccccaaacccgacccgctccaaaaggaagagacggtgacatatatcggaactttgtagaatcagacaacaaaaagcaaaatctaatttcgttgccgtctctccaagcaagaagaagcctctcagttctcacagcgaagatgcctacaggttccttctctttcgatttcttcgataactaattcttaatcgatctatttctcctcgtttacttcttcgaatccatttctctgtcggtgttgttgtagatgtactcctttcgagttttcgtaatctggattccgatgattaggtttttgattttgccgagagttgatagtgaagtttgtgtcgtctgggatagtggatgatgtttggatttgactgatgtaaatcctaatttgttgttgatttttgtttgattttgacagtgagcgtgaagtggcaaaagaaggtgttggatggtatcgagattgatactagtctgcctccttatgttttcaaggctcagttgtatgatttgactggagttccaccagaacgccaaaagatcatggtcaaaggtggccttttgaaggtaatttggattcacttgcctgctgcgtgtttgtagttttactgctgtgttcctctatttgtttgttgatgatgatttacgataggtttcttttaattttcgcaggatgatgcagattggtctacgttgggactgaaaaatgtaaattctttcggattcgttggcaatgtttccctgtattgattatggttttatactcttttgaggtgcatagttatgaacttttcatgttttcttcactctagggtcaaaaattgatgatgatgggaactgcagatgaaatagtgaaggctccagagaagggtcctgtttttatggaggatcttcctgaagaacagcaggctgctaatctggttattctttcttctgaatttaggaccgtttgtatgtttcctgtggtttggtagtcggtgataagttgtacggtgcttggacccgaaacaggccaccttcatcatgacagtttaaggggaaaagaaaagcatagttttcttctagaaattgtgaaaaatagtggtggcttgttttaatcttttatgttggcttcttatgtactaacgaatattacgaattggtttcagggctacagtgctggcctagtcaatcttggaaacacctgttacatgaactcaacgatgcagtgtttaatatctgtcccagagttgaaatctgaattatccaagtgagtatcttttaatgttccgttttaactaaaaactcatatatctcactgatgctatgtactgtcgctctttcttataaccaaaagctgattcttgatcttttcccacagttaccaatctgcccgaagcaatgatgttgaccagacttctcacatgctcacagttgccacacgtgagttatttggtgagcttgatagaagtgtcaatgctgtttcgccttcacagttctggatggttagtctttttccatataatactttctaatatttgtgcttctctttccatgtagctcatctggactatttaaatcagagaaataattacccatccaaaacagttgatcccttcaattgccatgacagaatttaacttgtaatagaaatatttgcatagactctaaataggtcaacaaaattcatcttcagactcatctatgatagatatacaatcatatatctgtggggttgtatggaagcgtcaactcaaatgtcttttgcgagtttatcatcagtgtccataattcatcataagatttggaaacttcaagctcgtggctcattcataccaactttggtcttgatgcaggtattacgaaaaaagtatcctcagtttagtcagttgcagaatggaatgcacatgcagcaggtttgttcttattgcaaactatgttgcattaagctttttcagttttcacctttcagtgtgtgaactcatgttttaaatgtctgacaggatgctgaagaatgttggacacaactgttatacaccctttctcagtccctaaaagcaccaacttccagcgaaggtgctgatgctgtgaaagctctatttggtgtcaatctccagagcaggtatctgagcaaatttcaaatttcagtgtcatatctcacttattttatctgtataaatcatgcatttaataaacaatgtgaacagtcttctgccgtaaactcctcctccatacccttgcggggtatcctgattagctgagtaatttgcagaacagagggaaatacttgaaattttgtagttacaacattacgatttgtctttttaacaaactcaggataaaattaggtgtgcttgatgatgttaca

SEQ ID NO: 32095 - DNA, 1279 bp, Arabidopsis thaliana landsberg
aaagccaacagccaacaactactgctgtgttacaaaatcattaaacatatcattcattttgtgtaatagctaaaccaaatcatcatccaaacataaacatcatccttatatccaaaagctaattccttcaaagctcaaatctttatgaatacccaaagctaaaaactttcgaattccaatggcccagattaaaaagataacatttttcgccacagaatcaaaaaccttatacaaccttaaaacgagttaactgacttaccccatcgtggaaagacagagactttcttagatcatcaaacgaagaatcgaaagcaacccaacaaaacttatcaatcgattggggaaatgatcaaagacccaatcggaagaagagaagtaaaaggaaagacgatttcttttttctcttttctgggttttgcgtgtatctggaagtttcggatacttcatttcgaagaaacttcaaagaagaagtgcccgaccccacgtatagccccaaaacgacgacgagccatgtgtagagagtgtagtggtcgtgtggagttataaggctttggaccctacacttaccttatccacttttgactgctttggctcctttcgactgtgttcggttttttagatccttcctcgttttgccataattgaagacaataatgtatattcgttcttataggttaattcgtttcttataaagaaaaaactaatcggaggttaaacccaagggtgataaaaattatgttgatcttgtagattctactttgttatgttgtataaatgttacatgctattatactagtgtatttttttttttgtaatggagaatcttataccaatatggcgatatccattggcattgaaacaaacatatccactaaaattctaaattcgtttcttgtaaataaaatcacaataaagtttgaaaatccaaagcggtatggtgataaaagttaggtggtgtttttggtggtcatatatgtaataattaaaaacttatgattacgtgagccataagcaaattataacccttttaaagaaatgttaggacaagaaataacttattcaaagaatcgaaataattaactacgtgcaatttggaccattggtttgttatttgttctgttcatattggaaagtttttgttttctcccatccaccaagcggcacttgttttggagatgattgtgattagatttggatcttagaaagtttcgctttgaaattgatctctggcttcatggttgatatacacagccaaattatgtaattaataaagataaga

SEQ ID NO: 32096 - DNA, 713 bp, Arabidopsis thaliana landsberg
gtgcttgcgtatttacgtgttgacgtgttttttcagtgttgacgtgttgacgtgttttacgtgttgacgtgttctacgtgttgacggacgtgtcagcgtattttacgtgttttacgtgttgacgtgttgacgtgttgacgtgttttacgtgtcgacgtgttgacggacatgtcagcgtgcttgcgtgttgacgtgttgacgtgtgcttacttgtgcttacgtgttgacgtgtttgccaccactcaacaactccatataaagggtgacaccaaaccatactttgctgggaagtcctacgtcctttgacttctctcccggctttatctatcgtcctttcaactcctatcgaccactctcttacacatcttgcgctgcttgcgggcgtgggaggcacgccagtatgtcctctgccacggcttgtgttgttttggtggcttggcagccgtgagtgtttagtgttgtaaatcgcagaagaagaatcatcggagccgactattcagtgtctgacgacaccaccatcgctgtttaaagacacggaactcgcgctcgacgacaccgtagattgcgtgggggggggggggtgcgagggccatctgagttctgatctgacgcagctgtaccaagtgtgttctagtacatgtactagacatgcggctatatgttaggaagaatacataaagccgaattacgccctaatggcagaagctggaagc

SEQ ID NO: 32097 - DNA, 367 bp, Arabidopsis thaliana landsberg
atttaaccaaactgacatacttgcacgaggctggtgtactttataatctacagaggagatattctctgaaagagatctatgagagtacatttccctctatatttctttggaagttatctaacgtgaggactttctgagtatatttggcagtgtgaattattaataactatacttccgggggtacatctattgagtcgcatatcattccgtatataaggctactcattgtcctatagagcatagtgtactcactggccgtagctattctttactacgaataactagatctcagtcctattattaggtgttatatacatggtgaaaagacatggttatctgtgaataatgaataggttctctatcatgg

SEQ ID NO: 32098 - DNA, 1093 bp, Arabidopsis thaliana landsberg
atttgcttgaaacatgaaatgttaaaacaaaagaaaaaaaaaaaaaaacttatcagttttttcaaagagatgctaaaattatggaggtagagtgggtgtaggtatggcgtgccccttcgatcgtttggacacttatcgtaaaaatcttataaattttgttccatgcaatactattttaaagttaattttgaactacattaagcatgaattgtagataaaacattaaagcttcccaattttttgtccaaaaaacattaaagagatatagctgggaaactaaaggaggacatggaagataagacgttgggctgctggagtgctggttgtttcaaattctatttattaattgtggccactgaaaatgaaatactacaattaagaattcccaaattccagacaagtgtggccttcaagaattggtcttatttgctacactttggtttcaccaagaccccgattactcagccccgttcatttactcattagagctggccagaatataacctacagtaaaacatgtactataatgtgtcagaattagaattataactaaaaatattaatccattgatttttcttgtgttttgtgagataatagacttccgatgaaataaattagatccaaaaagctgattcattttttttttcgaaaataatgataaattattattttaaaaatagcgtttgtatatctagtgcgtcatgagttaaaaaaaatagatttttcgctatcagtaatccaaaattttgatattttttgataaatcaggtgattttgaaagtttcctacacctaaaaacgaatcgtgaaactcaaaaaagcatattagaattcaatgctattagaaccatactaatcgtaacgaaaataaattactaaagataaatatcgttcatgtttggtcatacgtgtatatatatttttttttatcttttatgtaacacagagatatggagtctgtctatttttatctatgacgtctatcagtttaatattcgatcccgattatcataattgcattgttttttttttctcaacctaagaataatcgcagtgttttgttctttgtcaacgactaattgagtttaaaataa

SEQ ID NO: 32099 - DNA, 611 bp, Arabidopsis thaliana landsberg
aatcttcactcatttatggtagtttaggtgaaatttaagacttgttgactaatgaagtcaatataaattatggaatattaatagtttataaaagatagaagatttaataatttataaactattaccttagtaaatgtatgcatctttatttgatattagattgagtttattaagttattcaggtatacgctctatatatgcatatttcattaccaaacttttataactctaactaataattgttgaagtattttgagaagtttacaattcataaacaagaactggtaaaaaaatgcatagaaacttttaataatatatcttttggacgaacttgtttttcttcttctagaaattggattaagaaggaaaaagacagtaataatctataaacatactagtgtgttatattatcaataatattttattttcatatttgtattacctagaatttacaacatataaatatttcttgatcttggaaatttagttattgtcccatataaagtgttatttctgatatcttaaatttatattttttgaattatgaaatggatttgttttgtcaatcctttattaagtaaaagcttcctttttttagttttttttattaa

SEQ ID NO: 32100 - DNA, 559 bp, Arabidopsis thaliana landsberg
gcgacatttgttttcttttcactctcaatgcttcttcgtcttcttcaccgcgggattacgatgacgaaaagggtttaggagagaatactttctgttaattcgttttttacccaatcatatttaacatcttacaaatgtgccccaatataaccaacgtttatagaaagccctccaacttttgcaagacattaacaagagatgaaaataaacattttcgaaacttgaaaataaacattaacgagaaaagaatcgacgttagtaatttcatattcaagagtttgtgcatcattaatttgtctcttctcttgaacatattatccagtagcatatgagtttattgctcttgattctaacttataatgttttaagtcattttctgtacatattttcactatttgataaatcaattaaacaatcaaacaatatataatgtacgatgatacgcatcaatagaaaaaaatatattgcatactattttttttttagctaaaccagagtttcaaaaaatcttgcaaaacatataatctaattcaacaaaaatgtatttgttgtatttagt

SEQ ID NO: 32101 - DNA, 1015 bp, Arabidopsis thaliana landsberg
tatcattatgtgtcaaatttgttgtacctatataaacatatcaaaaatatagattttaattcaatataaatacatgttctaaggttcaaacttacaatcagtgttttgttttcaccatctctattgaaattctaaaattttaaggtttcaaaaaatggtgagttgatatttaagaattctttttaaactaaataaatggataaaaatatatatatcctttatgtatacaaaactcatgtattgcttatatcatgaatttcagggaaattgggtattcacgttaggagatactaatcaagataccaagcaaaaagctctaacctgtatttatagttttgatggtatgttaacacaatctaatggttatgtacttatgttaagctataatgaaccattttatatatattacatataaaacattgcaatttggctttcaaattttaaaatatgtttacaaatttacaaatgtatttatttttttgttaggagttgtatctgtacgttattatgcacaaatgaacgcattttgcgtgtttggagaaggtatcaacgaggctgaaattcatttgtggtcgatgagatttataacccaaactaggagagttggtccctagagtgttgtactcccgaataatgaatatggtgtctttcttcttatttgtaaaagtattaagattatgactaataattgcatggtgcttaactatgcattcatatttcataaatgtgtttggatttttctttgattctcattaaacacaaagttctattttcatttaaaataaatctagtagatgcattttgttttatcacaagaatggcgaggaataataatagtagtttgtttgttgtaatatgtatctctcattgatttctaccatactagtgaaataatatatatttttaatgaagaattttttgtttttctatgaattatctcaaattctcatatacctttaaattacaaaaaggcaaatattaataaaatctaatagttaaaagacatgtcttatgc

SEQ ID NO: 32102 - DNA, 835 bp, Arabidopsis thaliana landsberg
ggtaatttttgtttctttggtatatattcaatttgttcattttcaaattgtaacctgcttcattgtttctaaatctttgttaactcacgttttatgctcaagacgtagaaaagacaaaaaatgatgtgtttgtgaaatcacaatcaagttctatgtttatgtttcttaaaaaatctgaaaattttactgattctgtgagaataaatgatgaaaatgttaacaaagaaaaggatgagaatgtcaacgattattgttttgtttataatagtttcgacgttccaaaattattttaacatgcatttattttgtatacaaaaaatatatattggaaaggtttctatcgttccaaaattatttttacatgcatttattttgtatacaaaaaatatatattggaaaggcttctatcgttccaaaattatttttacatgtatttattttgtatacaaaaaatatatattggaaaggccaccaattttaacctccctctaagtcctaataaacctgagcacgatactactctgactgtcttttgttgccaacaatttttgagacgatgatatgcatagtaatatgatcaaaacaattttttgaaaaacaaaaatggttatgtgttaacctaacagacatagacgcaaatttctattaaaaaaacaggggattaacgttttaggtattagccttactggtccaaaaccgaatatgttgtttggtacaaagattttaagtaaaatatctcatggaagagggatgaattgcaggaatctaagtgtaaagaaaacgaaaatgtaagacttctcatttattctagagggaaagttgattcttatgatgg

SEQ ID NO: 32103 - DNA, 107 bp, Arabidopsis thaliana landsberg
cgatcccagactacgttacaatacctcgcgccttatacaggagcagccttggctgaatattatatgtaccgtgaacaacacactttaataatttatgatgatctttg

SEQ ID NO: 32104 - DNA, 1237 bp, Arabidopsis thaliana landsberg
tgtgtgattttttaaaagtcttcggcttatatattttctttggttgtgtgtgctttgtaacagaatccgtatgttttgtgtcgcttgttccacaagcctagtgatagttgtgatcctgcacactgtgaggaaatagagaaagttaattttactccaaccaccaccactagatgctctcctgatgacacatcttctgaaatggtccaagaaacagctacatctggtgtacatgctctagatagatcagatgacactgagaggtgtttaagtgacaagggcaataatgatgtgaaacctgatgtttcagtgataaacaatacttctgtcaatcacgctgaaacttctcgtgccaaagaccgtaatttgggcaagacgttagtagaggtaatacttattttcaagtgatctctgtttgcaccaactatagcattttgtatcacaatttttccattgcgtcccatcgttaaccattttgtgctttcttatggtataggaaaatccacttctaagggacgttccaactcttcatggacccatcttgagtgagaaatcatattatccaggacagtcaagcatcggttttgctacatctcacatggattctatgtattctagtgattttggaaactgtgattatgggctacattttcaagatggtgcctctgaacatgatgcatctttaacagatgtcttggatgaagtattccataaccataatgaatcctctaatgacaggaaagactttgtacttccgaatatgatgcattggcctggtaatacaagactgttgtctactgagtacccatttctcaaagattctgttgcttttgttgacggcagtgctgaagtttccggctcacaggttaccagaatgtataataaggatttgtaaactgataatgatttgggactgaccataatgtttcttcatgtgcagcaatttgttcctgacattttagcttctagatgggtcagtgaacagaacgttgatagcaaggaggcagtagagattctatcttcaaccgggtcctctcggaccttgacgccacttcataacaacgtttttgggcaatatgcttcatcgtcttacgcagctatcgatccatttaactataatgtcaatcagcctgaacagtcatcctttgagcaaagccatgttgaccgcaacattagtcccagtaacatttttgagttcaaggctaggtctcgagagaatcagagagatctggactctgtt

SEQ ID NO: 32105 - DNA, 1036 bp, Arabidopsis thaliana landsberg
atgattttcagcaaatttcccgggctttattctccaaagtctcttggaaataaaacagttttttctctcaggcttttttctttccttttttcccttttttttttttatataaatcaaaatccttttgaaatatataacaaaaaggcacttgatctttggtgctgcttaaaaaccctccaccattgcaaaatcatgcatatataacttgattggtccaagatcaacttatgcaccactttccatatggagatgtcatgatgatgatgacgatgagcatcatgataggtatgatagtaacagtttttcgtgatgtgggtcgacaagatcatcagactggaaaatggcacaattacccatgatgatcttggttgtcagaagagtcaggggctggccaaaacgttgagtacttcaaccattctgcttcttgttggttccccattgatgatgacccctgcaccaatccaaatcgcttctcaatatatacatacatacttacacacttatataccaaccaaaaaaacatgtatatagagctgacctaagtgaacagatttggtttggttaggaactaactgaaactgaactaattaacgaaccaaaaaaatacgatgttagcatccacaaataggttataattatggttgcctggtgtatatataatttacattttggaatatgatttataaaactaaaataataagaacattccattaaattttagacagattaaaaaaaggaatgcagacatgctgtcccccacgaaaacacaaccaaaaaaaggaacattccattaccgaacatgtctcgcgaggtactacgcatgaaaaaagacaaagtatttacatatataaacacattaattatatgacatataaacatgagtttatatccaccatcattgccttttaaattagcttttaaatggtttaaaaaaagagaaaagaatctgataaatttgtattgttccttagaagagtaatttataggtaaaaagcaaactataacaaaagcaaacacatctctctttctttatctt

SEQ ID NO: 32106 - DNA, 1921 bp, Arabidopsis thaliana landsberg
  unsure (1)..(1921): unsure at all n locations
tattaaacaacattttttttattgttggatttatgatacaataacctcattcgatatatataataatattcaaatcaaaatgacaataacaaacaataaattattatattgaatcatataaaaaataagagatacatgcaacgaataattaaacaaacaaattaagtaataaggcaatggatagactaattaatgaaactaaaactgtggattatctattttgtcgtctttcggagaatctaaacttcgaccgacttcaacgtatctaataatcctaaagtaaccttacgctcacagttcggttactttaaacttcgtcaaagtcattttgataaacgtccacatcacgaaacggtccacgtacgtctatctcgtggataagtctccagccgctgtttcacatgcttatctcacagctttgttacgataacctagtcctatgctaatatctttaactatagttaaataattttaaccaaaccacggttaagtgtttcaactacataagtagctttgccggtgtattacaaacaaacaacacaaacaaaaaaaaagaactctttcgtcgactaatgtgatttattgttcaccggagtattaaagaagatgatgatcggagaaactcgcaggacttatcccactgttgaaatacctccatggccggtacttgaagagcttacaacgtcggagtttttttctccggtgatgaatagtccagattgtagcatgcttgaagctttggcggcgttgcagcgttatttgccgtctaacgaaccggatccggagtcagacccggatctattgggtccggattcaccaatcgatgcttactcatgcgaccatttccgtatgtacgatttcaaagtcaggaggtgtgctcgtggccggagtcatgattggacggagtgtccgtacgctcatcccggagaaaaagctcgccggagagatccgaggaagtaccattactctggtacggcttgtcctgattttcgtaaaggtggctgcaagaaaggtgactcttgtgagtttgctcatggtgttttcgagtgttggcttcatccagctcgttaccgtactcagccgtgtaaagacggtggtaactgtctccggaaaatttgtttctttgcnnnnnnnnnnnnnnnnnnnnngtttttacatactcggagccctgacagagttgattcttttgacgtttcgtctccgattcgtgctagagcatttcagctgtcgatttctccggtttctggttcgccaccgatgagtccaagagctgactcggagtcttctccgatgactcagtcactgagtcgatctctcgggtcttgttcgataaacgacgtcgttccttcgtttaggaatttacagtttaattcggtaaaatcatttcctcgtaacaatcctttattcggattcgggtcgccccgtggatcgatcttgggtcctgggtttcagtctctgcctacaacaccgacccgaccagggaatctggatatttgggagtatggtttggaggaagaacccgtaatggagcgtgtcgttgagtcgggtcgtgagctacgagaaaagatgcgcgagaaactgcacaaggagaattgcatggatcgagttgaccaggatccggatcagaatttgggtgaggctcctgatgtcgggtgggtatctgacctgctcatgtaaagaaaaaaatctgaccgtatttcgaagtctcattggcttttttggatatcttccaaggaaaagaggaagggatcttagtgtgttcatattattttattcactaatctcgtattttatctgctaataagaattaattatggattttggggcctgatttttctaagatgatcgttgtatagatgtgccttagggttttaattatgaaatagtattaatataatcgtgttttataagaatataatct

SEQ ID NO: 32107 - DNA, 601 bp, Arabidopsis thaliana landsberg
actggtattataaacaaaaactgatatgcaaattgagtaaggaaatcacacatatgctatattttctctatgggctggactggtgttttgttttaattattatgataagaagaattgcaccaaagaaaaaagaaaaaaaaaggaaaatcgtatctttttgttctacctatacagacacataatacatcattttagtttttgggacaaagacataatgcatcatcgtgtcagcaatatatgaaacgtggagaatgttttgtctgagtctgagtaaaattactagaaattaaaattagggagactgactaattaccaaatatcccaagtctgtgtttattctaagacaactactagaaaacttaactatattagactaccaactaggcaacaaatatcacaaagaatatcgtatgtcacctacctggaggtgcataccacgtgattttatccccattttagatatgatcatgtcgattagttattgtattgtaaaataattattttgttacaggctataaactattatgctacaatttttggttaaaccctattacttggtattccgatttcaaaacatattatggatatatttttgtgtata

SEQ ID NO: 32108 - DNA, 1098 bp, Arabidopsis thaliana landsberg
  unsure (1)..(1098): unsure at all n locations
ggatagtttgcttttcataattacttttattaatctctattttttattaaatttcgcatgttaatggggctgggagattaccgatacaacctatggttagatattttaatttacatctgtgttgaaaaccaaacaagaagattccatcttaaaatatgggccattatatgttcatctaattttaatttttttttttttttttacaaacacaaattattttttgttcaaaaatattacaaagaatttttaccactttcatatatatttttaggatttttgaattttaaaatatggtggtacgtttgtataataaaacataaaaatggtaagtttttattttcaagaacacaaataactattttcattaatatagagtttttggcgatttcatgaatatgatatttactagctctctcgatatacattttatagttgtattgatattcacaaactcatgaacccattattatttataaaatcatgcttataatattcagtaaacgattttttacggttaaatgttatctattttgaaactcttatataatttatagaaatatatataccttgtatggtttaaaggatgttctccttaaactaaatttatattgtgtaaaaataatattgatttctatttttggtgtatggattaaagtcataataagtccactgacattacccccactgcccctaacattaaacctttcttctaattactttgctgcttaataaagcaacggctgtgatttcattacctcggtgacttcagatccaatcaacggccccacgttcatctctctctctgaacattcaaacaacaaatatagaaaaataagtagccaagcaacaccaagagacgacgagagcaacataaactgaaacgtgcctccatttctaaaacccatatccttcttcgtacaaacgacacaatctctcttaaatgccaaaggtcctctttttcgtcttcttccactctctctatacttctctcacaaatcttggcatattttgaaatccacattcttcattcactgagtttcctttacctcttaaagnttcaatctttagggctaattctctcttcttaaaaatgctctg

SEQ ID NO: 32109 - DNA, 691 bp, Arabidopsis thaliana landsberg
tattacattaatataaatcttggacggctgaaacattaaatttcaccgatttggataaaatcaggttgctgactgcgtcaaaatttaagaccatatatgtggtcggattcaaatctaaacctctcgtacattcataaaagttggaagatgtctcacatgatctcatctatatacttatatattcatataggggaaaacacaaaagtacataaagatgtcataaaaagaagtacaaaactaaatattaaagtgtgaaaagcatcaatagtcagatggtttacttgtaaaaccaaaacttatgtccacaagatttctacgtcatgcgaactcggccacgttgtgtagtactatcatgttggtcaatgcaaatctcagacagctctgcagattttcttctatttttcttcaactcacttaaatgacttgggaaaaaatatatttctgatcgctaatgactttaatttttagtggacctgtttttgacatcttacacgctttcttggctccttcctcagtcttaaatgtaaaatgaattaaatacataatcctgcaacttaatcgtggcttaaattaatcaaaattatactagaattcattgattatattttttctaataaagcttatctacggcaagtactgtagactttgaagagttcttgatgatgaagaaaccttttaaacataaaataac

SEQ ID NO: 32110 - DNA, 559 bp, Arabidopsis thaliana landsberg
agaagatttttattgtcccctatcagctttatctttctgtcattcttttattactgaggaaaaacaaattctggaaaatgttgcttttatcagtgaatttgcgcatggacgaggattctccaatcctggcggtagaacttgacgtggatgaattggctaaaggccacaaggcgtcataatgaagaacctttcttgtaccacattttcattcactgtgtcgatgtttcacttataaactccaatttagttgtcattggaggtgtttgtggcaaatgttggcccgttggtacttaagcttaatacgtcggatgctgttgagtgttgacttgaggaaaaggttcttcataagcttcatcctctctataataaacaaccatttttatagagaatccaccccatggttttaaaccgaaccggggaagactgtaccgttaatattaatatgaaattgatttctgaattcggtttggaagagttgtaaccgggattagaccgaatatagattattggtttgcgttagggcaatcgcttctgaaatgtcacggtttattttatgttt

SEQ ID NO: 32111 - DNA, 629 bp, Arabidopsis thaliana landsberg
tcttccgagtacaaattttgggcatgtccattgttgttctcatcaattaaaaaagtaattataaagtaaaagagagattaagaatgcttctcaagaacccatggaaaaaggttcttaacacatagtatctacagtttgattaaaataaaatattttgaaaaacccaaaaagtttctaagaaaagagatgctcttaaacgttgattgaagtagagtcgttctttcgcagcggtgtcaattagtactacgttaattagtttcgtttagatgcacaaccaaattcagaaacatacaacatccatatgaattatctagatgatcatttgagtggatcatttgattgtatcatccatatgaacaaacgaacattgccaacaaagcttttatctaaccttttagtatgcaaaatttctcatcattttagttatcaagtatttaaattattactctctcttttcctagttatttgatgttttgagtttttttactttttccaccaaaattgatgatttggaaaacaatcattattatttttgtttgtaaccaatagtaaaggagagaagtaaaactaatatttattaaactaacaaaaaaataattaaaaatataaaagttaatttttcttaattc

SEQ ID NO: 32112 - DNA, 738 bp, Arabidopsis thaliana landsberg
cgttgagttttccaaaatagtcacgtcgttaagcttgcatgacgaaataaattaacagtgttacgtctctgttgaaatctacgttcacttattaagattttcagccgagacttaattatgttaatttattccgttagtcaaattgatgatgactaattgactattttggcaaagtactaaatttcactattaaactaagaaaccaacaaaatttaatgatttaattagaaattaacgaaagttgattatatatttcatcacctagtaaggtgaagattttgtttttcaatacttttgcacaactgggaattttttctgacatttttctcatttttaaaagcttcaaagcattagttttagttgaaaacgaaacaaagaggaaaataaaagttatgcgcacatattctagtgaaaaattgtattcaaagggaatttgatgggtttaggtaatggaaaatctcataacattgtaatcacctaaaacttttaatcattgaggtctaaggaattttttttgcatcattttgttttgaaatgcagtatgatataactaaaaaacatctttacctaccaaaagcatctttcatatggtagtgcgattgtcatattttattcccatgcttttgataattaagtgaatagatgtttatttggcacaccaaagcactagtccgtttgaaaactgtctgaaagaaaagagtccaagtgagattgtctccgtcaacgatggccttaaac

SEQ ID NO: 32113 - DNA, 1514 bp, Arabidopsis thaliana landsberg
cgaaggcgttggtttaccttctttattgaccgaagctttttctttcactcgcacggtacacttatatatatgctggatctttttggttgtagaattattcaaatttccaatatgttaaaaccaaaattgattaaatatgtctttaaaactttacataaaaaaaacttatgtctttaagactttaacaattaaataattaacacagggttcaggaaaaacggtagtgttggggatagataagcatctaacgccagtaagtttgggtagctttgatcttctcagaggcagacatgtttgtggaagcttgtttggtggtcttaaacccaaactagatattccgattctggttgatcattacttaaaaaaggtatatacacaaatctatccagtttgattacagtttttggttattaaaaagtattttacttatatatatctaacttgcatattatgttatcatgtgattcactattttgtttaaaactgcaggagcttaatttggatagttttattacacatgaattgaaatttgaggaaatcaacaaagctttcgatttattagtgcaaggaaagtctctccgctgcattctttggatgaacaagtgaagtgattaattatgttgaaactatatatgttgaaaaattgattaaatttctttatcaaaaagaaaagaattaattattactctttctatttttcgatgtttgaacgtgtttttggttattttaataatatcaaatgtgttcgtctgttttatgctagctatgcatgagaattatgaataccttttcatgttttgaaaatcttatcaaattaatacaagaaattttatatatgaattttattaacatcatgtatagaatattaaaagtacattaaagaaaaaatgtactccgttttttctaaaacacatataattcacaccataaaacgtggcgtactagggtttagtggatggcgatatgaatttcatgtgcatgaccgttttgacacgcatttgggtcaatctagtgataaattttggtgatgagaatccgtgatatctgcaagtttccataatctcttataattaaaaatattaactaattcatcacaagctgtttaaatcatctatatttgaccaacaatatatattattattatttgttttgacagctttgaccagcaagcaatacttttcagaaaatttaaagattacctttccaaaactaatttaaattagccattaattttgtttacgttacaaatcgttgaataagaattaattggtcattaagtgagtactctgtacatactttctaatcgcgttcatatatataagtcctttaacaaaaaaaggtaaaaaaatcgtggtcatatatacacacacacacatcaacttgtatcatcagccaataataagaaacaagagaagaactatgagatctgctacttttttcttggtttcctgtgttctcatgtctttcgttttgagccatgttaaaggtataatacgtttaattttttttttgtg

SEQ ID NO: 32114 - DNA, 618 bp, Arabidopsis thaliana landsberg
taaatcatgagtggaagaacctaaaaagtgcctacaatattgacacaaacctacatgcttctaaaacaattggctatatacattgtaaatatgtacacaaattattcatacggatggtattgtttgaacactttgtgacgaagccagcaacaatgcagagccaatgctggaaccatcttccatggccttcacaactacgagagtgagccgcatattctaccagtatatctctcagagcttcgtccatatattctctgaacatcctgatggtcaaatacagacctccttcaactgccaccactgttcttctcattatctgcttatcgcttctccttcctcctgcgttcccatctcatcctaccttttttaagaatcctgcaattcctgctgatgctagcctagccgctctgcgtgtcactacatcgcagatcttcactacaagttaacttaccttaattggtgcctatgacacctgtgattatgaatcaaagatagagagagagagagccaagataatgggccaagggggcagaacaaaactttgcatcacaacaaacttgttgggttacccctaaatctttcaagaattgtgctacttcttgtaactcggatgtgtca

SEQ ID NO: 32115 - DNA, 998 bp, Arabidopsis thaliana landsberg
ctgaaggtcctgtaattttgggtgtagaggtcgaccaagtttggccttctatgaatcggatcttagatgtcagtgcttcatcctttatattgatatcattgtaactgcagtaaaccttgtcatgaatttctgccatccttttggacaaatccattgctcatgttgcttgtccctggagaatctgttgtagcatgttcttcaagtctgagtcaggagtcgatgaaggttgttgattttgttgctgtgtgaacccaggtgatggaagttgcggttgatagctgccctgatactgctgtttaggaacatacccttgtccttgggtgtatggaacatttgcaacatttgtacttctgtaagacagattcagatggttctgcttgaagttgttgaaacctttgttgtaacctccctgattttgcaaatagctaacttcttctgattggagagtctccccatcctggacttggagcgtctcatcatcatagagaaaatggacgtgctcatattgtacaggaagtaacttgaccagcttgtcattcatagctctcatatccctgtggagcttctcataacaataacagctgctgcggatgacgctattttaaggacaagtgtatctatcgactcactgtgccaagtattctaccagctggcatgcgtcttgaacgagcttggtgaggaagttactatggtgacgaagcacctattggaagcgggctcaataagcaaacagatgttgggagggacacctcttgccaaggtgcatcatacctgcatcttgagagaacctgggatgagggcatgaagtctgataggacctgaagctttgccatggtatacacactggtgtagaattgtacagtgtgaatctggaaatgacataccggaggctggcggctttggagctagagaaagaatatccaggaagggtgtcttgcaggccactcaggcagtgactgaacctttgggagcgtctattctcacagatggggatttgt

SEQ ID NO: 32116 - DNA, 1039 bp, Arabidopsis thaliana landsberg
gttcactttaaaagctttggcccctcatctgagctcactcaatctcagctacgttacgtggatggatgtgattttgacaagtggcaacatcatcatctatgaagtttattgagcactgtctggaccataaaagatgaaatcagccaagacaattaaagaggtgtccccattgtcctttacatcttatgcagccagtatgatttagtttttccaaaattcaattttgtttttattggtacaattcgttgggccttatgattatgtcttatggtttatctttgtgttgatgaagatactttcttctcttcctagaagcttggagcccacctcaataaatcctttctttgctaccatggcacacactaggatactcttttctttgtttggtctggtaaaatctctttaatgtcaccgtcaccgccattactcgtctacctttcttggcagccaaagttacctttgtcgacaacatttgatcacctgtaaactatccaaaccatgtatgccactaaaattttgcataatggtcagtaagtaacaaattatacaattctgattatggtcaaattttaccttttgtggtatgctactagttaaagggtaaccaaatagtggtttttacctcatcaagtcgctattttgatggttaagtttctgtatacttttcatcattcattgtctatgttagtttatctttgtgaaaaaatagattttgtgatgaattgacaccaagaacagtggagcagccagtgggactttcattaaatggtaaaggaaccacacaaggaaaggtttttcacctcctttcttcttgctcccaccacattagtgtttcctctcttcatttataagggttccaaatttttacaatggttgaaactcagtgtttaccgcggtcatagttttctgatactttagagacagtaactattagtgtaaaaatgtgttaccataaaactattgttgcttccacagggagaaatataccatttgcagagcaatgactaattgaataaacaacaagtctaagctaatgaca

SEQ ID NO: 32117 - DNA, 828 bp, Arabidopsis thaliana landsberg
  unsure (1)..(828): unsure at all n locations
cataaacaatcaaaccaataagaacacaattaccaaatttgtaactgaaatttccttactttcatcgttttcaagaaccctaattagcatttcatagctctgttttcgtcaatctaatcacattttacagagtaattaacaaaacaaacaaaacagagaaaaatacttactttttccccaaaattttcttcctttaagttaaacaacaatggaggatgataataaagaacattgctttgaatgaagagtgaagaagaaagattgaaactttagcaatccaattgggatcttcacacgctgatttggtttaactaaaccgaatcgaatttggttgataataaaacgacgtcgtataactgaaggatattacggtaatttaagtcaaggccatcgtcattgtcattgaatagatcaaaccatnttactaaagaacacagttttctagattctctagagagataagagtgagagaagagaagagaagatccacaagcgtgggaaaatcgaattagggttttctgaaaatggttgatactgtcgacaagttaggtaacttccaagcgattacaggtctcgaagatgctgatttgtgttctaagatccttcaagctcatggttgggacctagacccagcaatctcttcattctcatcttctgatcaagacgcttcgtcttccgccgtcgatggtggtggtaacaatcgcgatcacgatctcaataacgccaccgtgactcctgattatccacctcgagggatccccgccgatacagagcttgttatgcgtgatgaaaaggaagaaatcgaggtccaggagttgcggaaggatt

SEQ ID NO: 32118 - DNA, 625 bp, Arabidopsis thaliana landsberg
tcgagaccatatagtttagggtatatctattaaagcttagccaatttctattcctaaacgaattatatcattttttcttaacagatggctagattatgtccatctgaaaatttgatttgacaaatctaaagactcggaaattaaaactaccttttaactccggtaacatacacagatttctgtataacaagctgtgggataagataatcgtcgttatatatcgtaattgactcaaaaactagaccttggggcctgagtggttggtttccaaattgattgcctgtgaaggcccataaatacgaaaagcctacatatatgtgctaatttaaatccctaatacagaacatagtcgtgcaactatataaaaaactacattaattttggtgtaggctttattataaagaaagagtcaaatggttactagaggatccaagtgcaactttagcaatcaaatcttgggctaaaaaaaattcctcccaaatttttcttgcatagtcgtggatggtatccactgtttgccctcctttacaaaatgtaaaagccttttaaaagttcaaccctggaaggattataagataacacctttctgactaaaaggaacaaaaaaattattgccacaaacaac

SEQ ID NO: 32119 - DNA, 898 bp, Arabidopsis thaliana landsberg
aggcgctcgccgtattgttacataaaacttgttatccatggttaaagaaagaagaagaagctgaaaaatctaatcactaaatctcttatgtaaaaaagaaataaaccttttttttttttgttcaagattatttaatacgaaaagaaaagaaaaaaaaaaacaaaggaaggaaaggtgatttatttatggaggaaatcatgattaaggtaaataagtgagatttaattgcacaaaaaaaagaaaagaaacaaaaaaagagattgcacattaaatagtcaaaatctttcccatgcacaataaatagtcaaaaatatttcaatagagtcaaagttttgatgtatttgagtcgtgtggaaacttcgcatttatcacctattaaattaatatctattcttttattatatttattatttagtatttacacagtatcgatagaaatctttggcttaaattttcaagtttagtaatcaagtatttttatcagattttgacttacatgtctttcacttataaagatgtcatatttgtcagaacaataataaacactaaaccggccgatttagccgattaacaccgatttttaacgcctaaaccagtaagctgatatgattcatggattatatggtgcatactgcataggcagatgcctagtcacggccgatttttcgaatattgatagtctctatcaacatgaggacttagaagttgttactatctatgcctaatagtgaacaggtgcaaaatattggtttgacaagaagcgacttctcaaactaatcttctttttctatatacaacctaatagtgaacagctgcaaaatattggtttgagaagtttttctttgactgatggcgagtctctagtgtggatggcgataatgtgaagcatagatggaga

SEQ ID NO: 32120 - DNA, 678 bp, Arabidopsis thaliana landsberg
gaccccgcctaacaattcggttcacggttcatccgccgtgttctcgctgttggctcccattggagaggcgactccggttatgaacctcgctttggttaatccccgggctaaagtcccggttcaactcgtcgaaaagacttccatttctcatgatgttcgtaaattccggtttgctttaccggttgaggatatggttctaggcttaccggttggtaagcacattttcctttgcgccaccatcaatgacaagctctgcctcagagcttacacaccaagcagcaccgttgatgtggttggctacttcgagctcgtggtcaagatttactttggcggtgtccacccaagattccctaacggcgggctcatgtctcagtacctagactctttgcctatagggtcaactttggagattaaaggaccattgggtcacgttgagtatctcggcaagggtagtttcacggttcacggtaaaccaaagtttgctgataaattggcaatgttggcaggtggaaccggaataactccgggttaccaaattatccaagccattctcaaggatccagaggatgagactgaaatgtacctcatttatgctaaaccggaccgaggaagatatttttctaatggaggaactggatggttgggcaaaacaaataccccgacccggttaaaggtttg

SEQ ID NO: 32121 - DNA, 1253 bp, Arabidopsis thaliana landsberg
gccttttatgagcaaaatccaaatcatttcaccagacacatttcccataaagattgtttctgttttagcttttggttatcaaaattcgaaattttaccacatcagtatcaccaccttctgaaaagtttccattcagtttttttcttgaaaagtacgaaaactagtttttgttcttacgtttgcattatgaaaatagcaaaaggttaatcaatttgtattattaaacaactctataaatttgaaaatcaaaatgttattttcaaaattttctaaacttcaaccgttcaaaatctaataaatagattgccacataatttctctttttagtagtatatatcatgtggctcatgtctatgctatcacaagtagacaattgttttctgagatattttctttgtaattgttaaaccaagatatgtcatcatcatcttcctatttttagttttggtcaacttgtgttttcttttccttctaatcatttttgtgatttacaatgcatattcaatgtatacaaatcttgtaatcaacatgtgttaatgtgtaattaattataaaatatataattagcggtatagatacattttcttttaaggatataaaaaaaagttatatacttttcttattttatcatgtctatgtaatatgtgtcaaagtgtcaaattttaatagctgtcatttgctaattttctacatattcatctattggtggaaacatacctattatcatttccttccatcacaactttttttatcatgtatataaatatctaacagatttttcactccatctaatgtgtcgaataacaaattcttacatcaagaagaagaggagtgaaaggccgagatacagatcgaaacatagatatcacttaccaattgataattgggtgacgcctctgtttcagtttagatttcggcttcccattcctcttcatcaagatgtaagaatcttattctcttcttaacttaagatactttgaatacaagaaaatgaattctgaagaagaacagggaaattttatactgttatagctctttcctagccccaatgacgctaggactcggctattagtataaagatgaaaaagtggctaaatggtctctggttagaggcaaaggaccagtaagagaggtccctcaaattgggtccaagctggactctctaaaccaatcagcttgagattattccatcacttttgggataagatgccacatcgtatcagttacatcccatatcagagttgtcacttagc

SEQ ID NO: 32122 - DNA, 738 bp, Arabidopsis thaliana landsberg
  unsure (1)..(738): unsure at all n locations
gttcttgggggctccaagtcaagccccatccggcgggtcttttaaacctctttaacgtccgagcaaaagataaaattccattatttcttcatagagccatttgtaagagaggagcccaacaatagagagaatttgctttaggaattccgcccgccataggtagtgggtttgtttatttttatacccttatatgggcgcccacacccctcgttataaaagcttatataaaaccaccctaataaattataatctatagtcacaattcatcatatattctagactttaaaagttgatttagaatttctgagaatcgagagggaacaaaaaaagtctacaaatttgactaagaagcaggcacatccgccttgacgaagaaaacggtttggttgggaatgatggagttgaccggtagacaagtttcgtcgaagaaaacaaaaaaaaatagaaacacaaaatcgggtttaattttgcaatttcgcttcagtagaagacttgttgaattcaataacaatttagtttcgttcgacgagtgtaataacgcgttgagcattaataactatcgaggggccattaagcattaaattaccatttaattacgaattttaggggttgtttccttcatcgtagcttatcaaattacacacactcatacgttcacacctttcctttttccaagaaaaactttgttcatatttcttctatncatacgttttgtgatagtattttcaacttttgttt

SEQ ID NO: 32123 - DNA, 721 bp, Arabidopsis thaliana landsberg
taataggttaagactaatatttcaaatcagaatgttaaatctttgggaaatggagaaaaaaataattaatcactattaatttttcagtatatttatcaaatgtttttgattaattatacaatatgactaattaaggaaaacactatgttaaactgaataatgcatcttaaataaagagattatattgaaaacagtatatatacacaaaaatacaaacccttaaatttttttaatttttttttgctgcatggttccttacctcctgatcttttccagtgataagtgtttcgttggtgtgatttttccttgtctgtttctatatctcctccattttaaccgttcttgttgtatatggtatttcaaaatttgataatcagcttcatgttaaccatggacttacaagtatatgtgtatgttaaacccaaaaagaaaaaaaaagaaaaaggtgtatatgtggaagcaacaccaatgttaagttgtagttttttttgttaaaatcactaattgaatttggttatcattttggtccggattgaactaaaccaaactatatatgaaccaatctaaatcctcaacatctaaacaaaatttaattaaaccaaactcagaaaaaaaaaaaaagtgttttcagctttcacataccttaattaggacttgaacatcgtcatcaagagccaaagaatcctttgttattcctcagattctgtttagttttattctt

SEQ ID NO: 32124 - DNA, 203 bp, Arabidopsis thaliana landsberg
taagaaaaatgatatctgtgatgatttcatttaacatatttattttttgaatttccttttcaactaataatatctaatgatttaaattaattttcaatattatttatttgatgtttttcaattaggaatatatgagcgcaatatatgctattatctaaatttaccttataaatacatgctcaatcttaactatgtgaaagatt

SEQ ID NO: 32125 - DNA, 1076 bp, Arabidopsis thaliana landsberg
taaatagtttgtaatctttttcaataaaaaaatataaattcttctaaaatcaagttgttatataaatttagaaagacaaaaaaaaacttctacatcatatgtttttctttaaataatgacatagaatttataaactattatctttgtaaaataagaaatatgtatacctatgtaagggaaaaattgataaatatttatacatccccatccaaaagcccatcaaatcgttatgggacaatagtaaaaaagattacaaaatcgtatggagcgaaagataaaaataaaaaacggtcccgtgtaagaagatgggtcacctctccaacacgtagactattttcacgcgccaagtcgaacaccatgtcgacgagatcaacggattcaaatggtccgtgtagtacacgatcctacttggtgcgtcgtacacttgatgcttaatttatattttaagttacggagtttccagaatttcagaccctctgaaagtggaaagagcatttttttaaagagtaataagaaaaacaattatctttgatctctctctatctctctctctccgatctatgcctgaagtggaagtggataacaacaacgagaagccatctgagattaacaggtttcagtttctcaatctcttcctatatattatcattagagatcaaatttcttattatgcttcttctcagtttctttaagatacagaggatgactgattagtaacatgtatgtattcatgtcaatggttgaccaataatcatagctgcagaggatgattgaagtattatcttgattttagcttatttaatcattgagattaagaagttttccttttattctttcctaaacccccttattaagttcaagattaataaagtcaatttcatatatttggtgattaagatccatccactatcttaatatctggtgttgcctcggttttttttttctgcagtttccatcacatgatcatcagtagtagtaaaaatgtgttaaaaatggaagaagttgagatgagcaagatgaggaaatttcagacagatcaatctgatgagttatcgttttacctctgtcaaacacac

SEQ ID NO: 32126 - DNA, 2773 bp, Arabidopsis thaliana landsberg
  unsure (1)..(2773): unsure at all n locations
ccatttcttgaaacaatcttatatagctccatcaacatcaccagatttacacaaagcatcttacagagcattgttagcaagcaaatccacaacacagtttctctcaagcatttcatcaaacaccttacgtgcacccgacgcgtctcggattctcgcccaacctctaaccaaaatgctatacgtcttcgcactcggtacaatcccgaatcctttcgctttatcgaaaaaatcctgagcatgattnccntatctcctatcgcaaagcgaatgcaaaagctgatcaagatcatcaacacaaggcttaatcccaaactcaaccattcgattaaacgctctacaagcttcactaggtaaattagctctactataagctctaaacacaatccacaacactttagaactaatctcaaagtaattatattctctagcttcgattaaaagttccaaagcaaagcgaattgcttactactacccaaaatctcaaccaaaatgtgataactttccaagctatgttcgaaatctgggattcttcttgcccataggaagaatctgtgagcaggaaagccgagatttttgcagcgtttcaatacttgttcgactagatttgactaacatcggggagagtaagcgacaagagtgtgttcgagatcatctttagggttccggtggtcgctcaggacgcgggagatctcgtttactagatctggtgatggtggatcgtgtagaagtgtagagaagatgcgaaatgattgagatttaggggtttggtaaagagcgcgaacatagagaagagactgttcgaatcgccattcaacagagcaatggagccaatttgagttttaaacacaaagccattggatttgtatattaataagtgagcccacttaatttatcaggcccacttaatttgttgcaagattagatcaatattcatgggatcggttaagattcggtaaaccgggacggcttgagtaaaaagatcgccagatgcaaataaagagacaagagaagaaagaaaattttgatcgtagctcttctaagaagcatttgcaaaacttgtccaactgaagaaagcttgagacttttcactgggtatttgcagtttctcacttgggtcttgaagtatataggtagatgtcgaagcttttactcattttctttcttttttggtgtttcttacttcaaagtttctatttgcgttgttttgtgttttgcagagaagatggatcatgtcagcaatctaccagagggggttctttgtcatatattgtccttccttaccacaaaggaagctgctttgacttcgattctctgcaagagatggcgcaatctcctcgcgtttgtccctaatctcgttattgatgactctgtctttctccatcccgaagagggtaaggaggaaaggtacgaaattcagcagagcttcatggagtttgttgatagagtattggcattgcagggtaattctcccattaagaaattctccctcaagtttagaactgactttgcttcacaccgagtggatgcttggataagtaacgtgttggctcgtggtgtttccgaacttgatgtgcttgtcattttgtatggagcagaattccttccgctgtctccaaaatgtttcaagagcaggaatcttgttactctgaaaataaacagtcttggtattgattggttggctggggacatatccttaccaatgcttaaaactctcgttctacactcggttaagttatgtgttgataagttttttttcgtgttttgcctgcgctcgaggaattagtcttgtttggtgttagctggagagatagggatgtcactgtgtcaaatgcgagcatcaagaccctaaccataaagttcaactattatttaggcactctttcgcttgatacacctagtcttgtttacttctgtttctctgatcatgttgctaaagactaccctctagctaaaatggagaaattatctgaggctaggatcagccttttggttactgaagatcagatcgagcgagcaagagcgccaaatatctattgggttgaggatgatgttgttctccgattagttaatgtggggaagctcatgaaaggcatacgaaatgttcagtatctcaacttgtctccgaatactctcgaggtcagttaggtgagttcttgttttgagacatgtaacggcaaaatgtctaattgtggtttgttttgttttcaggtacttttgaagtgttgtgaatcgatgccactgttcaacaacctcaaatcgttaactattgagagtaacgagaggcgaggatggcaagcaatgccagttcttctaaggaactgtccacatctagaaactctagtccttgaggtataaaacacccaaacatttttgttagtttccccgctttggactttggaaatcgcttattgtctcgtttctgctttcagggtctcgtgcaccatgtgacagataaatgtggagatgcttgtgactgcattttccggaaggataaaggccgttcgctcaaatcttgtccagtaaaagtggtagagattaaagagtttagagtaacaatgaaagagatgcacctgatagagcatttcttggacaactttccatgtttgaaggagatgaagatctatagagaagagtatgatccttcaccgtttggaaacgaccctcaagtggatgatcttatcttggacatgatagaagagtacaaggatatatatagttgcaatgtccaactcttggagccgtgtgacaagtgggatgaacaatgaaggcattg

SEQ ID NO: 32127 - DNA, 615 bp, Arabidopsis thaliana landsberg
caccaagaccaaaaatggcaacactttgacctttctatgggtttagccacattcaaagttgctcctaacccagtagacaaaccacaactgacaatacagaccttgtcaagaggagcatccggattgatcttagcgacctgaccagagtgaaccacagtgtactcactgaacgtggacgtcccaaggaaatggtagattggtttgccattaatggagaatctagattcaccatcgtgaatcatacctcctcgctctgtgttgatcctgagaagatcacacatgtttgattcctccgactggcaatgacgacaatctccacattctccggtaaagatcggcaacacatgatctcctggctgaagatcagtcactccttctccaacactctcaacaatcctacacaacaaaaaaaaaacgaccttgaatctctaaaaccttaaaaatatccaaaacgaagcaaagaagattagtgtttctattaccctccagcttcatggccgaagatacgtggaaacaacggtgtttgtccctgtggaatcaaaaaggttgaatttttttagataaaaaattagaattctaaaaaaattagaaacttgattatgaattttggagtgt

SEQ ID NO: 32128 - DNA, 972 bp, Arabidopsis thaliana landsberg
tgcggaaaattcagctttttgttattgttttgtcaacgcattatgttttatctcttcaaatgatagtaaaaaggaatgtgttaattaaaattaaaattaaaaatttggcttaaaaaagtttgttgagttttttggggtgaccacctgaaacctctctttgcacattgaccggaaaaaaagttttttgattgagtaacgagataaacttaatgagttgtcgaatttacccctaagacatagcgtaatttactaatcaagtactttaaccagactctttcactaatacaaaatctctatatattttttttctttctttaatttccaatttattttttgattacacatagtttctcttcattcatctctttctctccccgtcttttcttgttcctataatcatgtccgtccaataaaaccctaattttatctttcttgcgtcgcttcactccattacagagttgcaaaatttagcttgccaaaaagtgtgaagattagggtttgttctaaatgttctacaatcaatccagaccgacagaaagcgagactcaatatcgtagaactggtcgatccaccggtaaccaacaacaacaacaacaacgccgatcttcttccgccgccggttacggtaagggcgccggcgctcctggttctgcgcctgccccttccacttatcctgataattcttccttgtcttccaatcgcaggttttcatttcaaattcgacttttttttttttggatgattctctgagccattattggacatgattaattatgcaaagtttgatcctttattgttatttatgacagttttaagaagcccggcaatgctcaaggaggagggcagcctcgggtgaatctgccacctgtgaatcatcctaataatcacaacaatggtcccaatgctcactctcgctctcaaggtatgatccttattcacggagtgccgcaaagtctttaaatttgaataata

SEQ ID NO: 32129 - DNA, 465 bp, Arabidopsis thaliana landsberg
atcgaaaatttatccaatttttcaactaccgcaacataacccaattcttaaaaactgatttaactcaagaacatcacaaattctagtttttatgtttcaattcgtatctaaccatctaacctaagaactacaccttcggaatcctaaaatctaatatgaaaatgaaatagatagctcaaaatgatcaaattctcaagggctcttcaagggggcaggagttttctcaaatgctcttctttaaaaatgaaatgtctttctgaattttttgatcgaaaaagagaaaagattcttaagccttaagaacatcaaatatttacgatccaaccaaggtaaacagatcacaaaatatccgagtccattctaattggggtgattcgtaataaaacctaagtaaaacactttttatttattattcttaaggttcaacagactgacggttcttttagataaaatttttcgtaacac

SEQ ID NO: 32130 - DNA, 1001 bp, Arabidopsis thaliana landsberg
  unsure (1)..(1001): unsure at all n locations
atattacacccttcaccttcttcatcctttactctttgtagttaaccttctcgtttacactgaatcgcaaacgggtaagtgaaaagtatttcagctcgcagctggaagatggaaactctttgaagcatagttcagttaagagcctcccaagtgcatactaactaaacaaaacgcacacaagccttggagactctaacaaagaataagaaaaagaaacaagaagaaagaaatgaaacaaaacttgctactatcgcattgaagcagtgatgccaggaatttaaaaggcgaagaaccttttcttagcaatttacctggtcaatcaaatctggattagtaaccccccaacctttctttctatatgcttcacgaacatcctcacacgaattgcagcagtcatgctcttcctgcacggagaagaaacatacttcagatgaaagcttataaataaatgaaagccagattgaaaaagcactatcaactatcctgaaaatgatttctttatatagtacagaaacaatccactatgacatctgtttttgtttattccattatgacctcttgactagcactaaacaatcaagagtaatctgaatatgaacttgagaaaccatgctccacaaagtcaaatagagagataacacaattaccgcttcagccccatagcaagaaccacagtaagtctcattatgtcccagcctgccaccatgtttctgcagtgggttttcaatctacacaagcacaaaaaaaaaagtataagactttaaagaccccaaagacaaacgactttaaatgttggacatacatattcctttngccatttgccatttgcctgcagtttaatcctagcctaatgactacaaaaccccaaagaatagaatggcagagagcaaaccttagtagcgcctattccgtcctgtcttgcctctatagtggtgccattagaatctaatctttttttatgatatcatgttttggaactacacatttaacaacttattaac

SEQ ID NO: 32131 - DNA, 604 bp, Arabidopsis thaliana landsberg
  unsure (1)..(604): unsure at all n locations
atattgatatggtgaaatatatgtcttaaacttgtacatatacttcactcaccagtttctcgatagtctcttgcggggtgttcattgaaatagatctgttaggaatttacatcatcagctgatgctatatatttcccaaatnnnnnnnnnnnnnnnnnnnnnnnnnnnnnnnnnnnnnnngttacctccactctatcgacgcctccttttctgactcctgttttgagatttgtcacagccacagaactcactgttgctgtatgccccttggaatagcctgtgttttgaatttagttctttaaccttaagccttgagttatagtaagcaaaacaaatcatgtgagcttacctcttaatgtactccttgcttcttcgacactcgagggttttctctctaacagcatcttcatagacaaccaccttcatacaattgaaaacattaaatccaagtctctcatagactatctattatcaccaaattgcattagtgtccttagaatgccccatctattattaggcaactcctataaattacacacacacctgaatgtatagacaatcttagctctttagactccatttaatcactaacctaacctaacat

SEQ ID NO: 32132 - DNA, 507 bp, Arabidopsis thaliana landsberg
acattaaaacccaaaaataaaaaatcgtgaacttgtagccttgttcttttctgtgatgtgtgtatgtacttatattattgtggtcactaaattgaggtgaggacgaaggaaacatccaacggatgggattgaaaatacagtgttcgagaacgaccagcaacttttatttgtgatgtgtactatatatatttgaaaaaagataaaattattggagccaaaacttcatttactcgaaaaaattgcagctcatatgactgacatctttcttcacgctttgaccatcccccattttacctttcagtttcttgtttttcgtttcgttaatcttatgtccctcagtttcaaagctgcttgaagttacatatccacgagtatataaatatcttttcaccggagatcaacatgtagtagttaatcttaatctacgccaacatggtaaagctgtctcttcatcatcaaataattacactaagttgacactgattcaaataacgaaccacagtgcag

SEQ ID NO: 32133 - DNA, 3484 bp, Arabidopsis thaliana landsberg
gtccttcacagttggaagaacaagaggaatccccgatttccgagcatctgcttcagggtcaatagtggaacaaagcagaatattctccggcttgatatcagtatgaataatagaaagttcacgatgaagataatccaaaccaactaagatatgaaaacagatctctttaaccatatgaagaggaacccctcggtaatcactgtacttgataaccgacaagaggttatctcccaaatactcaaaaaccatacaaacatgttgcccattaggaccagcatgcttgaaatgatcaagaagcttcacaacacacttcttatcttccgcatcgccttctgcaatctgtttcaatatctttatctcatccatggccgcttcagtgtagtgctgagcactcttctggattttcaaagctacgtatcgctacaaacaaatgaattcaaaggcaagattcaattctctaactacaagaacttgctcattctctaacaaagctagttcaatcacaacaatgcaattcaatatatactgcctaaaccctagctcaagccagttccttttccctactatctaaaaaccctaaaattgattctctgagaaacgaagcatagaagtgaaagtagtgacttacagagttgagagtgtcccaagcgagccagacagtggagaaatgtccccaaccaagcttactttgaatgacataagatccattcttaaaagtatcaccgactcgaaccgtatggtaacctcctcttctgtaatcttctgttccttcgtcctctgatgagtagtcactagcgtcactcagacgtccaccgttcttctcatccgccatcgccggaatagttgaaaagtacccccaatcgagaaacagcgaatctcgatctgggaaattcaattcaggaaaaacccctaaaaccctagaaatttgaggttctatggaagagaagaaagttggagatttttagaagacgaccaaataaaaaaagagattaattgataaattacctaatttgagcataacattaataacagataaattatgaacccgagttagtgttgtgtcagataaaaaaaatagggctttcgttgactctgtctaagtaagagtgtcgggaagtatgatgaacaaaatagaattgtgagatagtatgatttcgtttttaactttgcagaatttccactaaaaaacttgatcaggagaacaatacacacacatagacacaactatgtataaaaggaattatgtacatcaaaaactacaacaatgaaataggaataaaaaaacatacaaacaaacaacaaacaagttaatttttcttttgctgggattcgccggttgggagaaacttactcgccggtgaccacaaattaacacgccgacgaccacatcaaaagggtatcgaagaaactacaatttaggcaaagttgtgaaaagctgtgtgctataagaacatgttgattaccattagtaacaacattagagtgtttccaacaatgtccaaagataacttctgcggtgctgcagcattctcactaaactgtcctgcgttcacatattcgcttcttccgctgctgctagtcgctgagacatttaccgacgtcgaacctgaagaaagataaaaaaggttaagaattttttaagtgtggtaagatttcattgctttagggtgtcatttgagttaaagagatgagatttacagtcgtagtttgcccatccgattctctgaccgaccagatcatagacaaagatcttgtctttaagaaccaaatctgcagaagaaaaaaagatgacaaaaacagatgttttgtgttaccaaatgtagatttcaaataacaaaggcttcagctttcgattcgggttacctccaaggatcgttatcccttgattctgtatcctttgaaaaccgatgcaccacactgcagtacctccctagaaaacagagtgcagaggccaatgttataccaggaacagaaagaaaaaaaactcactgtttcaggtcaaggtaggttcagattctgaaaccaggttcctatgaaaaggttgcgagttaaagtgcttacgacattgttctgctgtatgaggtaatcctgaggattcaagaacatagatgctccaccagcaaagttcaagctaactggaggaaatatgtctccgacactgatcatcacagtacaataaaaaagttcaaatgtttaccaattaagaagacatgcttgggataagaagatgtggtcagaggatagaccttgtggttattacgtaacattggttccctttcgaaacaacgggtctgacagactgcgaaacagcatttgtaatctgaaaaattccataagacagataacatttaagtattgaacgaagattgcagagtatcaagtcaatggagtacagttatagtaactccatttcacagatggttcggtgatatcaaaagcatatagcaacgtgagctctgatgacttacagcttcaacgaaaggaacataggctgcttcagaaaggtatgccaatgttgtaccagtgtcaatgattgttccctggccgtttgatgtagagaagaccgatggattgataggtaaagcttggccatttactgagatgctcagcagattcacattgtaatgaggcctgacattttaacacgccataagatcatgcttatcagtcaatctctaatgaacatttgagcaactatttaaataagatcatgcttatcagtcactctctaatgaacatttgaacaactatttaaaatgaaacggtttcgagggataaatgaacactcactgtgagggaacaagtggagtaaagaccatgtttggctccacaatctctccaagaaccaatatgcctccgcctccattctctcctttcaagcagtgagagaacactcttggagctattccctgtgaagcaagctgagaaatgacagacattccttgctgcccaaacccgaagattccatcaaccgctctatcagacttcactaaatctcccgtctgagaggtgctgcaactggttccagaaaaacaatcccacatagcaaccaacaaagtcaagagtaatggcccatattgatgactatgaaacaaaggattcgctgaaataaactcacccaaacacaaccggagccgttgagtttgggaccagagagcttcccacaatcatatcaaattgcaagacatcagatacgtagaaccctgaagtgccacttccatccccatactgaaacgtgtaagcacaaaggttgttctgaacagaacagcctgaatcagaagactgaataccccaactgcatctttgatcagaacatgaaatcggtgatgctgttacagagctccctggatcaaagaaattcaactgaatctgcaaaagaaagaagcatcatattaacaatccaaaaccacagaaatcataactagaccaagattatgacaaagaattcaaaagctttacttggagtccactggtttgaggacag

SEQ ID NO: 32134 - DNA, 985 bp, Arabidopsis thaliana landsberg
aaattgcacataattcttaacactcatagacgaccaccaaaatggttttacttttaccaataaaatggcctagtggcttatcttagaaccttaaagagaatgtaattggagaaaggattaatgtgttacccataccgcttaatatatatccttattagtctgatatgctacttgtcactaacatcgaatcctttgttcatgtctggccctagtctgaaggtgactaatatactaatattaccgtggatgtttaagtgctccactttgttccatatgttttcaatttttccgttcaattcttcctctttttgctattctctagccgatgccttttgttttttttgcttgtaaattaaagcatgacgtctttgtgattctattcacatggtttggtatggttctgattgtttatgtgcggcgttaagtatgagagtctttcatggtttgtataaatataaactaaatgatatttaagtgcacgtttgattctttagtattctaatatcgaaatttcatttcagtaaagttcaaacattatttaatttttttgttattaaatatttgaagttacaaaagtattgttgaggtggttgatctatctaaccaaattttctttaaatataatgaagaatcaaaacaaactaaagaacaagttcatcatctagttattttcagctgtactatgctcaccgctttattcagattctccaataaattttgcagcaaagtggaaaagataacaaaaaaaacaaatgagggttgttgagtttttagttacaattctccctacgtaagatcatttgccttaattcacgtaacatagccacatgctatcatttctatgtgaatgcacatattcataacaaatggtggccggccaaacaaatttgttagaaacgtatgcatacgcctttttttctttttacaacaatatatttgcatacacttgacgcatccttaaacatattatgacttttcttttttt

SEQ ID NO: 32135 - DNA, 875 bp, Arabidopsis thaliana landsberg
tacctttttggaattcaatactcaaggcgattcagagttcgattaccaggattttggatcgccgacggcatggccgacaccgtctgattctatttccatcgctgacgttgccgatcgtggtgaaggaggagctgccgcggatcatcattctgaggcttcgtcaccttcgtccctctctgccggtgccgggaatggtgcgaaagtgggacgcggtggagttggtggaagtggtggtgttagtagtagtagtcaggttgatgcattggccgctggtgtgggaaatttgaactttgaagagactggtgatgatgatggttttgattatggtaaaaatgatttcacggagcacgcttgtaagtattgtggtatctcgaacccagcttgcgtcgttaggtgtaatgtggcttcttgtagaaagtggttctgcaattcaaggggaaacacctcaggctctcatattgtgaatcacctggttagtaatcatcactgtaatctgtttttttttttcatcttctttttttgtttttaccttcttgcgttgctgttagggcagggggtcatatgtatctctggtttggttccgcttactctacaatttccatgatatagggtatgcacgcaatttgaaccctttctttaatgggcttttccttctgttggttatttttaaggtgcgagcaaaacacaaggaagtttgtctccatagagacagtccactaggggaaacaattctcgaatgctacaactgtgggtgtcggaatgtctttcttctccgtttcatctcatcaaagacagatagcgttgtcgtccttctctgtagagagccttgtctaaatgtaaaagccctgaaggatatgaactgggacctaagtcag

SEQ ID NO: 32136 - DNA, 510 bp, Arabidopsis thaliana landsberg
atcctctcttaaaccttcctcctatcgacccgtaagtcaaccgtggctcgctaaacttaaactcatccctatgccccgggaaaacaagcggttttggtaatccggtgaaagtcgagttagattcaagtagaacaaactgagtaacatatgggtacagttctttccaccgtatcgtgaggagttcaacttcagtactgaacaaaacagcgtcgtatacacgacgagggtactcacgggttctccaaccgtggagtttacagagagattccattgaagcgttctcgtggtgataatgcggtatctcatggaatggttttggtggtgattcccataaaggtctcaagaaatatgaaatcttgagagcgttaatgtatacaccaagaacacacattggcatgattactaagagaaacagaaccgattttaaatccacaccacgcaagatacaacagagtcttgaaataccaaagccttgatctgattcctgattccaaaaccaaagagaaaaat

SEQ ID NO: 32137 - DNA, 1100 bp, Arabidopsis thaliana landsberg
  unsure (1)..(1100): unsure at all n locations
atacacactttaagttagtaatattcaagtaagtttctctctttacaaacactatttatattatttatagtaaagtatagactcttcgctagagaaaactatccaggaactgatgtagttacataggaaaaaagattatttcgaatccaaacttttttaggtaagcaatctagtcgagcattagaactacgaaaaataaatttaatacggtaaaaaaaaaaaactaaatatcgattccaaaagctaaaaatcaccatttcagtaactaaaaccttcaatcccactctcagcagacctgcaattccacttccaccaaaaaataactattcaagtaaagggcttggggtggaatgaaccgcccccaattccaacaaagtccgtaaaatcaccctttcgaacgtgaaagttgtaagcgctccagagtgttttacatgcaaaaagggttttcgacagtactgaacatagccaattttaagaccacattcaatctccacttgtccaagtacaaacacacatgcatagacactaagacacacacttatttctatagattagaatgtaagcagtgatcccgaccacattcaaacacgaagatgaacagaagctaagatacggtctcatttgggggtaaaaagaaaaggaaaccaaacttgaattctcttccttatttaattatattactatacttctcttcattagggcaaatcattgtttaatgttaattaagttactttatgatagtaattacatactaatatgagtataagaacatacctttccacgtagaccaacaacgtcacgagactaagctctatatataggagaagagaaatgcttagtttgttacaactacaaatctcatctttgaaacagtttgaagaaaatacataacacttttaaattccaaaacacaaaaaaggaatatgaagatgcattttttcatcctccttgtaataacctcatggttgtcggagaaaattacttcacttcctcctgattctcgagtattcgatcgtcatggttttcccgataattttgtttttggaacagctgcatcagctnttcanggtatattttaatnggtcattaactaatatgaa

SEQ ID NO: 32138 - DNA, 1841 bp, Arabidopsis thaliana landsberg
cgggtgtcactccaccaccccatcagcttcggctccaagactcagctgacttcgggtccaaggttggtgacttggggcgcaaggcaccgcgagtgaggtgtctactcaagtcggttccatggccggcgaggcaaactacgacacgcccaacttttcccatttttgccaattcgtgcccattctttcccatctttgccctttgatggtgtggcaccttttgggcacatgtggtcaattggccatgcattcgggcaaaattttctcattcggtcctttggccgtgcccgatgcccttatgcgggtcactacaggtactaccgaagttattttcggactgtcacaagaaatgaatcaaaaaagaagcaagaaaccaaagccaagatggagtttctaagagtataggaacttactcaacacatgtacctgcttgagaactattttgacatccacaagaacaagttgggcatggtactatagtttcattgtagaaggatgagagtgagatccacaacaagacggagtttttcgtgctagaaactgcgaatatgtgcaagtaatgttccatgtaactgcaataagaaaacatcaagagaagtgggattacaaacaagaaaatataacttatagatgctaatacaaaagctaaacttacccaaagactaagtctttcttcgtttatcaacagaaatgaatttactctgctacttggtcttctatacgcacatggagtaattcagctcgccattgtccagtctctcccaaactgtgtgacaatccagctctatgtgctttgttctttcatggaacacaggatttgtggctatgtaaatagcagctgtgctatctgaatataacacaggaaccaagtagctagcttttaaagacatgagcaaagtgtgaagccaaaccagttcacacgtagccaatgccaatgcacggtactcagcctctacaaaagatctggaaaccacatgttgtttcttggaacgccaagatatcaacgaatcaccaacaaaaatgctgaaaccagttgtagatctcctactgtttggacatgaagcccaatctgaatctgcaaagcctttaagagtgaggtctgcagatgcagaatagaataaaccttgaccaacactgccttttatgtattgtaaaactcgataagcagcttgaagatgagatgtccttggtccagaggaaaacatatttagatttagattaaatatcggtttgggtttacaaaatacgattaaggtttagtttttttacgattaaatgagtttaaatggcggtttgggtttacaaaggagaattagggtttaaattttgtaattaaacgagattatatatcggtttgaatttataattataactttaatttattatgtaatttaagtaggatttgacatgatatatttttattgcttaatgcaaaaagaggtgaacaaaggggttcacccctcctaagtttcgttctatcctgataatacgttatctgctaactattctgatgcatgtattttctctacatgattattcagtcgcaagtcaactttttttgctcttcatgctaaatattttgttaccttttaataataatgttatcgtcttcgcatatatatgtgtctttgaaatctaaacattggttcaataactgcaaatttgtttatatcgtcaaatatattattaacatattaagttggtttgtacttcatgtcatttcattcatgcttgtgacgaaagtagcatgaaatttaattggggccaaaattatataaaacaaaaacaaatataaaattttgacaactatcctatttatgagttgtcatttgcaaaaaactctt

SEQ ID NO: 32139 - DNA, 588 bp, Arabidopsis thaliana landsberg
ctatggagacggagaaaatgattattgtacctattttaccaatgaaggatttgacttgacactgctggtgcaccaacggagatcttccgctgatctcgaaatcaagacgaagccatcggagagtggaatatagcgcacagagagtgagagagaaggggagtgaaacagtcggcgaagagagcgagattgatgagagaagcttattatgaagtgaagagattgcgcgggaatttttcaccgggaaaatacgccggcgaaagttgctaattggcgggaaacaacgctctagtaataatactcgctctctctctgtgccatctcgaaaatcgaaatattcatgccgttaaaagcttatggagtgagtgagatattgcaacgacgtaaatgggctttgctctgtattaatgggcttaaaagtatataatatggcccattaattcttaaaccgatccagaaccgatctgttatgttaccaaaccgaaaattgttctgttttccaaaattgtcataaaaatcccaaaattccacttttagaatttttttgaaaatatgttagcatggtacttagggcttgatcggttctccctg

SEQ ID NO: 32140 - DNA, 322 bp, Arabidopsis thaliana landsberg
ttgcgcccgccagtattctggcgggcatgcctgttcgagcgtcattacaaccctcagacccccgggtctggcgttggggatcggcggagccctctgctgtcacacgtctatcctcacatacaggggtggatacgctgaaagtttttttgtgaactatcgtaaacgtgctaatcggtgagctgggcagtcgtccaagactacgcttaactttcgaaagaagcaggacccataggggattcttcactgtggactctaatgaagaaacctgcaaacgaaaggaaaccaacggggatcgttctaacgaccggcagagcagccccaa

SEQ ID NO: 32141 - DNA, 1005 bp, Arabidopsis thaliana landsberg
tcgccatttgtacataaaaacaaagacatggcaacaatttaaagcaaaagacttagtaacttattactattttaaaaaccaatgcatgaaaccaaactagagaaacgactctaaattacgattaaaagcataatacgtacaactgatgcaggtgataaacttcattatgatagtggtgaagaagatggggagaactgagttttcgattaaacaaaaattattcaaattatcaaacaattttgaaacttggtgtggttagagatcttacagtttcaatgtttttgatttctaaaagacatccttacttagtgtggtttaaggttttgtcattaaatttggtggggactgtcgatcaatcattctttgtttttcgttaacaacatgcattccactatgaatgatcaccaaccacactaataaagcacattagactatgggacaaaaattagtatatttataaagtaatatttggtaaatgtgaatcatgctatgtagggaaagtgggtttttttaccccaacaaatttcaaatgccttttcggcatgtacaaatgcatattactcaaatgccttataaaaccaaaacttatgtggcctttaaatcataaaaattatggaggctctaaatcgttgtttagtctgctaagtcctaactagtaaattataatatgttttgcgagttatttccaacatggtcgcaaaaattaatcatctaaggttagtggcaaaacactcaaaaacactcctttgttttaagaatgtttgcactcaaaggttcaaatatattttatttttagaacatgggaacaacttagttacaagcttacaatgttggtgcttacgtcacttgacgtgtggagtcaattgtctttatctctatgtttaatcttctgaccacgatgagcggtagataacatttcatatatagcactgagttcatgatcattaaaacataaataactactaagttgtgtctcgattcttgagatgagcatatgttagatct

SEQ ID NO: 32142 - DNA, 601 bp, Arabidopsis thaliana landsberg
gttcgaccgcgagaccacagtcctcgtccgcgacgacggcaccgagctgttcatctaccagggtgagccgttcgtgccgctgccgccgaccaggctgcacccgctggccgcgatgcacttcgcccgccagtacacgccggagcacgccgtgaccgcgcccctgtcggggggcaacgatgactgattcgcgcaacgggctgcccgaattccgcccgtacgtctaccggggcgaggaccgcgacaccctcaccgacggcaagaacaagcgccgcctgcaactggaggcgatgctcgccgagggcggcgagtggaagccgccgctccgctacgaggccgttgaacggcagccgcacggaacccgcggcgcgtacaggcggcacatccgcgcagggtcgaagccgtgcgaggcgtgcctgcaggccgagcgcgtcggctgccgcattgaccgcgccaccgcaaggagcgacgcatgaccatcttcctggacatcctcgccggactcggggccctcgttggcctcgccatggtcctcgccctggtcctcgtcggggtgctgctgctcaccgaccggcgggacgaggacatcgagccgtggggggcg

SEQ ID NO: 32143 - DNA, 2453 bp, Arabidopsis thaliana landsberg
agtaaagcataatatttttttaatgtattgtaccttttttatgataacattagtcagctcatttaataatatgtatgttaccaaataaaatttatattttgatcaatttttgtattaattatttataaatacctgttattgtttatttttaacacaaaaaaataattaattaatatatatatataatttatatttcgcaccgcaaataattttttcaccaatcaaacattattttgtaccgcttattttgatcaaaccggacttgtcccgcaaatatatttctcccgcacgtacctaggggtgggcaaaaaaaccggatccgatacccaatctgatacccgaactgaaaaaatcgggttggggcgggttagagttttaagaaattacctcaatgggtaaaattttagtaaacccgtgggtatcaggtcggtccggagattaccgttatccaaataggatacccgagaacccgaacataaatttaatatcaaaaatattaattacatttaatcttaatataatgtaattatctaaaattataattataaatccaaatatattaattaattttatatctaaatactcaaaacaactgaactatttaaaaatcatttgttatgtttgtagtaaaatatattcaaatctaattaaatttattaaaaatttgttaatatttaacgtttgttttttgggtacccgctatctacaaataaaatactcgtttccatttgtttggatatttttagggtttgaaactctttacccaaaccaacactaactcgggtgtaactgaaccagaccgaaaagaaaattctattttaccctattgggtagtaaatccattacccatttaacccgaacccgaacgggttacccatatgcccagcccgttggatatatgtttgatggaacctggaccaaaaaatccatgttcagaatctcaccatgttcaaaaatttataagtatcaacttattgaatatcatattatcctcttattattaaaagggaagtacaaattaaaattttgtctaatttgacctcaattttgatttcaattttggattttgttctttgctattcatagtcggtgagaataattcggacataaattttcattaaacattataggacctgcgtgatgaactccggtgggttaggagtaactactcttaatcacatatgcaagttcctaatcgggtttaggatccaaattttgcaatcttaaccattcaacaatttttttatacttacctcattcttggtatctaaatatatgagcatattcgatccctaataactacacattcaatcatatattgcctaatcgctcgaaaatcgtattaacttattctcataaatctaatcctaaccataaccaactctacaatattcaccacttatctaaatatagccaatcattcaattctattcaaaattcgaatatatattgttcatagtatctttaagtttatgctttttctccaagatttttttcaagattttcaaaatattggagccagaaaccctagcatccttcaacgctataaatatcaacttcattctcatttccaattcattactcaaataactcttaggtagcaactcaatcgtatgctttttcttcttttcttatcacaaatggctcaagcaattgcttacctcgatgacttcaaaccatacaaaatatcttggagagtttatgtccgtgtccttcatacctggaataccacaaagtttggtgatactttcgacatggttctctctgatgtcaaagtaaaatatggaacactaatataatttctttttgagtggtagagatagaagattcatgcttctgtgaagagagagcatctgaaccgttttgagaagctcatggttccaggagagtggaaggctattgaaaactttggattgacttatgcaaaattcaaagcaactaatcatcgttacaaaatgggcttcatggctaaaacaagagttgtgaggatggaaccattatcagattcatattatttgtccttgacttctttcattgatgttttaactggcggtctcaacgaaaactacttgattggtacattttcatcttctgttttaatctttttaatcttctgtgttattcaatatatatttatgttttgttgttctttttggttcaagatgttgttggtcaaattgtgaatgttggtgaaatggagactattaatgtccacaataaacctactaagaagattgattttgaattgagggatcataagtaaacttcattcagtacatctgtttttcattcaaaataaaagttcgttaatatgtttatctaatatctctggggttcatttgcaggacaagttttcactgcatgtgaagcttctaatggtgagatgatcatatgtttggtcagatatgctaagatcaaaacttacaaaggtattatgttttgatattactttc

SEQ ID NO: 32144 - DNA, 577 bp, Arabidopsis thaliana landsberg
taataattattcaaactataaatagaagaaaaatcaatttgttgaatacattgcttttagagattttattatatacaaaattcaccaaaaaaaggtttgtcataaataaaatgcattcattcatcataaaagaaaaaaaagaaaagaaggaaagataacatatttatacatgtataccttttaataatgaaaaaagaaaaaaacatatgtacatacatatataggtttccttaatcctgaatccttaatctctctcgtgactcgcaaactcacaacaattggcaggtgatattgtcgtaacgccttcagctaaatctgtccatctgtactgtcttcttctttataaatctttaaactcttcaccactaaaccaaacttctctctatctctcttttctctggtccggatttgctctgtttttctctctgttccggatttgctctgtttcactctgttcttgatttggtctggttttcttgggtttattctgtctctgtcttatctttttcttctagacaagaacaattaaatggaatctacttgactacacgacatagatttcatttaaatcccttta

SEQ ID NO: 32145 - DNA, 6378 bp, Arabidopsis thaliana landsberg
tccctgtatgttacttttaccatagaatcaacaaaccctggtttcaacttttgattctagattattacaaagcaagcagccgttcaccgatgcaatgcgtccgtgaatctagcacccaatggtaaccaaccgatgccaccaactgtgaacaacatggacttatacaagaaattcaagaaggtggttagggatttgttgggtcaagaagcttttgtggaagcagtgcctgaaatgggatccgaggacttctcatactttgcagaaacaatcccgggccatttctccctcttgggaatgcaagatgagacccaaggttatgcgtcgtctcattcaccacactatagaatcaacgaggatgttcttccttacggagctgctatccatgcaacgatggcagtacagtacctcaaagataaggcttctaaaggttctgtctcaggctttcatgacgaactctaatccctgtcaaccttggtacagtttcctcatcggtcattggttcgaattcagaagtaccaaatttacactccattgttgatagaattccatttaaatgatgaaaagccttaattcgtagaacaatttcaattggcaaattctcaacttttatgatatgtttgtgtaactgtaacatactggcataatcttagaacatgaattataattaataggctagtcttgttgtaatgcattggcaaaaccacaccttttatatttatattgatcagaatcggagattttaagcatcaatttacattctttggaaggaaagaaactcaagattgcataatgcttcatcaagaccagcctctgctttaatactttaaatcatgaacttcattcggtgtcgccttgacccgctatcgagagaccaacgaattgtgcctccaaacgtctcctatctagctacttagtttggagtgttccaaccttaatgtgttctagttgtattctccttttgttgttgttgttatagttgtcctttgacgtcgtcatttgcttgtttcctttaatcttgatggaagaagattacgacatcaaagctagagaaacaaaaaaaaactcaaaagaaaacaaaacattatgtgatgatgaagtttgttgcaacggctaaacagagcatatactgtttagacctttcatcaacaatatgggctttttggcccattaaaaatcgggctttgtggacttgtttcagtctcatatatatatatgagttaaatcagaaattggttgtcatcttcctccatggctctaaacaagctcctcagtttgactttccaactactcctttttctacttagtgtttcatcggaatctccatggatcgccgaagatacgtctcaaatccagacgaagctcctcgaattcgcgaagagtccggaggtcttcgattggatggtgaaaatcagaaggaaaatccacgagaatccggagcttggttacgaagaactcgagaccagtaaactcattaggtcggagctggaacttatcggaatcaagtataggtatcctgtagctatcaccggtgttatcggatatatcggcaccggagaaccgccattcgtcgccctgagagctgatatggatgctttgcctattcaggtgtattaccaattcacataattctcatcgattagagacatttaggtattttttgtatgaaacttgatcataggtttaattatacataggccaatacaaatgtctcttaggtaatgacgataatggaatttgaattaaggattagaacataatttgactgattctaaaattcaggaaggtgttgagtgggagcacaagagcaaaatccctggtaaaatgcatgcttgcggacatgatggtcatgttactatgcttcttggggctgcaaagatacttcatgaacatcgccaccatttgcaggtctatgcatttttcccttttgaactactttcatcagtaacatttggcctaacacattttgttttgttttgtttagggaactgtagtgcttatctttcaaccagctgaggaaggtttgagtggagcaaagaagatgagagaagaaggagcgttgaagaacgtcgaagctattttcgggatacatctttctgcccggattccctttgggaaagccgcttcacgtgcaggttcatttttggccggagctggagtcttcgaggctgtaatcactgggaaaggaggtcatgctgccatccctcaccatactatagatcctgttgttgcagcctcaagcatcgtcctcagtcttcaacaattggtttcacgtgaaactgaccctttggattcaaaggtttcgttttttactctttgatgatcttcacacctggtctatacattatagaacagaactcattgaggtttcttctgcaggtggtcacagtttctaaggttaatggaggcaatgcttttaatgtcatccctgattcaatcaccataggaggaactcttcgagcctttaccggatttactcagcttcaacagagagtcaaagaggtgatgcgacccaagattgcgcctataatatttcccggtattgttgctttacccatagaaccaatctccggtttcaacttttgattctaggtgattaccaaacaagcagccgttcaccgatgcaatgcgtccgttaatctaacaccaaacggtagagaaccaatgccaccaacagtgaacaacaaggacttgtacaagcaattcaagaaggtggttagagatttgttgggtcaagaagcttttgtggaagcagcacctgtaatgggatccgaagacttctcatactttgcagaaacaatcccgggccatttctctctactgggaatgcaagatgagaccaacgggtatgcatcgtctcattcaccactctatagaatcaacgaggatgtgcttccgtacggtgctgcaatccatgcatcgatggcagtacagtacctcaaagagaaggcttctaaaggttctgtctcaggctttcatgaagaactctaaaccttggttgtagacaggttgttcatcggttattggttcagattcagaagcacaaacctaacactccattgaattaatcaagtgttatcgtacaagatccttgcaagtgttatagaatgatgaaaatgtatttaatagctaattttcaattggcaaattatcaacttttaatagtctgtgtaaaagtattgacagaaacttagaacacgaattatgatcattggtcttgttgtaatgtattggcaaaaatcatatcttatgtttaattgaccaaaatcataagtgaaaaaacagtatttcatagcatagaatcaaaacataatagttcggtgccaaagaaaacaaaaagttacaaatgaccttgagaagtttcacgacaacatctttctctctaacttcttctatttctcagaagagttgggtcctctcttctttccgaaaccaacaactgcacaaatcaatgaaccattactaaccaataatagatacgcaacgtaataagcatttgagtcaaaaccaaatgataaattcagaagctctagtctaaaacatcgaaccacaagtgttccaatataacacatttctcgagtattcacaattcttattcaaattcacaatattattaaccacattcaacaatgcagtagtatcgctttataaaaatcgaattcaacaatgaacactaacacactgtaaaggaatcaacaaagaaactagatcggaaaaattacctgcggtgacaaaacgacggttgtgctgcagacgcttgtgagcacgacctctgggcttctttttcttatcttgcttcgcaacctttggagtttgtcctctaaccttaccggcacgagccaaagatccgtgaacctttcctgaaatcgttaaaacacacttatcgtcaacagatccacatcagaagaaaaatcaaaagctaatctataaatttcaagaagtttccaaggattttacccatgattgattagcttctctgctttttgttcctccgttccgccggctgcaagaagctgaaatgagttcgtgcgaaatctcagaattagggttttcgagatgatgatacgtatttaaacccgacaccgaaatatattgggctttatgggcccatactaactacttaattactattgggctttattagctcgaatatggacatctgtaaaactggacctataagcaacacaagtttgacaatataggaatacaaaataattcgaattcagagaaaaattatctctactttaattggtctataacgtttgcataatctaaaacccaagatattttggaaacatatttctattttaataccattttccactaatacttttcaataacagtagttgtttccataaataacgtctccactaattgaataaaatgaaatatttaacgaattatttaacgaattattaattgcgataattagatacgaatcaaaaagattccaccggcttcgttggaaactttaagatatttccgattttaccccatataaagggaagatccaacggttattcttacatctctcaatacgcagccaaatacactctctctgaaacctctcctcttttagggtttaatatcaacgcctccaaaatttccgtgcttttgttttcgtagataacgaacaatggctgatgagattgtgccgccggcgactcaattagccgccgtatccttagaaaacgatggatctacggtgcaaagagctcaattctctaaccgggttttgattcgaacgattttggatcgacctgacggcggagctggactcgccggtcaaacggttcgaatcggtggttgggtaaaatccggaagagatcaagggaaaagaacgttttctttccttgcggttaacgatggatcttgtccagcgaatcttcaggttatggtggatccgtctctctatgatgtctctaacttggttgctacgggaacttgtgtgactgttgatggagttttgaaggttccaccgaaaggtaaaggtacgcagcagcagattgagcttaacgttgtgaaggtgattgatgttggaacggtggatgcgtctaagtatccacttcctaagactaagttgactcttgagactttgagagatgtgcttcatcttcgttctagaactaactcggtattacttcttatctctttcactgagttgtgttttgattgttcctaggtttgattgaatcaaagaatagttgatttatggtgatatttgcctgtgatttcacatctcagctgttgcaagaattcgtaatgctcttgcttttgcgactcacagtttctttcaagagcatagtttcctttacattcacactcctatcatcacgacaagtgattgtgaaggtgctggtgaaatgttccaagcaacaactttgatcaattacactgagaggttggagcaggatctcattgataaccctccgcctactgaggctgaagttgaagctgcgaggctcattgtcattgagagaggtaatgttgtagcggaactgaaagctgccaaagcaagcaaggaagcgatcactgctgctgttgctgaacttaaaatagcaaaggagacttttgctcatattgatgagaggtcgaggcttatacctggactacctaagaaagatggaaacattgattattccaaggatttctttggtcgtcaagctttcttgacagtttccggtcaattacaagtggagacctatgcttgtgctcttagcaatgtgtatacatttggcccgactttccgggcagagaactctcacacttcaaggcatcttgctgaattctggatggttgagcctgagattgcttttgcagatctagaggtaataaacatacgatattctttggttttcttctttatcgttaatgtagactcagtatcttaaaaaccttcttttaaatttgtgcaggacgacatgaactgtgcagaggcgtatgtgaaatacatgtgcaactggttgcttgagaaatgttacgctgacatggaacttatggctaagaatttcgactcaggatgcattgacaggctaaaattggttgcctctactccgtttgggcgtataacatacactaaagcaatagagctacttgaggaagctgtggctaaaggaaaggaatttgataacaatgtggagtggggaatcgacttagcctcggagcatgaaaggtttgtgataacccttaagaaccattcctcagctttaaacagttttaagaaatggttgctaatgaaacatgtcttgcaattacagatacttgacagaggttctgtttcaaaagccacttattgtctataactacccgaaaggaatcaaagcttttacatgagacttaacgatgatgagaagacagttgctgccatggatgtcctcgttc

SEQ ID NO: 32146 - DNA, 633 bp, Arabidopsis thaliana landsberg
gtcaattactagacccaatattattaagtcatagaggacatcctgtaatacgtttttgtattgacctctaactgaatccttgggctagtggcgatctgggttaatatctcaaactatgcatggtctcttaactatcaaagatagaaatcataaattgagcttacaacggtattcttttgtatgaaacgagagcctttcctttcactcaaaatagaaccatacctttctcctaatttttcttacaaagatcaaaatcaagaaacgacgacgaaacactccaccactaacattccgtttactatcattgtctcatctcttttttttttggcaaaaacattgtctcatctctattttttgttttttgggtgttttctatcattatctcctctctggttttgaatccttggaacccaagaaaacgaaacccaaatcccaatcttcatcactcaatctcttgtggtaagaaatttcttgggtttgaagagttcatatgtttgtttactcagtttcagttccgtttgtgaaacacccaattgctttcttatttcctttcgcagatacaaaatcaaaatcaagatatcgagagatttttctttatttcttatgagtcaagatcaaaaacccttacgttct

SEQ ID NO: 32147 - DNA, 589 bp, Arabidopsis thaliana landsberg
  unsure (1)..(589): unsure at all n locations
gaataacaaacgttacactttaattatactctccactcgtctctcgcctctttttttctttattataaacttcattacctcaaatatagacatatatatagattataataatattaactttgtttgcgttatagatcataacaccttctaatttttacggtgttttcgaccatttctgttaggaataccgttcttctcaagtgaactagaatccaaaatcatttttgttcgccaatggatgatgaacaacttcataaaaaagggttaacttttgaagaaaaaaacatttagtttgtattttattacatagtatgtcgttataatcactttgtttagtctaaatcatttatgtgaatttttgaaaaagtagtttgctaaattccttcgacacttcataccacaattttgtataccagcatttagttggatttttaattagaattttggaaacanaagtggatccactatatactaaatcattgcatgtctcttgaaattcggtttatgtaagtagatttgnagcttcgactccggtgtttttttaggctttgtaagctatacacggttaagtatcagagaacaaaaaaaa

SEQ ID NO: 32148 - DNA, 854 bp, Arabidopsis thaliana landsberg
ttaaccattttaggatgtcaagacgtgcaataagagtggtgaaggcaaacacggagaaaacgaagatcatgacgaaccacttactagtctaaagaaaaaaaacggagattgaagtctaaactgaaacttttattatgatatgaagtttatgaaacaaaagaaaaagtttatgaaacaattttaggtttttaattttccttttaccacttaatagtctaaagaaaaaagcaaggattgaagtctggactgaaattattattatgatatgaagtttatgaaacaattttagtttttttcttttttagttttctttttggtcttcccttttcctagattttgtttcttcactattctaagtttcagatgattttttatgaatagttttcttaaaaatgcatattcgttggacagcaaaagtaaaagttaaaccaatgttaacacataattaaaaaaatgtcgaaggttcacaaagattcacgtcattatgcatgcaatcatagggaaaaattaatctgcttaaaataaaaattaaattaaacgactgtcagacatgttatatattgtttatcgaagtaacaaacacatgaatttagtcaatttactgaatatgcaaaacagctaatctcatgtcttgaaagtatagtaaaatacattttgcgtctttgaagaaaaggcaatatcattttttttaggtctaaaaaaggcaataacgttaacaaataaataaataaataggtaagaaacaatttttgtttatcgataaattatgttaagatattccttttctaatataataaataaaatcaagtaaagggaatagaataaagtaaaaccccaactgcctttgaaaagat

SEQ ID NO: 32149 - DNA, 554 bp, Arabidopsis thaliana landsberg
atctatttacttctaagacatttcttaaaattattaagtgtagagaagaatgtagatttcttgattaaaaaaaattgtgtgtttggtctctaaaactgagaaattgatgagagtttagaaatgaaagtcacacaatatcattactctctcgtttttgtcaataatttattcataactgatgttacagtatttattttaatttatattttccactagcatacttgaaaggctgaaatgaacccaaaaacaaaaaaaaacaaaaacaaacaaactttaaacaaaaactatatacctaatacctagataaacgaaaagtaaaagaactccaaaaatgaaagctaaacgagactaaaaaagaaacgcaccaacttgctcactttgagttcttgaagctcaatgacaatctggtggagccaagccaagtgatttaagggaaatttgattttatgttcattagattttaagaagaatatgcagtggttcttctcctcaagaagaagaacaaagatgtgagagtaatgagaaaaaaaaaaaccgaagggttctttcgtatg

SEQ ID NO: 32150 - DNA, 493 bp, Arabidopsis thaliana landsberg
  unsure (1)..(493): unsure at all n locations
cgaaagatagagagaaggacccaacccgccaaaggcaacggcacagacgggcccccagcaggacggccatacgatcgggccaaaagcccaacggaagagggcgccccagagaaaagcaacgacgcgcccgggccgcgagggcccccagccacaaggaaagaacaacgcgcgcaacagcgccagacccggagacgaggaacacccaaggcacagaagcaaggcggacaccaccggacagaaccggggacagaaaccaaacacccccacaggaggacagaaggggcgaaccaggagagaaccaacgaagaaccaacgaacaacacacccgagggaaccgggcggcccggaggggaccaccaaggcaccacgcancgcgagaaaccagacaaccccgaacaggggaaggacagcgaccacccgagcgcaggaagaggggcggccccaccgggaaaaaaaaaaggagcacccaacaacgcaacngcacagaccaaga

SEQ ID NO: 32151 - DNA, 781 bp, Arabidopsis thaliana landsberg
ctaatcaaaacactcgagcttatagagaagcacgaaatcacattagaggatttagtgaagaagaagcagcgagaagcattggttgggaaagaagagattgaaaagtttgacaaggagattggtgaaaggatgaagatgcaagagatgcttgttaaggatcttgaatacttaaagccttgtgaagaaactgtgatgaatggtatgagtcgagaaccaaggggtgcaaaagttgcagactaacgtaatgtgaacaagtttgaatcacaagagggtaattttaagtgttttttgatatgtgtctaactaaatgtgttagcattacataaactaaacatgtttctatttgcagatgtgatagagattagtgacgacgatgaaagaacccaaagtgaaagcaatgtaggaaactgtaactcatcacataagaatttagagtactccttcatattgtgatcaagatgtggagatggagaagcacaatgtcagatgtggtggtgaaactggaagtttcaaaatatttggaagttagtagaagtagatgactatgagtctctctgatggactaggagggttgataagatatgaaagtttgtagtgtaactgtgtaataagtgatttagcccaacacaaagttgtaagagaagcagcttgcatcattaatctactttcagattgttctatatagtaacaactaaacaaaaattgaaataacaaaaagtttatgatattcattgaatctatgatagttatcctccgggagatagaatttaaaattgaaagt

SEQ ID NO: 32152 - DNA, 1063 bp, Arabidopsis thaliana landsberg
  unsure (1)..(1063): unsure at all n locations
acaaaaatggtagtaaaaagtaaaggaatgaaagacaagtggagatttatatagaaagaggtaaattttaaggaaccggaaatgaaatgaaagaaaaagctgtctgagaattgcttgtgctaagaagagacccgactcattccccaatggtaaactctctttttgccttcatccttttttggtagttagttctgcttcagctttttttctttcatctcattagctnttattattttcaccttgcacctataaaacatgcattgattaatagaggataaatttcacctaataacggtaagattcatttcggactcgtccaagatattctctacattcattgttttttaggtcgacactcccaacattaatttattttgtcataatccattggttttcattaaataaaagaggaaatactatcttatacatcaaactaagataaacattaattattcataaaagtaggaattttgtataaggaaccatagagaagcagcgtaattaatgttatcgtttgattatgaaccttaatacgactataaaactattgcatacttttcaattactatcaatctatggacatggaaaaaaacttggtcttcaaatcttagttacttttaaatttaataaatgatttatcagaaaaactctttaacttctatgaaactaggtacacctgaacaaatgtataacagtccacagcaaaatcgaatatcgataatacacatttgtacttacttattacagtagtgtatatgtaatatatataataatgtataaatgcaaagaactctgtcgtttgaattagtccgtgacgacggtccataaccctttttaacagtcgtcagaaaacacggtcgcgacatgtacatacacgcacatacctaaagccatacgtaacaaacacaccattatatacaaaagatattctattatttttaaaaaataatatttatgacacacatttacgtacgtgtatatataatatgcaaatgcactcacataagtctttctcctccgatggtatatgtctataagctgacgtgacatctctcttacatag

SEQ ID NO: 32153 - DNA, 917 bp, Arabidopsis thaliana landsberg
  unsure (1)..(917): unsure at all n locations
tatcacaactagttttaataacttttagggaaatttacgaattcctctgaattcaaaactgcttttttttgtttataactgatttatgaaatattataaaattttgcgaagaatatttctaaaacaaattctgcactcgttggtaaaaagatttataattgtatcattaacactgaacntaaatattaatctaattgagagacgcttaatatgattcataaaggatcaaaaaagctttctagctcgactgcaaatgtaccatgggatattccaagaagtcgcacgatcgaatgaaagctggtacgtataaattattaaaagttgatctagatcatcaatcaagaaaacatcctatttaacaaaaacaaaggttaacatgtagtatgtatttatttatataattctctgttgcgaatgtgaaacaatcgatagaaattacactagctaagtaattaataataactatttgatcatctataactatattattcaatacttatatgatcaaaatatgtaagctagtggtttttggtatttcttgttgatgtgttacctttctagttgaaacctgcatatttgcttattattaaaaaataaattcagtaataatatacctacgtcttggcattatctatttaaaatgaagtgggtacaaacttataattaatatataaataaaaaaagagattttaatattgcaatcatgttcccaccacttcatcagtcatcataaatagcaccccaataatttaacttagagtaaacaatggttattgagatatgaaaatcattccaagatagcaacagccagccgacagtggacttttgaaaaattaaaacaaatacgtgaacaaaattaaactcaaccataatcatgaatattttgatgaagatatacctttccagtcttcgatcta

SEQ ID NO: 32154 - DNA, 1160 bp, Arabidopsis thaliana landsberg
tgtattggttaagacttaaaacacgtgcatgatgacattgcttttgtatatagtcggatatctagtcaatatattttgcacgatagatttagcaggttgtataagtctaaatcgtgaggaaaaatcacatcctccagatatataattatagtaccagaataagtgggcacatcaaaaggctgtgtacaatcagtgatagtttttgatggtaattgagccactatggatgaaagtggtggacgtatatagttaagtgtatatataaaagagaaaaagcacacaatcgatataacaagtttttctaaaatttgtccagaaagaaaaaaaagagaagaaaaaagactcaacatggttcatggtgatggtcataattttgacggttagactccaactcatcatatgaacaagttcgctttcgggtgtgccattgttgcttccatcatttctatcatctttggatatggtaacatactaacattctctacatatcaaacaaaagttttctacatatatcatataaagatatattcaatggaattatattaatgattttatattaacgaatatttttttttttgtaatggtgtgttgtccttagatacgggagttatgagcggagctcagatatttataagagatgatctaaaaataaacgacactcagattgaagttttggccggaatcttgaatctttgtgcactcgtcggatcactaacggcggggaaaacgtctgacgtcatcggccgacgttacaccatagctctctccgccgtgatattcttagtgggctcagttcttatgggttacggcccaaactatcccgttttgatggtcggacgatgtattgccggagttggtgtagggtttgctctcatgatagctccggtttactctgccgagatatcctctgcgtcacatagaggctttctcacttctctacctgagctttgtattagtcttgggattttactaggctatgtctcgaattactgttttgggaaactgacgttgaaacttggatggagattgatgcttggaatcgcagcgttcccgtctttgatattggcttttgggatacaagaatgccgagtcgcgaggtggcttgtgatcaaggtaggttaaagaacaaagaaataatggtttggtatcaatcggagaag

SEQ ID NO: 32155 - DNA, 1051 bp, Arabidopsis thaliana landsberg
gagaacgaaagtgactcaaaacatatagtttattacacaatcgtaaatctataacctggatatgtgacttgatgagggccttttcaatcaaggttgcaaggaaaaactcccaaaacggtttcttgaattgttcacacatgaatccagcaaggtcgaataatggattatgaacctgaatgtaaggcagaacgtaattgtaataagcacatcataagatttccggaaccttaaacagacacaaaaattctatgcaagaagcattggattgttcagacgactcatctaaaacgtaccgaagcaagaatcatgattgtgaacaagttgaggcattgtgaatgtgacaataaccagcttttgatctgatttacgcgtatagcaatgaagccgctatcgtcaccagaacatgtttccaattctttcattttgccaccgaaaagacttgctgtatagagtcagagcattaataatcaatcttgatgcaaaaactgtttgcatgtcttgttcatgtaccagatttaaactcgacacctctaaaaccaattaattcattcccacttagtcacttagatatagctcaaacatcaagaagcttctgaaactgggcctcaaagtagatatcttaacactaaaccataaacactgagttgtcaataaaaaaggtgggcagagtgaattttcacctgctctggagataaagtaaggaggaagttctcccaacgctgttcctagaccccagaggatggcttctatctgaacctgaggcagtatactgctaagaggaactccagaagaaaaaactggggagccaaactcgtggcatggtttatcaagccatgaagggcttctcttcaactgaattgtatcatatacagcactttttaaatcgactcgcccgcactgcattgcttttatggtaaataaagcaatatggggacccaaataaagaacaaatgtatgcaaaccagatcctggaatcataaataaaagagaacagagaactatgttagaagtattcatcaaaacatctcagcaataagataaaccggaaata

SEQ ID NO: 32156 - DNA, 4055 bp, Arabidopsis thaliana landsberg
ggaactgcgggaggtgactgtctcatgaaacacctatacgtgtatgatcatcctgatttgctcatccaccaatcgagagactactttcacaaaggagaatattggtacactttgtaaccagaaaacacaaaggaccatccaacatgatgaagcgaactatgggcataaggaacaagaaaaggggaggtgaatgcatgacaagaagattgagattaaagaggaaggtcatatcatcggggaaaaacaaaaatttatattcagagacaagcaaaataggcattgtggatggcaccaatacgaacatcgccttccttctccccagtttctgctggctgttagtcacatgatctataaggctgaagatgatgtcacgctaactcaagctttcgatgaactcaaccacttatgcgtacctttggtgaagctccagccacttatgggcattgatgcagctatgaatgaaccggaagtaaaggtgaatccagatgaagatgtagaaatactttagaagcaattatgaatgacttccaacacctattgtcaacaaacgacatggagatagatgcaccgtgatcttgttggtttccatcttggcctcagttttcctttatagattctcccgagctttacaaatttctcacatgcttgttatctctgactgttatacattccggcagatcttctatctggtttagagtatatctcttctttttttggtacctgaaactcatgttttagtctttcaagattctcttaaagtaatttgttttttcaaaattctgtttgtacataatttctagtgcatatatggtcttcacacaacaattaaagaaactgaagcattaatctctagaatgtcaagatcaatgtgtaatattatgggattgcatgcattagcgagttttttctttttttttcaagtataaaacctctataaattaataatgttgggccacattctattaatttatagatgtattaatttattaaattattaatttagagagagttttctctaattttataacttttttaattttctatgaaaatataagatttctttcgttatatctacatatacatttttgcagccattttgtgaaataaatcatgtagttgggacttatttacgatgactgccactagattttttttttgtcaaaacacaactttcattcattaaggcctcaagagaggaaagttgatacaaactacgataatacaacggaaagaaagatacaagttccatgagttttccaaagggatgttcacttttaaaaagtttgcaatggttgaaaaatttgttgaaactatagcggattcgaccaaaaagacgagcttcgcgaaatcctcgaccaacgggtggtcatagacggctcgagcaaacaatgcatacaagcttttagaaacaaactccaaagaggaggctgctggataaaaaagattgagaatactacggtaaccacttttccatggaaatgcggttataatgccgttcttcttcaagtttttaaaaatttgagaactatccttgaacttgatgatttgcacatgaacgagctcgataatcaaaggaagcggggatgaagagttgaaaaagctacggtaatcaccgctctgtggagacgggatcatagtgccgttcttcttcactcttttggttttatgaaaaatctctctaggtgcttcgaaaggcagggttctcgagatataattgtaccaacaaagcaacattgaccgaatatgttccaattgttgtccatgaaaaactggtttcaaatatcgacaccaacgttggctaataatggacaaataagatttttgattaaacctggatttttgcagaaattgattaggatcacacctattggagttgggcttcaaacaccttaaaggcccaaataaatgaatttgccaagacaaggaacttgatgggccgaactggaataggcccaaaaccgaaaaccctagttttcttttggcatgggcgatgagactttgagtgtggcggctagacgacggcgagcagaagatcggagttgaaagagttaccgccgagggatgtggcactggaggagataaaggcgagagacagcggtaccaattggtttgatggattagggttaatccattcgtcgacaacttcgtcactgggaccaacgattctaaaacccaatgagaacgttggtcgatgagggtagcggagcagctaggcttcatggatctaggcgcaggtgacaggttaagctcgagatcaaccattttcgcagatttagctttcaagcatctcgccaatagcacaacgggataggtttcatcaagagtatccagcagattagaggaccaaatgggagaagaggttctgggcagcctgaaaagtggatctctgaccaccaaaaccgaaagcaaaaaggaagcgctgtggtggtcgggagagtgacaaaaggggacaaagagtttgcgagatgcggaactgagacaagagaattggaggagcttaggtacatcccgacgccggcgagcaaaagctccaccggcgttggaaaatagattcatgaggatgtcttcgattttcgtgcttgggagagttcactgtttttttttttctcattttcttatagcttttctcagacgactgccactagattttaatgtttgtttttgataattagaaaaaaaatcttcgaattaaatatttgacatttaacaatcttccctaaatctctccacattaactacacgattaattactaaaataaaattttcaaaatatttaatatcatttaattactacaaaattatcatttttgatattgcttttctccatgactataataattcgattataatcatcaaaccgcagagatatttgatagcatttaattactacaaaattaaaaaatatttagacaatgattcataaacatatcataaataagattaacattaataaaataatggcttttttacgggacgggtttggcgggacgggtttggcaggatgttacttaataacaattgtaaattataaaataaaaatattttatagataaatacaatttgcaaattttatatatactaactttaaaatataaattgtcatcgcggtgtaccgcggattaaaatctattatctccataaaaaggagacggtatagcacgggtgaaatccaatagatatgtttagtttcactgaacgagattagatggtaggacgagtttgggtcgatagtaatacgaaacggtatatcacgtgtgaagtcatagatataacaatcaaaatataattatattatcttaaatactaaacaaaacaaaaaaaaattaaaaaaataaaaatataattaaaatttaaattatgtagttgtaatctagattttaacgcaatgaactgtacattattgttcctatattttaaacagtaaaagtcaaacatagtaattgtatactaaatattatacagatataagagttatacattcagaaaatacaaaatattaaatcatatatatatataatcgactaaacaaattaaatttttatttttaaaagaacaaaatagtcccgcggtgtatcgcgggttaaaacctagtagaatttaatatccattcggttattttcaaattcttggttcgggtcgattcaattttttgcatcggtttcggttttgtacatttagatcggtttatttgcctaggcctaagttttctaaataaagatgtttaggcccatgtttttatatagattttagttttgaaagtagtttagttgggctaggcccatgtctaattttagtttagttgatgggatgacatggaaaaataataagtttttattggtcaatgtaaatgaggtgtattaatcgaaatgttttgattagctattcattttgcagaggtgtcaagctgtggttaactgaaaaagctgaggtgtcagcacagcagagatttgtagtgtttttagggtattaattgattttgttaaatcaaataaaacttctttattagattgcatggaattaggaatagttacgcataagcgatttttaaagtcgta

SEQ ID NO: 32157 - DNA, 949 bp, Arabidopsis thaliana landsberg
tcatgggataaattctaaacaacctataaaattgatcaacaatatgcatacagcaacaaatatacataaaaggaaaacaactcagtggcagacaagcttggacccaaattcttttttctattggtcctttcctttaatatcccatttctacgtattctggtttttttttttttttttgtaatatctgaaaatttaagttcaaagaccttatattttctagagacggggacttataccaggttaaattcatcttttttagacaagagatcttttccagcatgcttcgaacccagcacttctaataagtctagattaaatacatctcctttgaagaatagatccttcccaacataccttgaacccaacacctccatatgggaaatttactactagactaccaccacgttgtttacaatacaagaaaatgacatgaaaacgatcgtagtttataacattgaaccctaataggaaccatgaatccgagagagaacatggcaaaaactcaatttctcattaatgaatcagaaagtttgttacatcaatgtatagactacagattctattaaaccagaaataaccaagagatccaccttaattagatgaataaaccggacattacagagcccttaaccaactctattatccacagcctaagtatatacaagctaataactacttgtctgatttgtagcttggtagttggggataatgatttgtgtgagtagttatgacttcagtccattaaaagctctgtttaaaaatgatattaaaaatcaataaaattacaaagtgggattattcgcacaaattgcgtgttgatatgctattggcacgttgaagaaagcaaatgacattgacatcgttatgattaaattacaaaaactttttattttgtctacaacgttactataaaactttcttacggcatgattctattacaagaatttga

SEQ ID NO: 32158 - DNA, 396 bp, Arabidopsis thaliana landsberg
caaatgcgacattggactcaaaccatgcgtcttcgccagttgcttttgttgaaaaacggatcagatttgaactaaaacttgggtgaatagtgaacacatcatataaactctctccaacatcactcaactattcatatatataaaaccacaggagatacatgaatcagaatcacaagagataagctaccaaatataaaaaagttccttaaagagataaaagatcaaagctttaacacacagtgtgattaataaacaaagatttaataatcggaaaacaaaatcagaatctaatccgaaagattcagattgattaaaaaacaaaaacaaatcaagatcaaatttttcaatcgaatgcagaggaaacagagaggcgaagaaaagagagacctcgagaac

SEQ ID NO: 32159 - DNA, 2218 bp, Arabidopsis thaliana landsberg
ggagaagaaatatttgagcgtggttaaaatattaagaaaaggaagagacatggagacgatgtctcaattaagggggcaagcctctctggccaattacagagaaaagggcccttttagattctcttcaagatcttctttttttttcttgtttttttttggtataaatcacacatttactacaaaaatgcacttataatatttagtgtcaactcataattgctaaaacatttctctcgtgttttccatagcaaggtgccaaaaacgaattgatcaagaaaagtaaatgttttacattagttactatagaatttagattatggtttgtttaagatttagaacttggtgtaggaactaataattccctcgtgatatatgacaaattgacaatgacattcaccgttacgaaggatcgaattttgtcatgaaaaaatattttctaaactatggtatgaagacaatatacatatactactcattacccttgaattttatttttgtttttcctttgtagagtactcataactctttagattgagatatcaattagaaacatccaattcacacacaaaatagtgggaaacggcaaaggagagaatttgttggcggataattgtccccatatttacaaatgagtaaaggtcacacaaaagagatccttttttctcatatggcagcgccatgaaaatggtcacatggaatgcttttttggtaaattttcttttctcttttgcttatttcactctctgagtgcttttttccctttatatgcttacctttaaaataaaataaaaccacatgaattctggggggaccacttgaaacaaaagattcaccatcaccctttatttctcaacttatcaaaaatatatatatcaatagtctatattctttgacctttggagttacaatgtataaacatagaaaatatatttgcatcgctcagcattttgactattaaagggcataattttggagcttcatgccaaggcaaaaagataaagaacaatcacatgaatgacaaaagattaaaaacaaaagatttttaactaatgaaaaaaaacacaaaaaacaaataccggtaaataagggcaaaagtggaattaagtgttatagctccgctggcgattggcagagatataaaaactgatctctctccattcatcttctcttgtttctaactagtcacattgagagagagagagagaaagagagactctcagaatctgaagaagaagaagagattgttgtttttgccttttatcatcggtttctttgaatctctggttttaaatcggatttaatggtggagtctctgttcccgagcatcgaaaacacaggtgaatcgtctcgaagaaagaagccgaggatatcagagacggcggaggcggagatagaggcacgacgtgtcaacgaagaaagcttgaagagatggaaaacgaatcgtgtgcaacagatctacgcttgtaagctcgtcgaagctttacgccgagttcgtcagagatcttccaccaccagcaacaacgagaccgataaactcgtctccggcgcggcgagggagatacgtgatacggcggatcgagttctagctgcgtccgctcgtggtacgactcggtggagcagagcgattttagcgagtcgcgtccgagcgaagctgaagaaacatagaaaggcgaaaaagtcaacgggaaattgtaaatcgagaaaaggtctcacggagacgaatcggattaagttaccggcggttgagagaaaactgaagattcttggccgtttggttcctggttgccggaaagtctctgtaccgaatcttttagatgaagcgaccgattacatcgcagcgttagagatgcaggttcaagccatggaggctctcgccgaacttttaaccgcagccgcaccacggacgacgttgaccggaacttaacggcggcagttagtttgtcagttgttaattagcttttcttttacctttttacccctttattttggcttcaagtgtttttttttttctcgtcgacgcgattttaatttattaaattcatgtattttatttgtatacatcatcacttctttttttttgtatccattttgatctttctttgttttttcgttagataatcaaagttatctaaacaataacaaccacaaaatgccaactaatctcgattccaaaaattgtttaacgcttttaaaaaaaattagacctacaaattataga

SEQ ID NO: 32160 - DNA, 5069 bp, Arabidopsis thaliana landsberg
gtaaaaaagttcaagtcgtggacgaagacaagctagaagagttcatcaatgaggttgtcattctttcacagatcaaccacaggaacatcgtgaaactcttgggatgttgccttgagacaaaagtccctgttctcgtctacgagtttattcctaatggtaaccttttcgaacatcttcatgatgagtttgatgaaaacattatggctacttggaatatacgtctccgcattgctatagatattgcaggagctctctcatacttgcactcgtctgcatcgtctccaatctatcacagagacgtcaagtctacaaacataatgttggatgagaaatatcgagccaaggtgtctgattttggaacgtcaagaacggtgacagtggatcatacccacttgacaacggtagtttcaggtacggtgggatatatggatccagagtactttcagtctagccaattcacagacaaaagtgatgtctatagcttcggggtcgtgctagtggagctaataactggagaaaagtcgatttctttcttgaggtctcaagaaaacaggacattggcaacttatttcattcttgcaatgaaagaaaacaaactcttcgatattatcgatgctcgaataagagatggttgcatgttgagtcaagtgactgcaacggcaaaagttgcaaggaagtgtctcaatctgaaagggagaaaacgaccaagcatgagagaagtgtcgatggagcttgatagtattcgtatgtcttgtggagatatgcaactgcaagaatgtgttagcgaaaacgaggaagaggaagaacaaaacaaaggacttgtggaagatatcatgagggcagaatcaaggagcaacgagtttgttaccgctccagcttctcactacaatattgctgctgcctcatcttcttcgtggtcagatgttgaaccattgtttcctcttcaaacacggtgaaacttcatcttggaacacgaccgtataatatcttgtctttgcttttatatttgttttcggtgttttgcaagtgtctgtaataaggaatcttgtttgtatccatttccaaacaaacaaacaaaaacatgaaaataattttatagtttggttattatgatatgttttacgcaataatacaatagtcacatagttatttcacatacaaacctcttaaatcgtattggttccacgaaactagcagaaggctttattgactattgaagatctgaagagtttatgaatcaaatcaggacaatatgagtcgaagaatctcccctgaaaacttaaacgatttctcagtctcttccaagcaatgactcttttcttctcttgtccaccactgcccattcaaatatccacattagctattagaatacacaaacgttaatcttctttgttcaatacagtagtgtaaagttcaatacctctgcaactttgttcagtttttgcctcacattttgcaacaactgagaaagttgaccgtcccatttatagaactcaagttctttattattgagtatcttcttagatacctgcataactcgtaaactttcagaaaatattccaacttccaaatgaatatagtacctaaagttgttttctttacctttgttccaatcatttggccaccggcgctatgagcaaagtaaatgttgtagaagtgacaaatgaatgcttgaggatcattctctgctaaatcttttaaatactcagaatatgttttaccaggagccattggctctggaatctcataaccttgttccttgaaccactccaaatctttccgcaaactctctgctctttctaatcccgtgttcttgaaaccagcatctacacaacaaaaacagagattttgacaatgttacacaagaaaaaggacctacatttgcaaactgtaatctctctaagactgtttcaagaacttattctatgtgtgtgtgcatatgatcctagaaaattggtctgacatttgaatgcaaatcaagtccaaaacatttattaaggatctaaacacaatcaacacaacacttcaattcatatgaagtaaaaaaaaactcacaagttgggaaattggatccatcaatgatcccatcaagcgtgtcgtaaaccaacttactatccacaagaaaatgtaagtatccttccacagtcggctcccatttcgccaccggaccttcctctggagatctagattctttttctccttcccttgcttgatctttcgtatgcaatctcatcgccacgaatctcatctcctccacaaaaccctttgattctcctggatacttcttttgttgcttctccgttatagccgccgcagtcaccacggaagcttgaccaccgtttgcttttacagcaagatagccacgtggagcagttagggttcgggcataactaatcctcccggtcgttctcagaccgagatagctctcgcaagagagtcttgtgctcgctggaaagtggcaagaggggttaagtcttgttgtagccatgaatctgcaacatacacacacacgaattgaggatttcgtcatgttataccgaaattagggtttgttggagaaacatgaaggacgtgtaagcatcaagcttttggaaaaaaaaaataacaattgacgaatttaaacaccaaaatgtaaaactttcaaatcaaagataagaagattaacaaagattttttagtatgtaaaaaataaaaattacaaccacataccttggaatttttgcagattgaataagaaagatgatggaagatgaagggtttctctgcggttggggatttttcttaaatatttgtttgtaacaattagtcaattaccattaccaacatcataaattggtatttttttcttttctaaaacagtcagataatattttttggaaaaatcgaaaattagatttgttctgttttcttagttgtgatgattgaccttttgagtcaaccatgacaatgaagtacttgctctgattcgatatttgtttatcataaggaaataaaaaatactaagacaaaaatttgaatggaatatataatttacatcaaacatttttttctatgaacagcagaaaaacatcatgttccaaataaaaaatctgcatccatgtctctatttattctatatgtcactatcttttccttatctttgttagtctctctctctattgaagaagacataggagtcctaagaaacaagaatgttgtggcgctcacacactttagctccattttcaccccaccacttctccgcttgttcttcggtaaattgtttccggctgcagccaaaaaaacaaagtcttagcgagcttcaacgagatgtaacatgatatgtcatgttgtggagataagaagcaaatcatatacctgaagcgaacacgcttgagttcagtaccaccaccaggtaaagacaacaacgttaaatacactcctggttcgtcttgcacaaccttttctggtttatcattctgtttcctatgcccattagcgaagctcttacttgttagattgttctcattttgactatcttgagaaaccatgcttcttatatgtgtttgattactagcctgagttacagtctctgatttctctttgtctgtgtgctttgagttagtgctaatactatccttttgagattgtttttctgccatttccttcaactgcgaaaaccatagtaacataatgagaaatagatataagagacaaacatgtgtagtagagtctggaaattttcaaacctgagtggttagagatcttataacctcctttgcagatctgttttcctctgcttcatctgctgccattgcagtcacaacttttaactgccttttggttttttcgagttcctcttcaagttggtgagctttcgaagcaagttgttctacctacaatgttcagtggatagatgcatgtttttagtctagaagcatttttgctttgatgtgatttacagctgacaatagatgatgtatacctgttcctttagaccagccatatcttgattaaaactgtcttttaattgtttagattccgcagctgctacttcataagatcgacgtggactagttgactttactgaaactggggatgttgtgcgagagctcattccggaaccaggaattttaaccatcatattcttggggattttaggcaaagctgttgatcctttggaaaatggcgaaccaacgggctgtaaactgccattcatggaagggaagacattactgttatttacttccggttttaagtctcgtctgtggtgccttctttcactgtaatgcaatgaagagtcagcagacgatagtctggcgttcactgaaagaaacttttgagttaagctgtctctttctgaaacatctgtcgatttccgcttgttcaaaagttttctggtccgtgaagttggcgtagaaggagatgattctctcgactttttcagcttggtgaaacatccgtaacacactcgatatggtttgttcatgtcaggtgccagagcagctcgcagagacttcctactactgcatactttacaaaataccagaccacagttgtaacagttgtggcgttttcttctaaagttgaagggattgcggcaaccagcacatagagaatgttcagagccaggtacccatttgtgaacacaaatcacagcagtaaagtttgatccacatgttatagccttcacttgtttttctctcagaaaacccacaaccgcaggttctcttttgttctcaacgtttccatggcctaactggccatttaatccctttccccatgtgtaaatttctgatttagatgtcaaaactgcaacatgataagaaccacatgcaatctcctccacagaagcctctacaatgtctccttcaacacgctcaggaaaatttcccttggcggtaggattaccaagctgtccataagccgtgctacccattgtatacacatgtcctctggatgtaagagaaacagtgagactatgtccgcaggcaacttggcagatattttcattcgtcaatgaaattacacactcgggaagtagttttgtatcattgtcaccatgaccaagctggcctttctgccatccc

SEQ ID NO: 32161 - DNA, 2055 bp, Arabidopsis thaliana landsberg
tgcttagttagagatcgctaaagggatttaggtcagtgtctagctttgcttgaggatttctatcacgggagtgaattaatccgttgttgaacttgttgtctagggatagcttctgtgaagttttgtcaaccgcctgaatagattaagtagaccacactattcgattaccccatccttaggaatcgtttatccatttgattgcctgttatcatttctgctttgtcattcacttgcctgctattgccattcctgcttttaatttcacttcatttctgttattgcatactaggactgttagaaccaaccaactatctgcttggcttgacttagagctttctgatcatatctcatctgtttgcatcacaccggattggattgacatcctaaaatactacaacaacaagatagtgttttagggattaattgacaaaaatcttactatcaatatcgcggggtggaataactgactttgattttccaatccaaatagaaagctttgaatttgtgtgaaataaattgtggtcctttgtttgtgactatcttgtatggaacaccatgcgggcatatgatatttttccaaatgaaagtttttaccgccgaatccttgatgcttacgtattcctcggcctcaatccactttgaaaagtaatcagtgaagaccaagacatattgtacgcctcaagttgatcagtgcaatggtccaatgatgtaatgcccatgaccttgactatgcggccgaacgtgcagtctatcgagtaaaatgcgagatcatgccaagaaaaggcaagaccagttcggccatttgatgtggcaagtcatgggtaaggagcattgcaatggatcaagtccacgggtaaaggaatgactctccatcagacggactaagcttagctacgatgcgattatcggtaaaccccgaaaccattaggctagcccttagacctaggatagcttaagaaaaccttagttttaggaaaccttagaaggactagaaaaccttagaaggactaggagaccataggggaatccatttgggcagtgggatatgagtatgggtcgttaatggtcgagggattgaacggaaaatgcggataagtgacgttagcgagcttagtcggttaattctggcatgaaacgtgttagtcctaaagaagccttgatttgtgtcatggaccctcatgagacatcagagatggagtgtgccctatcaatgttcttgcggtccagtgacagatcatgggtttcgccggaatgaagaaacggacggccaggattgaactatggttcatgtttatccgttaaggctcaagcttatccacaattccggtcatccttatcctttagggtcgagcttatgcattttggatgatgtttatccataaaaaatggaggaaaccaatcggagaccgattagtgtcccggagcgcccgtggagtgacatttatcgagttttgattggtctgggcgacctcgtgcttgttttggccgatcttgtgaccgacttaagaccctaaaaatactccatttgttcctcagacccaaaaatccactagaaaacgcctagctcgcgggagaaaaccttagaagccaaaccccttacgggttgaaaagacttaggccacgggcgggaggctagactcttgtggttggacgactcgggcatacgaattcatttcggaaaccttggttggccgactgcgggcgtctacgtaacgcttctatttcgtttatatttatatagcgggataggggtgttacaaggtggtatgagagcatggttatgatgctacgggaaaccatagttttcaatgttttatcgagtaaatgtgtcgcaaaaagctgttaggaaattggttcagtcacttgctagagtttaggtagattaacccataggattaaccctttttatttaggttggcttacctttgttgttagtattataggatgcttacccttttgcttgtattttcgtgtcttaacctttttgtttgtattatagtatgctcactaacagattcggatcagtttcggaccaacgattgcatttgtgaccat

SEQ ID NO: 32162 - DNA, 8281 bp, Arabidopsis thaliana landsberg
ataaaaccgttgtcatttgagtttgtgtttgtgtttgcaatttctgggagaatggtctaatccaaaaccgtcttaggttctcctccgatctcttcttcgttcccgatgttagagtctaatcaaaatcctactttggtgctcctcgctttcactgccccgatctcttctttctccgccggtgaaattaaggttctgaaatcatcctcgattgggtcaacacaatcaatcacgaatcatcatcggcgatcaggtattcaaaagagaaatagatttttgtttcggtgaataagagaatattttatttctcaagaatgaagaagagaatgagaatgcgtgagactctgtatttataagcagagaaggtttattttcttaagagtatatttgcttcattaattgatgatttgatattaatataaccgttgggatttttcagtatttttaatttttaatttgtatttgcaatttttcaggcaatcttggttggctcctccaatttcagaaccagtttgtggagcataagccacattctgtggacttgactgatacaggacacgtatgaccaatgctgctatatgtgttatgagagaagtggcctgtatcaacaatacatcaggagcacataggccttttacaagcatcatcaaaagcttgacaacaagaaaacaagaggacatagtccctttacaagcaacaacaaagcttgagctcgagtaccttaaactctgctgcattgaaccaccaatcttatatatatatatgttggcaagtctggtgtggagaggaaggatacagcatatttttgaagattctcagacatttcatcctttctttatcttgtctcttctcttgcaaactcgttagtccatttaggttacttgttattgacttaatcatagttagatgatttctgttcaacttttaaatgtatgtttgtgtctgcattttgcactctttatctgcagatagtcaaaattttcccaattgttgttatgtttggagttattaaatggacttggcaattctaagatcatttagccaatattggcaaacgctgtataactggaaatggaaaaaggaagaacaaaaacgaaattgacatttcgaatgacaaaaagatgtacatgacatgttgttttatgtattggcctgtgtttactcttcctgtgccaaactatttaattctctttagatgctacttcatcaacaacaaagcttgagctcgagtcccttcagcagctgcattgaaccaccaatcttaagcaagatgatctgttgttttctggttcaagtcgtcgttggaacgtaaaccacattgttcagcaaacagtgagatcggccacagaagagacagatcatgcttccgataagtagcgataccaagaccctgatccatgtcccagctctgcaatttcaaattaccagcaagggtttagaaacatcccaatatactatatcatacatgggtccatcaggctaactcacccaatgttgatgatcaagtaggtgttgatcaaaatgcaaagaactggaaggtatgggacgaatgggcagagaaaccctgaaatagaatcatttatagaatgctagtacgaaactgcggctcaagtataaatccaagtttaaacgtcctaaccagatgataaccaactcagcaaatgaatagaaactcttaagtaagcaacgttttagatgaaagtgaggccaaccaatgatggctcgcaaaatcttatactcagttaaatttctccaaaaaaggcttaaataagcttcaggccttacctcctttgtgtccaaattttgtgcctttcttcatcctcgtcaatgtgtagcctttaaaaagttttaagtgttcaaactcataaacaaaacaccaactcttctttctacctgaaaatccaactatcaagataagatcaatgagagcagtgaaataattttggtgtggagcttacatatgttccctaagccaaatggctgacaataacgtttcacaaacaacaactcatacgagaagctcatctgtacaagaaaacagaaacatgaatgggataatggcaatcatggtttaaaaacataaaacttgcaatcatatatagtaataacctcatggatagaactggaagggtgagacatttttgacgactttgggggtctaaaatgctgaacatacttgaaccgatgtttttaatccactacatacttgaaggtaggagaagagttgaagatgacattggagcagaagcactatatggggttcagatgtaacatttccatgtccaagtgcgtttctgcagagagcttcaagtcatcaaaaatcaccaaccaccactaaatgtgaactttatagttatctaaaattatcactaccatcagatatcatctagaatcaatcgtaactaaaaaaaaaaaacaactttcaaaaactagataataacatataggagctagcaacatgtatactatttcactttttttagagtttctaagccaatcagaaggctctatttcacacccactcgcacaaagtgagcgttgagcgcgtgagagcaattctgtgggtgtacccctttccaaaacacgcctttttcaatcgacgcatttgtctccaaaatcctcgtcgcgtgaatattttgtttgttacttcttctctatgtaaaccgaaccgcaaatcaattctaatttatttcaataccatttaaacctaaccgaaatcaattgaaattagtaatgactaaccgcttgtcctcatcggaagagtgatctaaagctagatttttcgagagagaatctaaggaaattccgacaacagaagaagggagtataccggagagctcgccaatcaccgccggagcgatggagtaaaattggtacgattttgaaaaagagaagcgtggtggaagaatttcggattaggattttgatagtgtgtaaacgacggtggtcgatccatgagctccgacgacggtgagctttactggcaacgttgtgagtttgtgtgtgattcgaaacaaaacgtttctgtttactacttaattggatatactgcccatttaattaggcccattagtgtctttattcggcccatatttatttttcttaaaatattcaccgtaagtcgatagagtaataaaaaacgttgtgaactgtgacaagaaaacgagatgtttaatctttcacatttcatgattctgattcaaactcttcttaaacaggatcacaaacgtatttataagccccaagtcctgttctcctgaattttaactacaagatttgtgtatatttattcattaaactgttacatttacatattacacacactttcgtagttatttcccacacattcatttttaatctgtatttcttaccctttattagtatatattttatctgttgtataaccatcaacttatttcttaatcattaacgatatcatcttgaggagaaaacacttttcgaagacatcttactatattgatgtccaacgcaaaagctttagccaaaatctttgggcaatcggaggcttcgacccgaaaactgcatcacctaccgagatataaccaggattttggctcccaaccgccccaatcgcaaccgcatttgtcttccctatgtttgcatgaaattgtaccaatccgatgggatgaacaaacacatctccgggataaagaattttggagaagagtgtgtagttgtagtcgttcgacgatacaaaaccgactaggagctttcccttgatgactaagatgatctcggaggcgcgtggatgtatgtgcggtgggatttgaccaccaggggcaaagtcaatacgggcgatgccgaccccaagagtgttgagaccggggatattagcggggttcacaaaggagccaaggcggttgttggtgtttcccgggatgttaaggccagaagcaaagaaatcatctgatgttactagttttggatctttgcagaattctccatttacgaaaactacgataaaattaaaaaaaaaagaacgaaatgtagacttgaatttgaaagatatataataagttttatgatcataacatcgtcttccatatcaaataccataaaaaatatagggttattcttatgtataaactaattgttttacgtataaaataataattagagattacctctattagttccgttggtggcaacacagtagtcttggagaggatttggatcgtaacaatgtacaaatgtagatgctaaaaccaacaagatgattttagctacaagaaactgaacaagacctttcattatattctaataaaatgtttgtgtggtttttttcccttttatgttgtggattgagcgatgatgcatgagaacaatgcatgcgctatatatacagcccaagtcgtctaaaaacatattatttagcttacaagtagtaaattaatcacataatagcttgacctagtttctacgaaaaaatcaaggtccaatataggaaaatttggaattttgggatgaacatattatacttgcacacaaccaagacattaatcatacattaaccgcacatttaaaaacgctgttataataatcacatacataagctacacccaaggtacactattagaaaaattaagtccactaatgtatatatctttagtttgacacgagagccgccaggttgaaagtggtacgtgaggaacggcttgcacaacagtagttggaagaagaaataagaagccaaatccaattttgaagatcacttggaaactgagaaggagatggtgaaactctgtggtggatcttatctggcaagaactcggtgtcttaacgagcttgatctggttttaagaagtgatgatcacaggcgggaactggaagagaaggaggaaggagagatctagtagagacttagtttcagttacttgcgttgcaagtttctcttcagctgtcacacgttattcgttgggttttttaagcttaactttttgttacagtgtttgtttttgttggtataagtaatactgtaatagtgtgtaatattaacagaaggtacatcagtaagggttacatcacctgaactggtgttctgttgtaaagtaacaacagacttaaaagttaaaacattgcagtctctcacaattacaaacacttgtggagtttaccatttcttcccagcaatctcacggctcatggcttgttcacagcaaaaacatacttcaattaacttcaatctgtcacaaccatagacgaaaaagaaactgaaaacatatctagacgggaatggtaactacagtgaatctagacagctggaaatttgagagtatcaccaagtgagatgcataagagaaggtaaaaatttggttaaggatacaaaagaggatacggattcacacataattgctgatgctccaggtacacttttactgcaagatcatcggaataaaccaccccatttcaaagtcagaccagcccacacggtgatagagagagagttttaaaatgactaaccttcttttaagttcactctttttctgttggtatgtatctatcttcaaacaaattttgattcctaggttgctgactgcggcggtcataaggatcatcccttttggtcttataatctgaagaactcttctcacgagatgatctgtagttttgatgataagattccccttcaatgctatgtcgtttggtccttgtgaattcgtcatctcttcgatcattgtgcttgtcctttcttcgatcacggagcttgtcatctcttcgatcactgtgcttatatgatctgtgactctgctgtctctgcgagctacctgaatcatactcatcatgtcgctttactttatctgaattttgtctattatcgattggatattcaatatctgcacggttctctcctttccattgcttatctgttgatggtatactgtatccaaagtcactttctttctggtcgttgcctataggagaccgggattgtaatggcattcctttctcaaaacatccaatacctcctgctagcttaatttcttctgtatattcttctatcatatcatgtaagacctacaagacaaaagaaggagaaaactcactggaagaagaggatagtataagtttattgctaactgaagggtggtcataactaaaagtatgaatttagcaaggaccaatttttttcacaaaatctgcaaaatgcctcgacaagacaatagtagagtcagcatataactacactttttccaacaaaatttcaatgagattgtccaaacattgagcattttgtagcacattcaaaacactggaatttgtgattgtcattcatgaaaaggaaacagctcttacctgtcgaggcgttcgtttcaccttctttccacggtatgacattcgacgacgcttataatctctctcttcagctaaaagctcttcccttgtcttcattttatccatatcctacacattatagacagtaaaatatatgtatttcagtaccttcaataaaagttccctacagtaatatttgtttacttaatgttagataacagttagttgagtattaacctgatttaatgagcgttgtctcggacgaccatcatgatcaataataggtcggtagctacaacgtctattccgttcctcatcagctttagctgtcataaaaccaagctcagccgccctacagattgacagacagagacatcatgaggaatcaaactcaaatgcaaacatgaaatgatgctttcataaactaaaaatcaagtcggcaaaacagaatcgcctttgaaagatttcaaacctaccgctgatatctcgttagtggttgggcatatcgaactgcccttattttttcttcaagcaaggatctttcatacaaagctgcaacagctgctgaaacacgggacacagatatcacctgtggactgtccaaagttttgccacattccccacctgaactattctcaaagggcttctccatgatcacatccttatttctcaaccttgcatcatccaaatcctcgacaactccagagcatttagatctagttccttctaaccggaacaacattacctgagaggcagattctactatgcactgtttaaacatgtccaaagcaaaaaacttcccatttccttctccatacaagacagcaagttgagaagctaaccaagacaagacttgaatgaagactggacactcaaatgtactactcttgcagctcataatcttctgctcaccaacatcagtagcatcagactccatcctaaatccacaagcttctttcacagcagatttgagacacaaccgaaagagtaagaatatatgatccctcatgaatgtatcaattataacaccatatctcgtcgaattaaccagaatccatttcctcaatgcacttatttcaaccacttttgaacccacaatcgaagaaagaacactagaggaatacgaacttgggaaatccctccattgatcaatctcattcttcattgcacaaagatcagacggtaagactcctaagcatttatccaagacaatctttttcaccttctcatcagaacctacaaaatcgctacattccacagatagaacatgaggaagtgttaaagttcgtttttttccatcgagctcagagaatttaacagctcctggacaatctcggtagaagaaattgctcccaaaatcggccaagtcatctaaagagatacagagatcaccatcaccgttgttcaactgtagttcacatggtaactcgagcgtgttccggtaactactaaaggattcaagaagatgaatgaggtcaagagtatttgggcaacgaagtgaatgaagaaagagagcttcaggtggcataaagtgatttgaatcaaaagggcaacgaacaaaacagccattttcgtccttctggagaagagaagagtgatctaaagctagattttgcgagagagaatctaaggttctttgacattctgacaacagggattttaaagaagagagtgtaccggagagctcgcgaatcggcggcggagacggaacgatggagtaattgttaggattttgaagaggaggtggaggaggtcggaagaagaaattaggattagaatttggaggaggatagtggtagaagaggttcggattagggttttgatagtgtggcaacgacggtggtcgatccatgagttccggcgacggtgagcttcacagaaacgttgtgagtttgtgtgtgattcgaaacaaaacgtttctgtttactacttaattggatatactgcccattcaattacgccccattagtgtctttttcggcccaaaata

SEQ ID NO: 32163 - DNA, 912 bp, Arabidopsis thaliana landsberg
  unsure (1)..(912): unsure at all n locations
aaaaacttataaagttgcgtagggtatatgatagtcaaacaggaacaaggcaacaaatgcataaaagcaaaataaatacgaatgatgacctacattgtcggagagaatccttaatataaacaattgtatttttttagtggcacaaaatgagacaacgtgagacgattgttaaaacatattgggtccaatccttaaaaacattatgtaatttattattagtatgtaacagaatcaaaagaggtgtctctctgcaaattcataaatatctgcattaaactatatacgattttgtttggtgtaatagaatagtactaagtaacccatcttactttgtttactattcatatctttttgtcagaacacaaaagcacatttagagttattaaaatagtgattatcttttctttattggtagaaaccatgttaattagtcaactaatgattttttaaatacaagttgtatacttttggtgttgtgattttgatatggaagctaaaagaagatagatcttatgttaacctcgaaaatccatatttgacatacttcaaaaccaagagtaaatgttatagaattgcataaacgaataaaaaaccttcctaaagctttttttacaccaactttactactaagtaaccagaagaaaagatttaaggccgaggtgatttaagcannnnnnnnnnnnnnnnnnnnnnnnnnttcctatcagtcagtccaaaggcaaaccaagctcacagattccgcagacggtgtttacatcctgaacgtcccattgtaaccagggatccaattagtcgaaccaacaagtctctcattttgaagtctgtttcgagtttggatctcgttactcatcaacccattccagtgaccattaggcaaggccatatttctagtcagtaagttattgccttgag

SEQ ID NO: 32164 - DNA, 542 bp, Arabidopsis thaliana landsberg
  unsure (1)..(542): unsure at all n locations
gaactttctgaatattaaaaagtatgctaaattttgtttatttggatatttatttgagatatacagtatgtgaagatgtgttaagatatgttaagtgtattttgacttttttagttaaataacactaaattttaataaatgttcaaatctacaaattgaataacaaatcaattgaaaattttcaaaaaaacaaatcaattgaaatcataaatctaattaacaaacttccaaaactaatcaagttgacaataactttacgaaaatcaaagaaccaatataaccccgattcttttcatagtttcataacggcttgaaaatggaagttgaattttttaaatgaaaaaatagaatttttgatgattactcacttggtataagtttcataagttttagggattaaattaaaattaaaaattgtataatatcacagtaattnttcatcaacatattcaaagtcacatatgtgatcagatcatttgtcttacttcataagatattatgttatatataacttgnaatgttaagtttggtgaattttttaa

SEQ ID NO: 32165 - DNA, 846 bp, Arabidopsis thaliana landsberg
gatgttaagactattgatagaagacattgctgcattgaaacctactgttttctgcgctgttcctcgcgtgctagagagaatatacaccggtaaatactttgcaagacaagtaaatgttttgaaatatattgaagttatttcttcttaactattatgatctgtttatgtcaatttttaggtcttcagcagaaactttctgatggtggttttgtaaagaagaaattattcaactttgcgttcaaaatagaagtgtatcaattttagatattaaaaaaacagagttttatctgtttctgaaacctttcgatatctgaactgtaaacataaaaacacgagaaagggcagtctcatgaacaagcatctccaatagctgacaaaattgtatttaaaaaggtgaaatagtaaaaaaaaaaaactacaccatcttgatccttaaccttgtgactgttggaacacaaccaaatcttgaaagattaaacaaaattgtatcaggtaaaagaagggttgggaggaaacgtgcgtcttatcctctcaggagcagctcctcttgcagctcacatcgaatctttccttcgagttgtcgcgtgtgctcatgttttgcaaggatacggtctaacagagagttgtggtgggacttttgtgtccattccaaacgagctttcaatgcttggaacggttggtccaccggttccaaacgttgacataaggctagagtcagttccagagatgggttatgacgctcttgcaagcaatccacgtggagagatttgcatcaagggaaagactttgttctctggatactacaaacgtgaagatctcactcaagaagtcttcattgatggatgg

SEQ ID NO: 32166 - DNA, 660 bp, Arabidopsis thaliana landsberg
aaaataaatacaaatatctgaaagaaaaaatatattgtttgccgcccatcgacattgttaattattcatcattaattgggagtacaatttaatgagtagtcatcatttgtatattcatcacattcttttgcaacttttaaataagtatatggggttaaaaataagagtagcaactaattagtagttggaaatgggatagtttacgaatcaaagtatttgtactcttaagatcgtaatgttattttttatttgattctctaagatcaaaattcacctgtcaaatatttgtaacagatgtagaaattaaatacaaaaagatcttagaaaaatgcgatatgggtaatgtgtatatttgtatatctatggtggacaagatacgataatggggattaatgaatttggtattattagaataaattaagttggggctgtcttggagaacatgatgttgtttcattttcaaaggtttgaatatttgcttgtctggacaccgtccttcgtttctcatgtttttcacttgcttctatgttgtactgttattactactataataatatacaagttatatttaggtttattattggtatcaattattaataatcagactaatcagtacctttttcttcgctgattagacccataataaaaaaacatatgttg

SEQ ID NO: 32167 - DNA, 1284 bp, Arabidopsis thaliana landsberg
caagagatgaagaagacaactctgaactccgaagtgaactctcactatctaattggtctacttataagggaagacgaagacgaaaggtccaacatatcttgggcatgatcttaaattttgacactttccaagaaaatcttattaatggaattgttttctttaaaagtttatttagattccaatatgtagtgatcaatgaaacgaacatgtcacttcagttctcatgcataaagtctacatacagagttgcatttaaaaatcattactttcttttgtgtttctttttatttcaagagagatttaataaaccgtaatgttgatttttcgcatggggaagaagaaaggtcgggattttgagaacaaagcattcatagtagtggacacaagttgtcctattctagtttagtctatctgactctctcaaccaaaaactaataaagaatagagtaatttttttgtaataatcaaacaaaaggattgagtttataatttagagaaactattactttaataaatagcaagtattaagctttgtatcacgatgagatttaggtgtataaacaaatattagatcttgatcgtttataaatgctttcgtttaccttttcaaattctaataatgattccctttctaacttgcaagatatgtgtaatgcgtgcctacaatattgttttacatattttcttttcacactatttttcatcatactaatacccattttaactacaaccttcatctatatgaataacataatttttgaaactctcatgtatctttaactagaaagttttccactcgatgcgtatattatatatttggtttacttttaaatatagaatgacatttatattaaattatatataaaataattaaaaatattaattttgatgtttataaattataatgtgttttaaaaagacactttagttgattaaaagttttcactgtactaaattctattttcattttttatgaaaatggtatgttttacaataaaaacaaacaagcttaaaatattcagtattactattttttggtgaaaatggaaatgaatttattaccaattatcttgaaattggaaacaatagctgaacttacttcacattcaaaaatttaaagcctatgatttaaactgattttcaataaaaaaaccctacaacttgacaaaagatttccgaatgtcggttcaaataaaaaataaatcatataaactttaataaatctactgaaagacgtcatgtcactacccaattactaaataatcaacaatatattatataaat

SEQ ID NO: 32168 - DNA, 1860 bp, Arabidopsis thaliana landsberg
gtagtgcacatccatgatggctgctccataaagcattgttgccatgagaatatcgtgaccctgaagaatagatcaagaatacattcaacaagaatgaagtagagataagaaaagcaaaagatgtaaacatcaatgaatacttctccatcaaccctcactctttaagcccttcacccaattaaatgagagacccaaaatcatgcaggtggagcacaacaacatcgataatacacaataaacgaacagctcattgacacatgaaatggttatacacttatactatcaaatgaaaatggtaattaatgaagaataaagataacggtaaaactcatcataccgggcaatcaacgaatgagacatgcctcaatagtttcatcttggagttttcaaatccggggacatcacaattgggagtgtcttcctttccacttccgtaggccctaatacaacagataagttgttagaccttgactcaaaccttatagtagaagtagaagataaaaacactgttgtaagaaggactcacttgtagcacattggtctagggcatttctcatcctcacatttgtaaatcttggcgtttgcatatccaagcttaatggtaatgttacgctccaattcatttttaaaacggacagtctgtacaccagagatagctttcactatagtcgatttaccgtgagcgacatgaccaatggttcctgagatatatttagcacagtattggtttctttgacatcaagttatactatagacctagaggagctggcaaaagcagagtgtaatttaccgatatttatggttgcttggcgagaaatgacttcaggaaacagaggatgtaactttgttacatcaagcttagttagatcttgctccgccaaacccttgttacgcgaaattaacacagattgaagcttctgctcctgcttaaaaccgagaatcaaatcagaaccctaaccctagttaatctgaaaaagactacttctcaggtttttctacatctgccctaatcaagtcgacacacagattctatacctgagctccgttacctaaatatcacaataatttcgtcgcaatctaaaaaaacattatgattacgattagattccccgaactaatcttcgtgcgatagaaatgggaacaattaggttgaacaaatattgaatccgtaggagatgtaattcgagatcgaaacgaacctgagcgatgcgaaagaacaacggagaaggtcaaatttgagagataaaaaagagtgagaaagcggcgcagcttgaagaagatgcacaaaatggtttttttttttctatccaagtccctaaagggtttttggtttccttcgcgtaaccttttttttttttccctttctaaaatttcttacaaaataatgaaatactagtatttaattaaattactatcagtagagactaatttactttttctatgaatcaaagtatcaaacccaaaacatttcatcatattaattttatgtgcagggccggcccgactaaatttaatgcctaaaagcaaaaaacaatttggcccaacataaaacacagttaaacaaaaaaaaccataaaacttttagaatttgaacttgagacagacacctcaagggaaaggcctatttgcgatcgactataagcgcccgagttcctctatctttctcgggattgtcaatttttcttttcgaaccagtcatgaattcgttttttttttgaagggattgaaggctttgaatattggctgtcgaaggcagatacgttggttttaaaccaatatcaccaggtgtaacggaagttgatcgagtcccaaatttttataaaaaaaatactgaaaagagttggggctagtttttaacaa

SEQ ID NO: 32169 - DNA, 570 bp, Arabidopsis thaliana landsberg
tcgtctgaaattatcattatatgcataatcagtaaccacaaagaagttaatggttgttgtgacgttaaaattatcggagaggttaaatgcattcgggacatacacgtggctttgtttctcatactcatgacgtacttcatgcacatttaccatgacttccaactcatgatcaagccaacgctgcaatgacttctcatttgtctaaaagagtaggtattgaattagatttcttaggaaccacaatgatacaaactacacaagataaagaaaaatgggactgtgttcaatcaatacctgaccatttgttccaaagccatttgtaccagctgcatcaatagtgttttaacttagaatctcaaaagcttaaaaaataaaagtcctattccttgaaatacgggataactcttgcagggcacaagatattcagctacaaactactttacgtgcaatttccagtagactatgaaaatgaatcacaacaatcagctaaacactcagtgacatgattccattaaaagatttgtattcatacctgagtgttcacgaggagatgatttcgagcttctacac

SEQ ID NO: 32170 - DNA, 553 bp, Arabidopsis thaliana landsberg
aattttgaacatcaggttaaatttatttattttacaaaatcatctactttaattttcacagaaatttgatttgattattttatatttttttatttttggtaagtttggaattagaataaaatattagttttatgttgatagtcttaaaataataatattattgatcattgcatatggagtgtggtgattattcaaattgaaacattccgatgaagctaatcttgagtatgtgtctattatcggataatgtaaccaaaccatatggatggtaatagtttttgcttgcgaaaatccagcattcatgagttgttttattagaacttaactatttatttatatcaaacaatcaacaattatacacctttggaggaacaaagcattcattataaaatcctaaatcaacacaaacatcttaagcaatattacacttagtaataattatatcaagattaaaaacaaatcaagttttttgaatcttctggagtcaaaataacagttaggttgagatggtttgataagtagatcttcatggtgatagtggatgcagcacccc

SEQ ID NO: 32171 - DNA, 720 bp, Arabidopsis thaliana landsberg
ttcattaaaaatataaccgcttatggaaagaaaaaagaataacaacccgaataaatttgtgtaacgaacaaaaacacgatttgtttttaatggattgtcccatacatcgcttttatggtggtaagtggtgaccggtgacaatgtaaacgagtgattttgttgtttaaaaaaatatttttaagttttcttagccttaattttccatattttttaatatttctataaaatgagtatatcttgaaaaagaaagaatttttttttaacgtatttgacgtaattatcaaaaacaaagattctcatgtgctttggttttggtctaaatgatgacatcaagtttgttaatactaaattttatttattaattttcaaatctgaaaaattcatcctaaccaaacttgattatgtttttattcaatatgtatagttcttaaacctaaggattcaacatgacagaaagattccaactgatatcatacttataatttaaactgctacaatttgtttgaatggataaccatgtttaaagaaggtttaaaagcaaaatggacgtaccacaaataatttacaattcacgcatttgaagagaacaattttttttaaataaagtaagaatagaaaataaattggataacttgcgcctctatttgatactaatttatataatttgtttcaattattctcttgactttttttagagaatttgagctttttcattttttg

SEQ ID NO: 32172 - DNA, 825 bp, Arabidopsis thaliana landsberg
actttcatacaccgttaggtaaacaagaacaaccgctagctaaatgatcccatgttctactgttgatgctacaacctttagttagatgatgagcttttttttctgggggattttcacttctgtatttgaatatcgctttggcagaatttccacaatccatcttcttgcttcttcagaatatatcggatcttgtaagtgctacaagaaatttacaaaggctgcatcagtgaagaagataccagctcagtccaaaagtaacccgaaagcgaaatgtttttttttacctataatattttgcgtttttgggctgagattcatcaactaattctgctgcttcctccagaagagcttcgatttctgcagcctcaccagcaataccatcttcgaatatatgtgcttgcaaaacctcaagatgaagcagaacgaacctccaataacaggatttcgcctctgctgtttgtgccaatgtttgccactgcattaaacaaagaaatattgactctacctaaacattgatgttcaactgtagtaaactaacataattaagtaaaggaataataggagatgtatagaaacagtaacctggacaagcatggattcatcaaggacttcggaaaggctataaacttgatgtgttggtccaagagcttcagccttaacattttcccactgtctcacaagctcttccgcttcttctgtatccattggtctcttatgcagttctgacgcagaatgagacaatgatgtagctgattgaccagagcttttcagatacagggcatccggatgttcgccacaatgcatctttaacatgtcaatgagcac

SEQ ID NO: 32173 - DNA, 533 bp, Arabidopsis thaliana landsberg
gctataacgatcctcttcgacgaggaaggtgatcctcgtctatctacttttggtcttatgaagaacagtagagatggcaaaagctatagcacaaacttagcttatactccacctgagtttttacggacaggtaaaattcttgatcttgtgaatcgtagtcgaagacaaaccaattcattattgaagattaaagttctctggtttttcttttgcaggtagagtcattcctgaaagtgtgatattcagttatggaactattcttttagatcttttaagcggcaaacacattccacctagccatgtatgtgcttccaatgttctaatttccttcattttatcttacttttttgtcaattgccgaggattttatttgtggtcttcttatctgcattggtggtgatgtttcatatcaggcccttgatatcataagagggaaaaatgctttgcttcttatggattcatctcttgaagggcaatatgcgaatgatgatgcgactaaattagttgatcttgcttcaaatgccttcatcaga

SEQ ID NO: 32174 - DNA, 1945 bp, Arabidopsis thaliana landsberg
  unsure (1)..(1945): unsure at all n locations
tacacaacaaactatttttttcgattatttattggactaaaaacctcttgactattaaaagaaacttatcctacttctgtagatacgttttcattatcataatgctcaccaaaatagggagaggaatacacgaaaaagaaaacgttgtgtgaccatattacttaaccgagacattgaccatctttttttcccctcttttatcgtacttttaatgctattattctacttgtattttagatttatcaatgaaaatgttgtttatgactatcgaaaaaaacttaattcatctacaacttaatcaatcaaactaaaactactccgttttagcccaagcaaaatggtgcagtggtaattggaccatgacctaggagaaagggataacatgactatagtgtgtctgagttcgatttccactacaaactaagccattttgtttggacaacttgaagcttctcgatttgagtctcaaataattaacttgtgggtaggtttgcagaaaactcctgcccaagatgttatttacgttcaggagtagacgagtagtgggccttagctcctactcttcctcaacctaatatcctttactaatctaaataaaaaaggaaaaaaaaactagtccgggtttggtatgattttcattattggagctgagccattccacgataattaatgtaaaacaaatgtcacaatatatgtacgaaactaagaatgcatgattgtgagataaaaggaataaacaaaactaccaaaaatgtaagaaacgtaatcacatggaggaagaaggagagggaggtacagagtacgtcgtaggggacccctattctatcttcgtagtgttcgacagagtcattgtcctcaatatgagttttattaagtgcttgtgagagttgtgacactatcttgtattgagcaaatcaagtttcaacattttacatgaattgttgctctcaatgttttataactttgacttttgttgcttcatatgtatgtacaacctttgacatctcaagttttcccaaagacacagttcagatacaggaaaatgatgtacttgtggtctagtggagttgagaattagatcattattcttttgcatgtggaggttgtgctgtaaaaggcagaattgattttttcttttgtttcctaaaatatatttgtttgatatttacgaatttccattgtttttttgggtacattggttattatatatcactaaattacgttggttgattaaataaaatcggcaaaataattgaatttgtactactttacttcatgcatcctctgctacaatgtctctgaccagtgaccattgacatttcctttcaacagtttattggtcagttatcacaaatcttctcgcactaatttactgatagtaggattttatgagtgagtacaattgataaacatataatttagatttgatgtttgcatttttttgaaagaaatgctaaatgaaacagtttataaatttaaaataaaaataaaaataaacattacgtaaagttattattaaatttgttcatctatttgcattttgtttcctaattcactcagggtttgaatgattgcgacggttggggcggacaaaaccgtcaacggaccagaccacttttatttaccattcatcaattatactccgtagtggtctgaaccaaaaaaaatagaagaaaacgtaaccgcatcggaccatctgcggactgtttttatatacaaataaatttggtccgcatcagtttattgtccacccaaaaatgagatggactaaaccgcagacaaattagacctctttgtctgctgcctccattcatagccnnnnnnnnnnnnnnnnnnnnnnnnnnatcaaaatctcatgatgctttagtaaatacttagccatacgccaaagtttttttcactgttaaagctatgaaaaactaggaaatcttcaacccgtgacaca

SEQ ID NO: 32175 - DNA, 202 bp, Arabidopsis thaliana landsberg
agaacccgtatccattcagcgactggtagtggatcttcagctttaacatggattggtggacgggtttccgagaaatccaaataagtagtttcgcgggggccttgctgataaccccttcctgcctgctgctggaattgctgttgacccgccatttccctaagaaagcgggtattgtctgcggtggcatttaccaaggcggcaa

SEQ ID NO: 32176 - DNA, 2679 bp, Arabidopsis thaliana landsberg
ctagaagtagataaatgatccttcttatcatttaagaaaaaaagaatatgataactaaaattatgggattattaggcaatggggcacttttttgagtttcaattatgtaatgtagcacttggaagggagtagacattttttaagttttttttaccataaacccctcagatttcaactaaccatagttactttcctttggtttacaattaaaatattaattttcttccttctcttctccttcttccttcttccttcttcctctctcccaaatgacgtgacatttctctcaaatctcaattacatttctcttcttcttcttcctctctcccaacactaactccatgtttataacgaaaaaagtgtggatggatgagatcatcgcaagaagagcttgtctccatttatggcccacaaaattggaaccccatagctgaaaaacttcaagaaagatctggtaataaaaaatcaaattttatagatcttcaaagttttttaaaaaaaacaatttgtttgattcaacttgctaagtcaaaattgttaagatccggtgataaaatcaaatatatatatatatatatatatatattttaacttttctttgtttaatttgacttaatcttgatggataaggtaaagattataatttgtttttgtgatagttgatggagaggtgaaatgtgagaggtggaagagagatgatgatgatggtagtaataacggttatggttttgatgaatcaaagaagaattggtggttaaataggttaatgggtcagaggaagaagattagcagagtgataggcggctagagtttcaaggaaaggatgatatgtatacaaattactattttgtcattcttatttgtatgcaaaccacgtggacagagtttagtggatgtgcatcgatggtcgataattcgaaatgattgaaatgaccacatggtcagagtttggtggatgtgtgttgatggtctataattcaaaatgattgcgttttgataatacgatccataaaacaggtgttacgttatgaaaaagatgttgataacatatggtgaaacaagttctgttggtcatatccacaaaagtttatttacgaaaatgttaatatttatttatccacgattacatattaacaaataataaatacgagtgtatgttgtatgattgtttatgaacacatcgatctcaataatattttacgttttaagattaagaagaatgctttagattatcatggaccaaaaatagtagttatacattatgtacatataaaacttagaatttagggtttaagttttaaagtctagagtttaggatttaatatgtagtttttacattttaggacttacaggagccccaatggtaaaacacatattcagtcccttatttctattattttaatcatttaaatattatttcatttatttatttttttaatgacaaacagaataaccaattatattttaccacatcttatttgaattttgaaagaaggccttcttctgaggaacctaattctgtattttctcttctctctcttactttttcaattaatgagttgaacaccattaccaagattctctctctctcaaggctgcgttgaattgggcgatggctttttttctttggttggttacgattttgacttcttctcggaaccgtttcgtgcgtttggtaaagacttgggttgttgtttttgcaagttgcccgtttttttgttttttgcacaaccactgctcactgggatcagataggaccttttgtataactgtctgaacggcatctacacatttcttttgcacctccaatggacataggtcagaaaccagaaacactacacaggattgttattctacaatacccttatgtagtcagcatcactgctacagtttcagaataggaatggcgatcgatcctaattgcaaatgacaaaaccgcataccaaatcacatgagattgatcatgtaagtggagagattggagtttttgtgtaaggatttcagacaaaaacaaacttgaacattatagtaaaaaagataaaagataaaaccaatagacttagatcaaattctcaacaataaaacaaaagccttttcagttgctcattcagacttatctcatatcttaaacagaacgtactatacatgtaagagtacaaaaatgttcatctccatctgccatcttcaatacataaggctgtgcacaacgattagtacatgaaaagcaaaactgccgactgttaccatcattgcgagcaatttcaacatcacgcccagaaggtagtttgaagatgtggcggggcttcatgtagatatcttcccccagtaaacagttgacatggagagtgaacctacaactgtcacatgtataaaaccactctgttgcatctaattttgattcacatttttcacaccaatactggccacttgttgtatcttcttccccgtagcaaagagtgagtggatgcctatcgtgtctgtagtgtgcctcataaggcaaactagcacatgtaatacccaaaaaggtaatgcacttaatacattccaagaaataggatatatagttatcataaccacaccccatgcaatcacctttggtcaagttgaagaagagatcatgtggatgacaaccatgacttaaaggatctggaagcgaagcgcaccttacatctagctcaa

SEQ ID NO: 32177 - DNA, 358 bp, Arabidopsis thaliana landsberg
aacgattactcaaccaatgtggaaaaaaaaaacctagttcatataaacgttaatagaaaaaaatacaataatggatcaccaagtgaacataaactacaaattgcgaacgttcatgttttatttccagctctgttacaatagataaaatactattataccataatttacaagttcacacacatacacacacacatatatatatatatagtaatgcatcacaagaagtcatgtttggcatattgttagataaactatattctaagttaacgaaaaaaaaaactatgatgttttttataagtattcaaaaccatttaattatatttttgaatatcgcagctctagttaacctcatttgtga

SEQ ID NO: 32178 - DNA, 758 bp, Arabidopsis thaliana landsberg
  unsure (1)..(758): unsure at all n locations
gtttctgtgttgcagaaccggttgaaggttctcacacataaacacattatactactggatacactgagacagttagaggtatgttttagttcttctctatgcacacattttgatatgaacctctttatctcgaacttttacaattctctggatgtgggttatatgtttcttgcagccatagactctagtttaatctcactgcgatttcacattgaacatattccactaccaccctctcctgtctatcgtctgctttatttggtttacagtttttcagcttcacagtagaatatttgattcgttttttttttaattatttgcagactgagaaaatagagctggaagctaccgtcgttgatgaaacaaaggagcnnnnnnnnnnnnnnnnnnnnnnnnnnnnnnnnagtggtgagttacattacattgcttgcaactgcatgtttgtgcgtcctttatgtgtatattagctcactaactttaattatatatggaacgattggaggtctgagtgattgtaattttttccttactcagttgagacagttttaacattatttgtcttctacagatttctattcagcgatgtcagaggtatctgcaatctatttctatgcacataatgaaagtcaagatggagcacaatttgaatctggggaagatgatgtaccttactttgaaacaaatgatttcctatcatcccaagcaatgaatagtgcttcttaccttatcatataatcttaaggaaatgtatctatcta

SEQ ID NO: 32179 - DNA, 4277 bp, Arabidopsis thaliana landsberg
  unsure (1)..(4277): unsure at all n locations
taagatcattatttaagttctaagtattatccaatgcattacttatttgagtttggataataagtttttacttgcttgtagaccacaaacgacgatttgaccaccttcatggacttcaccatttaccaacacaacatcaatcgttgtaccatagccttccataactttgacctctaggacagtacactgcttaacagtttcaagaaaggatcagaatccaacatgctgaagtattgtacaaacaagtgttacctaaaagagaaaaggagcaagacctgcactttgtcaacatatgtaattagtttctcaaccattgttttctgagtcaattgaaccaacaacaacaatagatctgggatcccttccccactgaaatatcaagaaccaaaattactcaaccatttaggataaattacaaacaataaacaaagagagactcatatacctaatagcacaagtaggaacaatactaaaagtttctcccatttttttattcttgtaataaagctcactgttgagtccttgctccttaaactggtttataatctggaataccaatgaaacaacatatacatgtacacaattgatagctcaaacccatagatgatgataaactctagacctataacttacttttttcagcctcaagttacattcatttataacatctttattttgctgcttcattgccttcacgataggagcattcttgcatgttttccatccatatagcctatccacctggaggaagtgaagatattattttccatataagttttgcaacagagaaaaaaatcccatcgtagcagaataacaagcagtcttaccttattcaatgcaataatgaactctgtattcctcatcctcaaaagatttagagattctatggtttgtggctctaacccatgctttatgtcaaccaccaaaattgcaaggtcgcacaaacttgaacctcttgaccgcagattagtaaaggactcatggccaggtgtatcgataaccaatagacctggcaccttaagttttgcatccgctttcagttccctggtcctctctcggatgtttttggcagggaaatatgttgcaccaatctgctgagttatacctccagcctcaccttcctgtacatttgttcctctgatgcaatccaacagctttgttttaccactatcgacatgacccatgatacagcaaataatagaacggagattttctccaccttcttttataaattcacttggagctaagcatttacccttcttagcacgttttgtctgtgtagcagcatcttctacttcagaaatagctttcaccgcacctgtttctagcttgctcatacctgctggtttagctgttggcttttcagtttcatggtctgtaaaagttcaaaaaattagattaaaatcagacattaaacactaggaagaagagcaaagaactacatatcatactaacctgaataatgtgcctttgatatagcatcctttaaatctttcttaaccacaggctgagcttcttcctcctcgtcatcaaaatcacctttaaggttaagatcgaccgtaccccagcttttcgcatcccattcatcttcttcgtcatcttcctcaaccccattttcctgagctacatcagcaggtcctgaattttcgtctgtgtttactaactctattaaatcaacctttccagtgtctgctgaaccaacttcacctaaagtatcttgttcatctgcttgattctcttttggctctacctcaccttccacctggacagaagtgtcattgcctttctggcgagatgattttttcttgttggcataaatggggcgctttgaggaagtagcatcaccatcattatctgcaacaggaagacctccaccagcagcaagtaactggttcttaaaagcctccctcttttgagcttcagtcttttgctttgctgttagaagcttgccctctagcttcttcctcaacagtttctccttttccttttcctttctcttacgcttagcctcctcagcttgagcctcaagctcttcctgcctgcggcgctcctcttcctccttcctcaatttttcttcttcttccttcttttttcgctcttcagcttcttgccgacgagcaagagcctcttgcatctctctaacatgtttaggaattttcttctctgctgctttaccctttgcatccttcttcttcggctgtagtggctcagttactgattcttcttgtttttcctccttaacctctacagaagaggttgctgcagcagcagctgctgcttttttctccttctctttctccttcttctttttctttttcttcgcagcagcagtctcttcttctccttccttctcaccagcattctccacaggtgcaactggctcaggctgagctgctttctcttctacaggcgtagatgaagcaggtctttcagcagcaggggtttctccaagtgctgcaagaagtttgtccaaatcttcctcttcctgtactgtccttccactcttgttattcttcttctttttcttactctttccagtttccacaacctccacattcttagtatcagaagttttagtttcgtctgcaactgagtcatcacctactgaggcaaaaacactgccgcccttctttttagaagatttcttcttacctgaaaacgttacttcagggctctcttcatcttcaattgtattttcgtcgtctctagagtttgaagcatcagtcccttcttcttcatcgagcaaatcagcggtaaacgagttagtgttcttcttcgaagacttagatgacttctttttcttaccagagaaggtgataggagactcttcttcctcatcttcgtgcacttcctctgtatcatcatcatcactaccaagtgcatcaaaagctgaagcggcaaatgaattaccgccttttttacccttcttagacgcatgcttcttacccgtaaaacttataactggctcatcatctttgtcaccatcagattcattatcctccctgttatcttcatcagcaagcagggcaaagctaacagagccaccgtcttttttacctttcgacttcttattattccctacaaaagcattatccggaacaacctcttccttcaccgcaaacttatcagcaaaatcatcgtcgtcatcctgctgctgctgcgtacccttcttattccttttcttacccttcttcttcccagtgataacaaccttgttttcctcaactttaggctcctcaagacatattgagtattcatcatcatcaatttgaacagatttcttatcagatttagaaccaacgagagatgacgcagtggttgctcatcatctccacctcgagaactcggctccttccgacccatggataaatttcagagccggttccaaattctttccggctaatcaatcaatccaggtaaaaaaaaaaaaggtttttttgaggatcggcacanaggacacaggagatgagagaatcgaagaagcttaccttacgtgagtaatcaaagcgagccgtttgagagagagcataaactcttaattcatcactaatctaatcctttttttaatctaatttctcaactctaattccaatccattattagcccaattattaaagctcctctcccaagcccaatattcaaaacccaatttacatacattaatcattttcttctaacaagcccaaattcacaaaatcaaaagaaaaagaaaaaggaataatatatctgccccgttctcacctgaatggctgaatcaatcatagacagtcgaaaagtgtttctactaaaccacacaagcatgaatgttatgcctatctaacaaaagtcagctaaagaagcatgtgtccattgttgaggatggagagagatgagtcaagatcagagataagccaaaggttcatgttccatgatacctgagctggagtgagatcatacttcactgacttgcccgaaactagaaaattttcaacgaccgccacgactctccgagagaaacccggtctcaagcaatctcccttgcacgcgagtggcaatcctaggtcttttcaagcaattacgttttcttttgttcctagagaaacgaatcgagaagctcatgccttaacaaagctctctcttaaaaacttccaaaaacaaaaaacattggatgcggatatgttttagaaaagtatttcaaacaaatcataacgcgagaagattatttttttaaatgaatactttaaacagctaaatcatgctgatttcccttattttagtccatattaataaaatttatg

SEQ ID NO: 32180 - DNA, 4726 bp, Arabidopsis thaliana landsberg
gctgcactctttccttcaccaatcaccatctcagtaaaccaccttttacttctattaaccgtctaaagattctaactttgaattaaaactcatatcttaaatgctcttgtttattgtgtttatgcaggattcctcgaaccattggggtctccataccgatgaaagctacattctttatcacatacataatggttgacggatgggctgggattgcaggtgagattctccggttaaagcccctcgtgattttccacttgaagaacatgtttattgtgaagactgaagaagatagagtgagagcaatggaccctggttttgtcgatttcaaggagactatcccatctctccagctctacttcctcttgggaattgtctacactgctgttactcccattcttcttcctttcattctcatattctttgcctttgcttacttggtctatcgccatcaggttcggtttcatacccaatcacccgtcgtatctaattctccgctaaattttgggttttcttgatggtgctttcttggtttacaatgcagataatcaatgtttacaaccaacaatacgagagttgtggagcgttttggccgcacgttcatggccggataatcgcaagcttgttgatatctcagcttctgctaatgggacttttggcttctaaaaaggcagctgactcaactccattgcttatcatcttacccattctcacactttctttccacaagtattgcaaacaccgcttcgaacctgcctttcgacaataccctcttgaggtaaataaagaatcttttgggctctcttcctaaaaaaaaaaggtttaaagccttcttacaaagacccgtgtttttggtcttaacaggaagcaatggcgaaagacaagttagagaaggaaacagaaccggagttgaacatgaaagcagatcttgcagatgcttacttgcacccaattttccattcattcgagaaagaagtagaattatcatcatcatcatcatcagaaaaagagactcaccaagaagagacaccagaggtaagagtggacaaacatgaaacacagtcgtctagtcctgtgacagagctcggtacttcttcccatcaccatcatgtctacaattccacttccccttcttctcactacgcttcagcttatgagcagtcatcgtctcagtatgaatatcactacaatactcatcagtacgaggagcatgagtaccgttacaattgatctctagacagaagaaaaatatgtaatctcttatgagtgtcataactaaaggtttcttttggtctaggtttaggttatttgttagctgactttggtttcggttttaaaggttaggaaattggtgttagtgtcattcacttgtatgaaaatatattcgaagatttaatttattgtcatctttcaagcctattgtaattgtaaaatttggtttattggatatgataaaagttacgttagaaaatactctaataaaaaagatgtatcaaaaactatattaatattaaattaaagtagacaaaagacctttcttaacggaaaaacctaacccggaaaaagacaaaactggatcctcttgtcgatagaactttctctcttgtccatacaaatatcgtaatccaatttcaatcacaaacatcattaacgaagatggagaagactatgatgtgccgtctcttagaatcacatccacgtcgtcgtctccatacccatggctactcttttagccactcctatcttctctcctttagcttcttctccagcaaggaaccgtctttcttgctctaagatccgtttcggttccaaaaatgggaaaattctcaattctgatggtgcccagaagttgaatctctcaaaattccgtaaacccgatggccaaagatttctacaaatgggttcttctaaagagatgaactttgagagaaaactctcagtccaagctatggatggtgcaggaacaggaaacacatcaacgatctctcgtaacgtaagcttcacgatgttgtttatttaccattttattgtaacagctttttaaagttttgaatttttcgttcaggtaattgcgataagtcacttgttggtatcacttgggatcattcttgctgcagactatttcttgaagcaggcgtttgtagcagcgtctattaagttcccaagtgctttgtttgggatgttctgtattttctctgttcttatgatatttgattcggttgttcctgctgctgcaaatggtttgatgaatttcttcgagcctgcgtttctgtttatccaaagatggcttcctttgttctatgttccttctcttgttgttcttcctctttctgttagagatattccggctgcttcaggtgtcaaaatctgctacattgtaggtatgaacttgatcttcacttggttaatgatcttgtgttctctggtagcttttatgggttttttgtctaattgctctgttttgtttattatttaatgctgatctgatgtcaatgttgatttgaatgtttgtttgtatagccggtggatggttggcgtcactttgtgtagcagggtacacagctattgcagtgagaaaaatggtgaaaaccgaaatgacggaagccgagcctatggcaaaaccatcaccattttcaacacttgagctatggagttggagtggaatctttgttgtgtcgtttgttggtgctctgttttaccctaattcattggggacaagtgcaagaacttctctccctttccttctttcttcaactgtgctaggttacattgtaggttctgggtaatattcaaaaacccttctttgttctccatctttaagcctctctatctcgcggttattctcagtgtcttatctttctttcttccaggttgccatcttctattaagaaagttttccatccgataatctgctgcgcgctatctgcagtacttgctgctctagcttttgggtatgcttcaggatctggacttgatcctgttttaggtaaagttaccttcactatgaaagaaactatagagaaacccttttttgacctaaaacagaaagtaaaagcattttgttaactgctctttaatggtgacaggaaactaccttaccaaagtagcatcagatcctggtgctggtgacatcttaatgggttttcttggctctgtcattctctctttcgctttctccatgttcaaacaaagaaaggtaaaacaaacaacaaacttgttctgttttgctttagaaaactggtaacaatcgctttggtttgcctctgtcttcttcagctcgtgaagaggcacgcagctgagatcttcacatctgtgatagtttcaacggtattctcgctctactccactgctcttgttggacgtttagtcggtttagaaccttctttaacggtttcaatcctacctcgctgcatcacggttgcattggcccttagcattgtatcactctttgaaggtatatatgtttcttcttcttctcaacacattaaagaacatccctaacgaatttgttggacattttcagggaccaattcgtctcttacagcagctgtagtcgttgtgactggtctgattggagctaactttgtacaagttgttcttgacaaactgcgtttacgtgatccaattgctcggggaattgcaactgcttcaaggtgactccattacaaatgatctttcacattttgaatcaaaattatgcattaatgccattaggatcaaaagacatgaccattctattttttatggacagtgctcatggacttggaacagcagctttgtcggctaaggagccagaggctcttcccttttgtgcaatagcttatgctcttaccggaatcttcggatcgttactgtgttctgttcctgccgtccgacagagtttgctagcggtcgtcggctgaggattgatgatgtggcgaaacacgattgatggtctcaaagctggcgagttacttaaaatatgagagcagtttgctttggatgtcaaataagcttgtattaatgaaaaagatgatggaaaatgtttatttattttattttatatatgtaaatgttgtgagatttgtacaacatacataaattttatataggagtaggatgtcccagctttccaaaaatttgtcacaaaggtatattgtctccatttgaggaagatgagatttgtcgatgaaaacttcgtcctctagttgagtttgttacgttgactagacaataattgctcatatagtaatagcaggttgaagattcatttgatggagttaatgttgaaggccaaatgaggagaaacaatagattcagcaacatatcctggaaggccgttagccgtggacttggcgaaggcgctagcaattggctgagactgagacgctagttgttaatgaagaaagtttcacattggaagttggggttagtatcaagtagtatataaagagttagagctactctacttattgccaattgattttaggttggaatgtcatgttaagcccaaatctatcactggaagtacctcatagcaccaaggaatagcagcttcatacttgcaatcccatccaatagtgatctatgaagtatattaagaaatgttagagacaaatattctaaagcttccacggctctttatttgctttgaatgattattttaataatttgattattagaaccaaagtatgttaaaaatgtgtgtgtgtatgtcaatggataaatttaagattcttttgaatagtca

SEQ ID NO: 32181 - DNA, 633 bp, Arabidopsis thaliana landsberg
aatattcttttggatgtgtttgcttcacatgtttgtttttacaaactggtgtttctctttgttcggtctttgaattatttatttaatgtacctgattctaggcagctgagagcttcgcagaagagggaataagtgctgaggtatgaagatttttagatttctctcttgtaaacctgtttaaatctgatacgtgaactctgaacttttttctttgttaaaatgcttaggtaataaatcttcgatcaatccgtccgcttgaccgagccaccatcaatgcttcagtgaggaaaacgagtagattggtaacagttgaagaaggtttcccacaacatggagtctgtgcagaaatttggttaacttcaattccttaattcaatagagatcttattatcacctggattgtataatagttttaaaacacggattaaacttttttccgtaatggatcagtgcgtcggttgtagaagagagcttttcgtacttggatgcaccagtcgagaggattgcaggagctgatgttccaatgccgtatgcagctaacctagagagattggctcttcataaggtttgttttgtcccttctttgcatcgaaaacttggttcaattttgtctgttattaatgaatttgagat

SEQ ID NO: 32182 - DNA, 1151 bp, Arabidopsis thaliana landsberg
tattgtctaatcatatatacaacttcaattcagggccagggtatatttttttttcttatataaaaatgatcaaatgataatggtctttcaccaaagttttggtagtgaatcgtacaattaattaggtatatagctaaactatcatcgcgttataccataagcagaaacccaacttgtaattaagaacttaatttagaaaattcttaaaccaataagaaaacattttattaatttaataatagcttcatccgaattatcgattaaaagtacatctaaatctttacatcttcatcaaaattgctattgattcttttcaagtaacagtccaactaacattaagtaacgaaataatgctttcataaaaaatagctatataaggacaaactactataatttcatttgaataaccctataacgcctggttctctgctagtatatccaaacatttaaaataaacgtgtcaaaaagatacaaacattaaaatgcatattagatatatatatatattttgaaaaattctagtcaactatgctttcatgtaacgtatgtagtcactatatataatttcgtaattaatgttgtcatactcttgtgtgatattttagaaaatatccattaatatattgagtataatagccaacaaaaaaaaaacttgtttttatgatattataatgtttttgtaagaaaacaaaagtaacaatattcagatttgtcataaggtaataaatacactagaaataaatgtagaagaataaatataggtaaataaaaacaaagaaagatagtaatgagttatccaaaaaaaagtaatagaagaattatttttgaaaagtcattggatttttctagtaagtgtccttcgtgttgcatctcaattctccattgattcatcaccactaatcattttctcaccagaaaaaaaacaacacaacagagaaactcacactctttatattggtagttccgtttcattcgacaaacacacttctaactcttttaacccaaaacaaaatggagggaggaataatacatggaggagcagatgaatcagctttcaaagaatgtttctctctaacatggaagaaccttatgttcttcgcttgcttctctgccggaatcggtggtctctctttggttcgcacgggtaagtt

SEQ ID NO: 32183 - DNA, 577 bp, Arabidopsis thaliana landsberg
tttttgctgtacataggctgcgctaaacaccccaaatgcgcacaacgttatcaataaaaatgaaaaagtaagggcatgagatgattagtttagattatttacatgcactaattctcccactattcaaaacttatgagtatacatttaacatttactaggttctggattttatttgaatgtttgtatgacgtttacaaggaaaagttcgtatgacttggtataatatatggcattttaattctagataaaatcacatgctcacatgggtaataacaaatcatttattttgccaagtgactgaactatctgacaaaaacctaatattacaaaaacctcaaaatttatcccactatattatcttatttatagaggcattcccactttcttaattatgcatgcatcttcgacgcgcacccttgttaatgcaaatatctatctttaaaaaatacaccttgctattggtgtataaatacaatctaaaatcatcataacagtacactatcaatctactatcatatatcttacatttcatcatcatggaccacaaaatgtcaatgtatttgcttgagtcttacct

SEQ ID NO: 32184 - DNA, 1007 bp, Arabidopsis thaliana landsberg
aacttttgtttataattgcaggttggaatgggatacttgctcaaggacaaggacaatatgagagtgaagcaccaagttttgctcctacaaatcaatatatgtctaagtaaacatttgattttagttgacttccttatttgttaaaacattatttgtggaccattgtacaatgaaagtgtgctatattaaaatttgcaatgcaagtgtgagattgataatatttttcttttcgttttgtggtagctatcttatagaagaattacatctgtattcttttgaatagcaataaaaaggtatatttgtgttagaaaaatgaatttcgataattacagtgtaatattttctttcaaagttacgagtttaatttggactatatataaatgactagttaaacctattctaatcatcaaaaagataatggatcaaaagtcgaaaatatcttaagctttcagtttttcaaactattattatttatatgctttcatataaacaatcttagagggatcttccgagaaagttcaagtgttttgagaatccatattttgattttgactttctctagttttcgtctctgttttgcattgaagtttttttctgttgacaaaaaaagaaagtatcttccaagaaagaaagaaaaaacttacaaaaggatatattgtgaatggagtccatgaaaaaaagtctgttggcaaaactataaattatcctttctaaatagctgtttagaggaaacaccaggaaaagaagaaagaaacaaaacaatgtaatcttagaggcaagcaagccaagcaacctggcctagaaatgcatcaaccatcttgtttgatattcgaagagcatcttcagttttcccggcttttagatatgcatcaatcattgttgtgtatgtaaaaacatcaggaggcaccaatctgtctgaacacatttcttcaaaaaagtactctgcttcaaacaataccccttgcttgttaagcgttgtgataatggttctgtaacatgtaacatct

SEQ ID NO: 32185 - DNA, 554 bp, Arabidopsis thaliana landsberg
ttatcgagaaacaaatgcatcagacaagactgcaaaaccagagatttccataaccatttagttaaaatttaatcccgtaattttaaaaaatcgagattaaattttataatataattattatcaaattgatattaatcaaaaacatttattattatttctggttcacataaataaagtcctcaactctccgaggttcttaaacataaatcaaacaaaccaaagtacggaagcatgcttccttaatgtcaatagataaaaattcaaaaaccatagctaaatgggcaaacaaaacccactaggagcaatctcttgaaaaggtcattttttcaagagttgtgcacaaagaacttgtacatgcttcgaagttctctgtaacatttccgctttagcaaataccaccatcgcttgactttcttccatcccattcggcacgtaaagctctactctttgcaacgcatcttcagcaccgttcgctgatcgaatcaaatacctaatacattagctcgtttgaggaccacaaatgttcctaataccacgaccttagtgtcttctta

SEQ ID NO: 32186 - DNA, 412 bp, Arabidopsis thaliana landsberg
ttgaaaggggtcaggaaagagtcgaacgcaaaacgttgatcgtaagatggaaagaaatcaaaaaaaatacgatttttggagaaatcggctgaagaagcctttatttttaacagacggcaaaatctaatttttgtgtggggtctctcttttatccacgtaagcaagtaagtcactattaaattattaattagatatttaaacgggaaaaatgtcgtttaatcccccaactttcaaaaaatggccaataaatacgtcaattttgtaggaggccatttaaaacatcaacttatagttgactaacatttaaaacacgaactttgcgttgactaggcctaataagaccgacgttaaatcgattaacagatccattagacgacgtaaagaactgaaatcatctactgtgttagtggag

SEQ ID NO: 32187 - DNA, 1080 bp, Arabidopsis thaliana landsberg
aaagcaaaatagtatatataaatagttgacggaaatgttgacggcaatgttggtggatgtgaacggtaagaacacggcaccatgatacaagtacttgaaagcagagaaaggaggtttgctcattgatgctatcaaatggaacttcaccaaattcttgggtttttcctgatggcaaggtcttacagagatattctcccagaacctctcctcttcaattcgaggtacgtataccatcctggttttcacctaaaccggaatccatccatacacaaccatcttattacggtttgttttcggtttatgcagaaggacattcaaactgcgttgggacaggcctcttcttaatcaccagaagaagaagtttcaagaactttcgtttggtccaaattatgatcttagaatcatcaacattgcaaacttattttctttgaattctatcattcttgttttaaataattgatgtattcgatgtcttttcatgggatgatatatcatatattatcatgtgactctcgttcaaacaaacctcaaatcataaaaagttgagtaatacattctattgcgccattattagacatttgtatacgtaaaaagaacatgtgaatttgtttttgccctatcgtacacgacacgtttaagtgtgttcacaacttatgaccacaaaaagtttctgattctttcctagccacgggacaaaaagataagaatcacatgtaaaagaacataaaagaagggtcatgtgctttctttgttgacatcttgtgattgaagcaaaacctcatcatataagcctaattaccaatgatacaaaaacaagatgaagatcatgaaagaacagaagatatcaaaacatgaacagttagatcaattacctcaaccaaaaacagaggtcttcaaaaaaacagttggagattgatttctgtgtctaaatctcatcactgcatatgagaggacaagaaccctaattcagatgtcatatgttaagcaaccacattgcactcaatcacaacagtcaggagaactggagacaaagaatttgaaggttttttattcacttgacacaattaaaatcataaagac

SEQ ID NO: 32188 - DNA, 276 bp, Arabidopsis thaliana landsberg
ttgtgaaagatgttccactagaaatattcttgctatcgcttcgactcatataccccaaaccgtggaacccggatttataacccatggtatacgaaatacatgcaataaaacctcgaaggcttcattattccacaacaccggacgcactttttcactctttcctacactaagggatttgacttggaaaagaaaatgtgccatactaatggactcgaggcgataacctttaactccggcgcatgatatttccgagatgtcacgcgcggcgtcttttca

SEQ ID NO: 32189 - DNA, 473 bp, Arabidopsis thaliana landsberg
ccgcactgcacgaccccagacgactcgccgctcggagatgcccttcgaccgtttcggtgttcacgaagtcgctggacaacgtggtgaccataaatgctcgtacgtagcgcacatagagcatcgagttgaagatgccgaagatcacccaaatagcaaggaatccctcgaaccaggcgcctggatcttgcgtcagcggcgtgtaaccggtggccggcaggaccttccaggtgaagacgaggtagaggttgaagatgagcgccacggcgaagtagggcatcgaactgatgacctgagacacgccgacaacgacccggtccagaggtgaaccgcggctgcgaccgcacaccactccgagcagaagacctagtgggatgaagatgaccatgccgccgaagacgatggcgaaggtgaccggcagcacctgtttgacctgatcggacaccgactggctctggatgtaggaccagcccagg

SEQ ID NO: 32190 - DNA, 954 bp, Arabidopsis thaliana landsberg
gtttatcttgcaagagcaagaaaagctgcttcgtacaataatcttcttgcacgtcgtcgctgttgatttgttggtatttggtgatttactatatatttttgtctttttttgtgggttaaattctgtataattttctctgaatgtgatatattatgggttaatgagtttgtgtttttatttttctctctttagatcgtgacatgaatgtagtataattccgagacgttgtttacttgtataagttgtagccataaatccatgatatagcatattcacttacattatttgtgtgtgataattgtttataaactttaattatattatatttgtgttcaattatttaaatttggtggaaccaagtgtgaaagattctgtcattctgtgatctctagctagtttccaattccattccatgtgacagcaagctaagctatatctgcagataaatgcaaactatgtagcattgattagcttgttataggattttaaacaaggacacgagtttgtactgacatatgattttgttgtttttttaccatcttgaaaatgatgttctcttagcatgcctgaaaaatgatgttatcttagcatgcctagggacttgagctgtgtatatttagtgttttcatagagttttggaagtctctaaagaaatagatctttcattattgttgttagcataaggcaataaaaataacaaagttgttgagccaccatgcatgtctttgcagcaagtattttttttttttgatcaaacaccaagtattttatacgtttcagattaaatataaacaaaatttcttcttaattagatggagtatctatctttatttattgttaataaagacattgcctcgtcttgtttgggggtaagatagaccccactttcccatatttgtgatatcaaaatgacttccgtggaaaaccaatatcacattcgtaccaccaaactac

SEQ ID NO: 32191 - DNA, 527 bp, Arabidopsis thaliana landsberg
tcacctcatatgttccccttcactctgaattggtcttttactgcttgctctttccccttgtaaggaacacattaactcttctttcccaacacctactgtctttacaccaactacattaacttcttcatgtaaccaatacctagtaacttcacttcaacaactcttttgaacaaccatcgctcctaatattaaccaccacacaatttttaatttcatatccataatttaccagaacaagctctccttcattgtcaacactgaaacaaaaaacttcatatctctcttcacatgtcttcttacattccaatttctttgatgactgatatcgctttgagggttggacaatctggctttcgcaaactaggctcgttcatcgctgtaggaactacgctcggcaacattgtcttctctaatgcgttcttatctgaagttttattaggtgaggtccttgttgtaagctttatggccaatcctgggtccttgtatcggtctttcttccttaggtggctcgcggctgagaacaacac

SEQ ID NO: 32192 - DNA, 982 bp, Arabidopsis thaliana landsberg
aacaagggttttgtttttcaaaacgagaaaaccccacagtattgaattaaatttagctgaaacttatattagatatcgctattaaatttactacatttgggataaaatatcattttagtataatagtaggaaaagaaagtcaaatcattattaaaaaaaaaaactcagcaatttagatcgtaattaattgaagaagaaagaccccacattaacacgatctctcacgctccttcttcttggcaagtcgtgacttatccaaagagaacaaataaacatacaacaaacacctcaatttatattaaaatatttctacgattgtgacttatgaaaactaaacaattgcatttttctttttctattgtggggtaaataaattttacaataacgcataaagcgtttaaaaccattatcatatcaatgttataaaaaacttgtggataaattaatacaataaccttcatacttggaagagtcacaacaaacactagaggcgttgacggttctaaatgtatttaaattggttgcaattctgacacaacttcctcctttttgtatgaatgaatcttgttttctttcttttttttgttgtcataaggagaatgaatcttgttttcttatttcttgtcttttagtaaaaaaactattagtgtactgtaactcttgtatataaaatagacataagacagctcgcaaattgtagtaaagggacttcaataccggtcactcatcgttggtttatacaactaagcttggaagatctcgtctggtctcaactctgggctgctctgctgctcagagtccaatactctggttcaactcatttccaactatctgggttaatgggcctacttaattcatgagcaacaaaacaatgggcgtggccttgtatgagatccaaagcccaacttgaacaatatctagaagatacacagacaaaaagagtcactcactaattggctttcgttattggctagtcaatgaa

SEQ ID NO: 32193 - DNA, 1716 bp, Arabidopsis thaliana landsberg
aaatccaatcctcagggctcggtttcaatttttggattttatccgataaatccctaaatctcttgtttttgttcttgaagctcataatagtaaaagataatcacgtttaaatacataaatctaattatactaaatcaacagacacttttacaataaatacaacattctcctcttgacacctgttttaagtcctaattttgacattttcagaaatctaattaaattttactattcgaaagaaaaataattacaattaaaaaaaaaaactccttgcaactgcttcacctcccttcacacccacgatctcaatatcttcagtttgcttctcttcttcaacaatagaacatcaacatgatttcatacaaaaagcttccaaatcattttttctgattcctttttcttgcaacaatacaatactcttcgtgtctcaaagttcaaaaattggtggcctgagttttagttcttaagcgttgtaaatcaataatcatctttgtgtctaaatttctgtcacgattctcttataagtttacatgattatattgtttatgcaaataaaatcacatccacattcttcttctaagttttgatggaattttcttatgattctttttctcttcaggttgacaagttaagaaaaatcaaatagcaggttggtgacaatgaacctgtaagttttacttacatatcttttgtcattgagccaaaactctttgtaagacttgacctgcgattaaatccagtaaccaaaagacttgggattgtaatttttctaaaaatttctaaatattgttggtttatttataaatttggctaaagttttgttccgtacatagtacgggcttaatactagtatactaacaagtaacaagaggcgaaattcttttaacatgtatggtaaatagattaaatataaacaaaaacaaaaacaaccattagataaggcgggtgaatttataggcatatatcatcagtaatgcacgatataacatgttatactcaacagtagcatcaccagtcttcatatcgaacaacttggtccgtgcttcgacataacctctagcaaaccggaacattccactgcctccaaccaccggcatttccctaaccttggacatcaccgtgttccgaccaagaatcgttatggtactcccgttgtacttcccagtcttaaaagccaagttcatcgccatcaacaaccctatctccttttgggctgctccaacgtacatcccttgggcttgacccaccacagtcgagttaatgggcacatctaatgttaaagcgttgtctatcatggtgattgatccgaagtataaggaacttgagtattttgcaaccggcccttggatcctgatggaacttgggtttcgaccagttacaatgtcgtgccaatagacacggagatgtgtgagtttctcttttttgccgaggccgaggtgttttcggtttattgttcttgcgaagtcttcaccgttttttccggctaaggcggttgcggtgaggaggaggatttgtgcggtgaggatgagaatgagctttgacatgttagttttctggtgtcgtactttaattgttttatttgttggtgatagaatgatagtttatgtaaattgtgggtgtatatactgcaactgtgcaacgtgctatatatatcgagtaatagatgagatcacgagtgtgaaaattaaaaggggaaaaagataacgagtgtctaca

SEQ ID NO: 32194 - DNA, 1045 bp, Arabidopsis thaliana landsberg
actttctttttgcatacagtcactactaagttgtgtttccttatcaactatttgtaatttattcatagggaactcaatgataatcatctcacgggtcatataccaccagagcttgggaagcttactgacttgtttgatctgtaagtagttcttcctatgcttgacatgttttgatgctcttatgcttatatgaactatgtacatataggaatgtggccaacaatgatctggaaggacctatacctgatcatctgagctcttgcacaaatctaaacaggttgtatgtatctctttctctgaaaacttctcacttgaatgttcaagattggtgctttatatgattttgtgtctcattaatgtaatgtagaaatgttcatgggaacaagtttagtggcactataccccgagcatttcaaaagctagaaagtatgacttacctgtaagtatcgacgctgagaatctctctaatcttatataatatatagttccacagcgtttgttttttcgaatttcaagtcattaactactgagttattggttgcctttgatttatcggttcaaccagtaatctgtccagcaacaatatcaaaggtccaatcccggttgagctatctcgtatcggtaacttagatacattgtaagtgtttcttgttttctgtgaagtatacatcattatatgtgccttgtctcacatttattaaatttaatgacatttgaagggatctttccaacaacaagataaatggaatcattccttcttcccttggtgatttggagcatcttctcaagatgtgagcatccataagacctccagttttattgtttatttctagcaaaagatgaaaatggtttgtgaactcttgcattcttgttataggaacttgagtagaaatcatataaccggtgtagttccaggcgactttggaaatgtaagaagcatcatggaaatgtaagacaccttaacctctatctgcttggttagagtttttttaaattataacaattactgttctgaatttgtgtgtttgtggttgcagagggcttt

SEQ ID NO: 32195 - DNA, 1009 bp, Arabidopsis thaliana landsberg
  unsure (1)..(1009): unsure at all n locations
tcgaaccacgtgactaaattgtaatgccgtactgcttcaattttttccatttatgtataataaagaaagacccgcaagctacgttcggtaaaaaaatagacctatgtcacactatgtggaaaaccctaagtttaacgttcatgacgctatcaaaattcagagtttatcgtttaaatgatttgaccaaaactaaaaacagtacacgatcattaataaggcaatcctgttttcgaataaaatatgaaataagataggcccaccttgcctcacatctgatgctaaatttctagtcgttatataattgagatattattatctctctataaattgatggcttgactttgtattcggacagctttgaggttttgtcacgtgatccgacaagctacgagttctatatatacatacagagagcagtaagtttcttatactcaaaataatcatctctcataccactcatcaatattcaaacaatccctttctctatgggatccgagtcggagctcatgatatctcttatttctcaactgttatctatcttaggcggtggggaagacacacatacaccacagctgaagtcaaagttgatagcacttacttgtcaactaatctctctggtcaactctctggatttggattcgcagccggagccggagtcgaagctcaaatcactaattaagcagataatttatgtcagcaactctgtttcagaaccaggaccagagtcgcagtcggtatcagtggtgactaaaatgatctctatcatcggctctatagattttgatctcaaggagtcagagccggagctcatgtcactcacttctcaaatattcgctctcatcatggcaatggacgaggaatcggagctcttttcactcctttctgaggtggccagtctcgtccagacggaggaacagaagctcatcaataaccaacaagtgccgnctctcaccaccgaagaagaagaaaaagatgatcttatctacggctatacagatgatatgaattg

SEQ ID NO: 32196 - DNA, 500 bp, Arabidopsis thaliana landsberg
ctgatcatccaccctttcattttttaaactgttgaataagtatagtaaaacattgacccattacccgacactgccagctgcgcaagcgatgctgtacgggattggtttgacagaacacgatttacaaaaagcacaggtgggcatcgccagcacaggctacgatggcaacacctgtaacatgcacctcaataaactcgcacaggaagtaaaaacttccgtttggaacaatgaactggtcggcctcatcttcaacacgatcggtgttagcgatgggatgagtaacggaaccgaaggaatgcgctattcactcgtgagccgcgaaatcattgccgactctattgaagctgtatgtggcgcgcaatattatgatggactcattgcagttgtaggttgtgacaagaacatgcctggcgcattgatggccatgggaagactcaatcgtccatcgatcatggtatatggcggaacaatcgcatgtggtcacttcaaaggaagagaac

SEQ ID NO: 32197 - DNA, 625 bp, Arabidopsis thaliana landsberg
ctcggtattattatacagctgttttatcaaatgaataaaattgtaaaaaaaaaaccaaaaatatttggaccgagcaaaattgtaaaaaaaaagtgatgtaacagataatcaatttttatttatatttttgttctttcacgtgagacgtatgggatccgtataaccaccgctcttcgagtgtaccacttcgtatttgcttaactctctctgtttcattctcgtgcatttcaccgtttatattttcttactttttcttactgtaattaatgcaaactctttttatccaattaaccgaaactataagcctatatattaatatttgacatccctaatttatttttcataacaataatgataaatgagcgggtggaaattatgggtcattaacaacatacactctaattataatcctcgacaaacaaacaatattaactacttaattataagacgcattaaatgaggagtcatatgggtccagcgtctaggtaggggaaaacacatatggacttccattagcatcttaccagtctacgcaccttaaatctaccaacacgccttatacatctatgatcacttaattggccaaagagagcaaatccacaaactgaaagacataacacgctgt

SEQ ID NO: 32198 - DNA, 845 bp, Arabidopsis thaliana landsberg
  unsure (1)..(845): unsure at all n locations
agtatgtctctcaacatctttaagtagaatagttctaatttgtgcttgacttaagaagttaagcgagatacttgggatatgtgtatgcatgtcaccaacaagaacaagcatcgaccatttcccaagaatcccacctatacttctaggataactacattcaaagagccgtccttcgatttggaatatgaatctattaannnnnnnnnnnnnnnnnnnnnnnnnnnnnnnnnnnaacaagttcgatctatatatcttaccatacctgtgaaataaacaacattagtcaaatttcaaaaacagaggatttatttttttgagtttttggaagatgttgttgtttacttggagacatgttgttgcatgaagtcaccgagtgttgtggcggtgtacggtttaaaataaacgataggttccccaaaaaatggccaaaccggatttaaccggaggtaaaatgaaaatcgggttcttcaatttcttctctccaagagattcaagaagagaagaagagccaaaagcgatggaagaagaagaagaggtaagagagtatgatgctctgtttcgaacatggagctagtttctctctctctctcactcactttctctttctaatggctttgtctttaagattgggaatcggacttctactgaaaaagggagcttctgtttgtaagagggggttttaaagaagtcagaaaatataattgttatcatcgtcattaaaatttaataaaatcttcttattaagcttaaacctaaccaatgagcttcatggcctttgtttctccgtattcattacttttgaaacctaattatgctccttttaatacttttatttattaaactct

SEQ ID NO: 32199 - DNA, 952 bp, Arabidopsis thaliana landsberg
ttcctctctaatctaccaattaagtgatgagagtatgttagataaatatacacactaaaacgacaatactattcccatatgcttcttcagttctagttgcttgagtatttagaatcgaactatttacaagatatttaaaggtttcagaatttatagcggaagaaaggataacaactaaactgagaaaattcaaatatgagtcgtggacgtaaacgaactatgtatttaaaagaattgagagccagaaaccactaatttaaatatctcaattaaattgttagtaaaccctacacataaaaaagaaaaattcttttataagaacatctaaaattttaaaacctaaacgtaattttaataatatacctattacttccactgtaataggtattatagttgtgtgtttaatcgaaagaaaaagtttaatagttgtaacgaacgttttcgtttagtattatcccgaaaaggctatttagtccctccgacattaatttcgaaatattacattaaaaacaccaaactcggtatatgaaatgcagacgaaacaaacaatggatacaaaagagtaaaggtatgaaaactatagtccacctatctcaagtaatataaaaacaaaacaagggaaaaaaagaaacgacaaagtttatatcattttctctaattatataataatattctcaataaatcaattaatacgcaaaatatatatctgcacaaagtaaccttattatatctcccaaccgcacaaacaaaatttcagctcctccatatccatcaagaaagatcaagaatcaagaactaatcaatatcgatcgatccgttaaaaaaaaatggatatgattccccaattgatggaaggctcttcagcttacggaggtgtcacaaacctcaacatcacctcaaacaactcctcctccgtaaccggagccaccggaggtgaagccaacgcaaccac

SEQ ID NO: 32200 - DNA, 1149 bp, Arabidopsis thaliana landsberg
tcccgattctatctctgaaactgtcggagaatggagcttttccggtgaggttattgttctctagattgatttcacgagcagagtccagaaacccaaactcctccgggatttgtccgtcgagattgttgttgtcaagagctagaaagcagagatttttaagactcgaacccattgaagctgggatgtttccttcaagacccatccttgagaatccaatccccgaaataccctcgagattcttccaaatcgccggtatacgaccaccgagcttgttcccactcagatgaacctctctcaaactggacatctccgctagaaacagaggaacgccgaaattcccgaaacggttgtaactcaagtctaaaaatacgagctttttcaaatttccgacgccggaagggacctctccggtgaactcattgaagctgaggtctagcttgagaagctctgtcaagtctccgatggaatcaggggcgtttccgttgataaagttatggctaaagtctagaacttttagattcttcagacgagacgttgcgttcgccggaaacccaccggtcaagctgtttctggagagtgtaatctcctctagactcaccaaatcgccgatttgacccggaattgacccgtgaaacccgttaccggtaagaactaatcttctcagctttgtgaaattaccgatcatggctccgatctcgccgacgagagatgggttttcgatgaacaccaactcttcgagaacagagccgaaatcctccgggactgttaacggcaacgaggcacgagcgtcggtgaagcatttgtagaagaaaagcttacgaaggtgtttgaaagcagtaaagaggagaggatcaagcgtggcattagaagagcaaggagggttttgagtgtaatccgagaggtagcctaaatggaactccgtgacgtgaacagacgttgcgacgccgttttgagaagcgtagaggttatcgcaaacgacgccgtcaggtggtgaagcgcagatgtcgtcggggaagatggttcgccatgagatggctgagttgactgagtcgagaactcggtagaccgcttcttgctccgacgggtctagagcgagttgtggtgacgcattttcgtcgtcgtcgctttgttggctggtgatgagtgtag

SEQ ID NO: 32201 - DNA, 1056 bp, Arabidopsis thaliana landsberg
ctcgggcatagatttggtcgctgacgcatgagtacgagtgacatagattccgggaggcggcgcgagccctacctgtctcggtggtctattctggtatggctgcgtagtggcccgtcatcgttgttcggcgagtgaaacatgtgtaacgtggggccctataccctgaaccctacgggtagttgctgtccaagtccaactttaaggtgctctggggtcccaaactcggttgttgggaaacgtacgtgtgactggccgatggacgatgaagactttggctaaaacttacgggggccataaacacactttgcgttctcagtgggcaaatcatgggtggcggacgggaggcatgaacgcggacataaaaatggtcgctgggccatgaaaacgtgtgctatagctcacgggaggccaaaacagccttaccagactcaacggtcaaatcatgggtggcggacgggaggcacgaaatcgctgttcgacgacaaaaacatgtgtcacaggaggccttaaaacctaaatcctaaaccctatagctcgtgggaggcaaagaacaactttaaggtgctctagggaccaaaacgcaggtggtggtacacttacttaaaaatggtcgctcgaccatgaaaacgtgtgctatagcttacgtgaggccataaacagcctgtgcagtctcagtagccaaatcatgggtggtggacgggaggcatgaaatcgttgtttgacgatgaaaacatgtgtcacgggaggccaaaaatagccttaccggcctccggggaccaaaatgtgaactatggtttggacactaagattctactatgtcagcaaagtagatatggttgggagactcaaatttcattttaccatggtttcgacactaaaatcctttagtgtcgatgtttaggtttagggataggatttagggtctaggtttccataaaatcgtgtgctatagctcacgggtggcaaaaaaatgccataacggcctccccggtctaaaacgaaggtggcaggttggatacataaaattggctgtttggcacaaaaatgtgtgatata

SEQ ID NO: 32202 - DNA, 1056 bp, Arabidopsis thaliana landsberg
  unsure (1)..(1056): unsure at all n locations
gtgtgtaactttatagtttgtgtagaaggcacaactataagcctttagaaagtggagaagagctgcaaagagctagagcaaggtcttgagcgtatagttactctgccggggttctgccaagaagtttgtaagcagccgcggttctgttgtaaccccactcaatagtgaaaggctctatctgtcatactgacagatctgagcaaacggaggaaggagttgaaatagactccaagcccaggtgtggctaactccaacgaggactaggcaagcatttcaggcttggccgaacctcgggataaatccttgcgtctgtgtgctcagttccgtaatgtatcctgactctgtgacttactcgtctttatatctgcacttcaatacttatctgtggtataagctttatttgaagtgcaggacattttgagacaggatcttgtcttccgctgcaacctactcgaagagtcttctcactccactgcgtactaagtcttcaagtagagtaagaatttaagttttaaagtaataagttttattcgcctattcaccccctcccctctaggcgacatccagatcctgttcccgggtcaaagggaactttcaattggtatcggagctatgcctctccagtgtgggcttagccgtccggagataacgatgtcgtcacaagaggtaactgtagaacttcttttaggcgatggttctaattacaaatcttggtctgtctctatttacaaagctttcatgaatgttgattctgatttgagacagatctttagtagaagtatttttccctctgannnnnnnnnnnnnnnnnnnnnnnnnnnnnnnnnnnnnnnnnnnnnnnnnnnnnntgcttgcaacatcttagttgactctctttctagaagtgcttattttgccatcatgagtagtgatagtgatctatttgttgatgctcatgatttatggaataggattaaagaaaaatattttgtggcaaactgtgatgctcctctccctatattacttgtgacactaaccattcaaatggagaggacaagacgatggcactaacgatga

SEQ ID NO: 32203 - DNA, 623 bp, Arabidopsis thaliana landsberg
  unsure (1)..(623): unsure at all n locations
atgatcggttaaaggtgtggtctgatatccattgcagtgttcggctaaccggaagcgtcgcgaagacattggtggttctttacgtcaatggacaagtcaagacagagaatatgaatctgcctttgtgtttagatgagtacacagttgaagagcaaacaatacgtagatggagtccagaacttagccgtgaagatgaaaccagaacatgattaagcttacatgttaacaagtcttgttgtaatgctgatttctagaagaatataaaatgaactaggttccaattccaacataaataatatacacacaaaaaaatgtgttacataccaaaaacatacacaaaagttaccacaagccagtgaaaacataaatcaaaccgnnnnnnnnnnnnnnnnnnnnnnnnnnagtttgatcaaagatggaaatgactaggatgtgattttgtcatnctagcttaccagccggctcatcattatcaatcctcttgacattcctattagncgcataagccgatacgtagaagataacgagaatgataagtaccacgatgttgatcaccgatacttntcttcaactcttcttcaaacttccaagaacaccagctttacaagaactacacttgtaac

SEQ ID NO: 32204 - DNA, 1162 bp, Arabidopsis thaliana landsberg
caatctactatttgaaattttgaccgtctttttttgactacattgaccatacaaattagtattggggctgggttgtgtctgcttctagtttgaacggtcccggcggtaggggtggataaattttcagcggtttagtttactatatttttagaccggacaaaagaccattacggactaactctacttaaagttaaaagcggatagtggttggaccgcgacggtattttattttattttttttgtccgtatttctacggactataatttatgaatgttaaaacaaaaactgtttaatccacacacggatttgtccgcctgaactggtgcaactattcccactctatatatttataggattgaaatatgtgaagagctcaacacattgatatcaaacatatattttgttcatttactaaacactaggtatgctgttctagccttacctattaaatcgtatcccaaaacagaagtgatgtttttcgaaacattattgcgtttttaaaagataagtgaaatattgtgtccaattggtaacacaacaaagttgtaaactgtaatgataaattgttacgaaatagtataaaacggtaaaaaacctcgtacctctagaatgataattgtaattgttaattatcaaaacggtatacctcgtaccacaacagtacgtagttatcgttcaaaaccatttattttttgttataagtaaggaaaaaaatatcaacgtggtttagtctcacattcgatgtgattgatatacaaattttttttctttttccgagttctctttgatttttaaaaacgttgtatagctgattttccctaccgaataatcttgaggtaagctcttaccattagaaaattagtactgttaatctctcttatcgatggtgacaaaaaaattagcacgtgataggttggtttcatacttccatcgttgtctatcaccatgtattgttatctttaatttatttggaaacatattaaagattatggcgacataaatattgctcacggtgatggtattatttattttcttatagtatgtatgtgaagaagagaaatgattcattcaggtactctcaagtcccatttgagttgccctacaatgtgtacccacaagaactgaaaataacctcacatttgtttggtttgttgtattttc

SEQ ID NO: 32205 - DNA, 1272 bp, Arabidopsis thaliana landsberg
  unsure (1)..(1272): unsure at all n locations
tactattaatatctttattgacgtcagccagacaaagtcacaatgttttatgattttttgtttctattttggtacaaactattcatgtttttgttttggtccaataattatttttgatatcaaaatatcagaaaaagattaaatcaaacgactactctatgatctatatcaaagggctaaaaagatcacgcgttgcagatgaagacaaagtgctattgacggtggagtatacccgccgcaatttcttatgtattattttatttttttgtcgtttccttaagtatgtaacacttcaccaaatctattaatttggaatataatatttacaaaaattgttagttcatgatatattctttttttctgactaaatattttaagtataacgtagtaaaatgttaagagtcaacatatcttttgaaaatctatatatatggattaggataatttttctcactaaaatcacataaacgttataaaaacgacaattaatccaaaggaaaattaatactaacattgtagaaagccacaaaaaagaaattgaaatgtgagtagatgctgagtcagaggtttggtcaatacacaacagctaattgagataataatatacacgtcacgatgacttgttttttctcctcccaacttgttaatttctttattcttaaaattaaaccatcgcttaatcagaagaacacagctgtttttctcgactcccaatttctattttgctgctaaggacatttcatttcattatttcccaattcaggactccttaagattttcctaaatttgttttcctaacttgctctctctcattctaacattttctcatttttttagattatcttgtactttttagtagattattttatcaggttttacaaacatacattgacattctaaaaagggcttctaaaaattcagtgtggaatgctgatatactaaaaaaaggtcatgcaaaattatctacgatttatctaaaattagataatttgccatatataactattaactaataatcgatcctttgattttttgtttagataaaacgaaacagctatatctttgttttttgttatcggattttaatcgaataaaagctgaaaaataacagttatatcttcttcttttttaactaatgaaacagttatatcttaaacaaacatcagaaacagttaaatattaatgcaaatccgcgtcaagagataaattntaacaaacctaatacaattgagataagattagcgcaaaagaaactctaattttagagcgtgt

SEQ ID NO: 32206 - DNA, 538 bp, Arabidopsis thaliana landsberg
tttgaattttcggatcatttacaattatatatcaaagtctttgactcatgatgtttaaaatacatatttatataaacatatatatatatatatatattacttaccaacggtgtatataatacactacgagtacattgtatacttttatcatgtgatacactatcggttagaattttttttaatcaaatattttatagtaaaattacctaccaattaaaattttcaatcttcaaaaaataataacctagtcaacttaccaaatgatatttttaagaaaatcttaaataaaaaagaaaaaaatcagataaacctctaaaagagtcccttttttttttttttcgtctatctaaaagagtcctttttaacacgcaccgtttggtaagttgactaatattcactgcgctgcgtagcattggattgtcgtctcctctaacacttctcaagtcttaggcggatgaataaaacagtctcttccttttgaatctcacagatctatcgccattcttgcttcttcactcctccattgactaggttaagc

SEQ ID NO: 32207 - DNA, 897 bp, Arabidopsis thaliana landsberg
tttaaaatggaaccggatcgattttctagatagaaatgtgatgagtgtaaatgtgtacctctggtttctctccaaaagctcaatcttagccttaagcctgttatactccatcgaccagtttgtctgtgtaccagaagttttatacagataaaattcatcaatactacaaatagattgatataatatatatgtggattaaaaggagaaatatttattgaaatacattgacgtcggactcaggtgcaataagctgtctttcggcgtaagagtacctctcatagcgttcaagtatcttctccatactgatcatttcacagaattagggttagctttatcatcaaccaattatcattttattatataaataatatggagatgtgaccaaaatatcatcacattttaggataaatctaatgatggttttatgcaattaaaccaagatttcctataacaaatcaagtaccgatctctatgatacctttattataacaaaacagtatgaatcatagaccctatgctcttagcttcgagttctaactgcggtttctttaattttgctacaattaggtacagaagatgttcttagatgcgacacattattataaattattataatcttgccaatttaccaatcttattttttttcagaacaaggacaatgctgagaaaaaaaaaaaggatgacaagggaagaacagctgttgctagctggagctaagtttgaccatcggtaagaagccgattttaggatggagtcagttcttcctatggatcccaaaaggtcaaagactgcctactcagatgtgacatctttgatgcagctttaatttctaaagacacttagcacacgaagcagcactagttgaaatataatactatatagtgctttatattacga

SEQ ID NO: 32208 - DNA, 1400 bp, Arabidopsis thaliana landsberg
  unsure (1)..(1400): unsure at all n locations
ttctatgttaattaataaatttatttaatttaaagtaattttttattctgatacaatttaatggaaaatctacgagtttggccatagaaagttctttctcataactatatacataaacttataaaaaatattttgaaagctaattgagaaagagaaaacattgtgaaaagaagacaagaaaaaatggggagagtaaaaatacagattaaaagaataaatgataggcaacaaagaaatattgcattcgccaaaagaaaaaatgggcttttaaagaaagcttatgaactctttgttctatgtaatgtaccagttgctctcattcttttctctccttctggtaaactcttcgtcttttatgccaaagagaggtatattatattaataaattacgttttcattttcttcttcttcttgtagctccaatattttattatttcatcatatatattattactatcaactgttttatcactaatctgatatcanatcatcgttattgttcatgattatagacccgaagagattatatgcaagtttcttgctcgggctgtacgcacacggtaaattcattgtgttaaggcatgcatttatatataagaacataaagtaataggtctgtttaattttattgtatgagttctaatattcttattttatacatatgcatgaactcctgatattgtactcggttggtccatctgatcgaacacagcctccctcatgaaccggtaaaaaaatcaaaactatctaacggttaattcatctcgattttcgtatagtgattttgtttaacgttacctaaaatttttgtttttcttgattggtatggagaatctagaatatacaacggttggtcatgcagatgcgttcagaaaccaagtgcagtgacgagagtcttgacgatgggcttcgttatctaattcaaccaaaggcatgttgattaaaataaaataaaaatctcatgatttggcaatagataggtatataaacaaaaaaaagttaaagtacttatgcatgcttttttttttcttaaaataggagatcgaagatgagatcgaagaagtcaatgcacgactggccgaagtggaaaaacaattggagtaaatatcttattttatagatatgcttattaaatatttctaatagacatggataatgtatttttggataaatcgttaatattggtttctctaattttcttttttaaggcgtttcctggaaataccagatcagtgggaatcactagctgaacttaaacgtcgagaggaagatttccagaagacgttggatatagttcaatctcggaaggtaaatttatatagataacaatgattatttatgaaagtcacagttaaagaacaacaacgagcattttagtcacgtatcattcacnattcaca

SEQ ID NO: 32209 - DNA, 548 bp, Arabidopsis thaliana landsberg
ttgtgagaagtaaggaatgaagccccggctcatctagttttgaagttatggatcatcatgcccagtgtttcattgatgtaaatggcttcattttattcttccgagtctcttaatctgatttttatccaatacattacttggcttctttttttctttttcggaaaccaatagagttgggttcttactttcttaggatcgatagtcttaggaagatgcttttgcattgaccaataatgtcaaaacctttggaatattttgacttttatcttctttgaatctaaagagttaaattcaaccctatattaattgattttagttttaaaatgattttatgtttttggatgactttaggaaaaatgttatttgttgtaaaatctcccaaatctcacttaaaaaagttaaagccatgagatttataattttgtatatttaactaaacaaaattatctaaaaccccttaaaatgagtgcaaaaaataacattcaataacattagattttaaaatgagtgcagaaaaaaaattagattttaaaataatcattgtgtgt

SEQ ID NO: 32210 - DNA, 562 bp, Arabidopsis thaliana landsberg
  unsure (1)..(562): unsure at all n locations
gccgctgggaacttctctctccatgactagatacggttttgttttaagattatcgtatggctatgtgtgtgcttttctatagcagttatgagccgcaagacatgtgtttgatagtattgctgatttcatattttttggggtttgaagaagaatgatcgatgacaagaaagattggtttattatcgatgcttgtgctctgttgtatatatagttgtttgtttttattagagtttgaaacacccacttaagtcaattaaatgagtactaatggagaaggtaattataatgtttaacattaaggttatgggatgaaatatgagaaagcctagacgtttcgatggtagtggagggcatgatagagtgataaatgtagggagtgggtgtaaactaaagcatagaagaggagaggtgttctatatttgtacgtttcaaattttgtaaggtgttctatatttctattggacagaggagaaaacaataggcccaactgaacaattttttttatcatatatgttatctntggaagtaattaattaaatatcatgtattaaaggtttttaag

SEQ ID NO: 32211 - DNA, 558 bp, Arabidopsis thaliana landsberg
tttttattttcttttgctggtatactcttacgtagtaacttataaaataaaataatgtacttttttaaaaagaaacaagacaaaacaaggttctgggtaacacatgctatccttggatacatcacaaccaacaactacttctcatcaaaatgtgtaaacattaacaaataaataaaaattattgaccagactttcacactttatttacatgtttaacataattacattatatattgttgggcaaaagtcagcttctaaatttcaactttcaacaaatttcttttgacgtcaatataacaaatttaaatttatagtttttgctttgtgattgtattcgccttatcatattgaagagaagaaacaatgaattatattatattcaagaagtattatcttgtacaatagattttaaaacaatcatctgcaattcaagacatacaatgtagcttccaatctcactcaaaatctcatccatgttcatctcttctccacctggcaaaaagctttgcaattccttcaatctcttcttgatctctcctccttcttcttcttcggcgc

SEQ ID NO: 32212 - DNA, 984 bp, Arabidopsis thaliana landsberg
tcaaccattttctctgttaagtcaaccattttcttattggttactataaaaaataataaagtatgaattacaatgaatggatctcagttgggcttgagatgtgggtcgaaagagcttttagcccaataggaaaaagattcataatgttaaacatgttgggcaatattggcccatcccattgatactactacaaataatataagccgttagatttaggtcatcccacaaaccctgaccgttcatccttccgtcttccgataactatataaacccaagaaacttcttcttcaaccttaagcaaattcttacgcagctttttttctttctctcttccttcctctgttaaaaacagttacagaggtcaaagagacagccccaattcgcgctgtccaccttgtacgagctccaagcttcgtctaggccctccattttctctaccccaatttttagtttctttagtctcactttatcatttttaagtggaaatggcggcgaaagcaacaaaggcggagaagaagatcgtttacgattcaaaactttgtcagcttttgaatgagtactctcagattcttgtcgttgcagctgacaatgttggatcaactcagcttcagaacataaggaaaggtttacgaggtgattcagttgttttgatggggaagaacacaatgatgaagagatctgtgaggattcatgctgataaaactggcaatcaagctttcctcagtctccttcctcttcttcaggtttcatttctcttgtcttgaatagtttgttttcatttggatataaagtattgattttttggttttgtggagaatttgatttggtttggtgttagaatttatttaacaggggaatgttgggtctgatcttcactaagggtgacttgaaggaagtcagtgaagaggttgctaagtacaaggtttgtttctttggctcaattgatgttattggtgggtgtaagctttagtagagttcaaatat

SEQ ID NO: 32213 - DNA, 812 bp, Arabidopsis thaliana landsberg
gaccgcgcgcggtgatctcatgctggatatcgggaatatcgagcacggtcgaatccagccgcggcaggcgcacaaacgtacccgcgcgcttgcggcgttcaatcagaccgccttcatccagaggcgtcagcgccttgttgaccgtcatacgcgagacggaatattgcgccatcagttcgtgctcgaacggaatgcggtcgccaggcttcagtgcgcctgagcggatctggttctcgatatcgtcacgaattttttggtgctttgtcttgttctggggcttcatgcggtcagcctttgcatcaacttgcgataatcggcaaggatagtgtcgcgtttgatatggcggccaccctctacctgtttgcggccaaagcgccagacgcaatcaatcggggtgcgtgccgaggcgaagacgaagctgtccagggcgcgctccagactgacgatatccgccggctggtcgattgcgattcctgattgaacgccaagcgcctgcgcgccatcgagcgcgcggatatagaggctttctccacatgaagaattggccagcacattgcgttcgcggtggatcaggcgctggccatattccagcacacgcagatcctcggcgacactgatcaggacattggaatccgatccgataccgaagcgcccgccctgtttcatgtagtcgcgcgccgggaaaaagccatcgcccaaattggcctcggtgatcggacagagtcccgctatagcgccggatttggccagccgcatcatatttttcggcgtcatatgggtggcatggacgaggcaccattgctgatcgaccg

SEQ ID NO: 32214 - DNA, 907 bp, Arabidopsis thaliana landsberg
  unsure (1)..(907): unsure at all n locations
accagtaaacccattgggattaattaaatcagaatgctaaaagtgtttatttttttcttaactataattaataccaacaatatgcgatatttattataacagacagttaccatatagtaagtattaacttgcaatttcaaacaaaacattcgtatatttgttgcatgtgtgtacataaaagtagaaaaggaaagctggaattactaggttatggattgctgcagaaggagtgtttgttagggattgcaggtgatttgaattatgcagaaaaaggaaatatacagaagtggtttaaaaacaaagagtaaacgtaagttgcttgattgacaaaaaaaaaaaaaacgtaagttgctttttcaacaggtaaaatttgacattttattaagaatgttcagtccaaataaacgcgcgaatcgatctgaatctaaagaaaaaaatcatatctcaaaacctaattgagattatttttcatggtaatattttctccttcaaccaagcttatctcaatatctttacccttttatagatccaatacacctggaacgaatgcaatgaaaatattcatgttgaattatagaacagaaacaagcaaattaaataaatgctaaattttccttctctttgttttaatcatttcaatacatacatagaatttgaactacttaatttatataaaacattctgcaaacttgattattctatatattgttatggtaaacttttttttttgatcacactgttatggtaaacatgaatgcatagatagatgattttaagtatgcgattaaaattttgttgggatgcaaaatgaaatatgtatgccaagacaagacaatgaagtgtgttattagaatgtgaagagatgtgatggtgacttcaatgacnggacctctccatcacctcctca

SEQ ID NO: 32215 - DNA, 588 bp, Arabidopsis thaliana landsberg
cataattaatacgtgtccatgtatatactaaatcttgaacttgtttggatatgatatgaacttttagatatagccgtgcgaaccattattgcatctctttagtggaacgcaccatcgctttccaaattaaacgtaccaaaaacatttgctttcaaagttgtttttggcttttattctctttctctctgtttgactaaagttacaagaatttattcaaaacttttaaaagttggtggtatacgttagtcgggctaataaaatgaaagtatgtaacacttaggccgatgcttatatataacacttaggccgatgcttatatataagttttgtatttttaacaaaagtgatatcttttagcaatttattttcgagtagttcaagaagctggttgagatagacatgtgactaattgactaatcaaaatttctaagataaacttacatttagataaatttaaccggtttggaatacacgagaccatccaacgacagatctatctacaacaactttaaactttttgtatccataatgtaaaaaatatatatgaattatgcgtaaatcatatgattcatatctcgcatcttgtct

SEQ ID NO: 32216 - DNA, 662 bp, Arabidopsis thaliana landsberg
acattattatcagcatatcctcagcctgaaagtttcaagaaaagctttatcaatttaagagttgtgtacgtttgcaggattctcacgaggtttggtttgattctcacccacaagaaaaaaatgtcttttcttttactttcgatatgtttgtttgcctttgacaagggacatattaaaatgttaagacgaaaaggttgacaaatctgtgaaaagtatccacatcatgaactcaagatatctcattccattagaagcaaaaaaaatatcaagtcaatgagaccagctcacgactactctagaatcttcattaagcagaacaaggaaaatctataggtctaattaaacctttttttaatatctcgggttaacaccaaatttggttcaaactcgacaagtcattgttcaaaacacatcatccaaaaagataaaaagccaaatcttatcaccagaagtccaccactaattggtatataatgtttttttttgtatgtagaaatagtgttgaagaaagagcttcatgctatttgatatctataatatctcatttcttggaacaaatgaactccacacggaatgaagctttttacatatagaaagaacatataaatgtgtccaatatctaatttggtccacgtatcaaattgcaagatcacatgcttacg

SEQ ID NO: 32217 - DNA, 569 bp, Arabidopsis thaliana landsberg
ctcttttttatgtttctctatcaactaacactaaatttgtggatgaagactaaattaacataagtttatctattaactaacaacctaccagtaccagtttaaagcttctaaatatgaaacttaaacgttataaagactatatggtgtgaactttttatccatctttattgacttttaaaaatttctcaatttgagtaaacaaaagcagaagctttttaaaggatgtaggagttgattttttgtatatgaacaaaacatatacttctccctcatacgaatttggagctatcattcttggtttcaaaaattttaataatttgagctttaaagcaaaatggcaactttactgatgaccacaacactttctctgccttttcctcaatagcaacgcgtagtcaagaagaagaacgtgtttaacatggaccaatcttgattaagataatagtatgatcaaatgcttataaaaacacactaaaaaggaaccaaatttaaccattccacaaatcaccaacaaaatttgatgaatcatgtctctgcttctaaagatgttattattttccttattcttc

SEQ ID NO: 32218 - DNA, 1098 bp, Arabidopsis thaliana landsberg
atgctccaaaactactacatttcttttccgctaccacataatgtttctcatttgcaaaatatttggcctctaatggaagaattacaacctcaaagagattttcaataagaatataattactactatgtatatatgatgtttaaaatttcattgttgggtgttaattagaatactgaaaattgcttatatatcactttgcttcgaaactcaggaaaaaacaaaatatgaaaaactattcatattttaggtttccattgtaaaactagagacaaaataaaataaaatgatgaactcgatgtgacactaaccttttttttttatgaataaatttaacattcattctataaaaaattgcttaattattgctaaataggatatgtattaaccttgatttactactgtgttttttgataaattttattagtttcttatattctaatacttatatcatcgatcaaattaaacacgtagtctagttttcgtataaatgtcatcgttatatatattactattctgattcacgtctaaaatacagaccggcaaaacaaatttgagtcacataacccaattaaaccagttacttaagttaatatcaaactcccaaactaacttattagccatttatttttataaaaacaaaacaaacaaaaacctaactaatcagctatattggttgattcgataatcttgccaatttggcaatgatcatatgtttttgacttgggagccttaaatcagtgcgattaaaaaaccttccatgtgtgtgcgcatcagtgcatgtacaagtacgacgagtcgacgacaaagcaaaggtggttacgtacatatctctctactggcaaaacaggaaaaggtttatacgtattattggcactctctgtcttaaagtttgccacttggaacgctaacagagcttttctatctctaatgcgcgcgtgacgtccacacgcatcggatcggagaggcctgacttaatgaaaatgatttactttttgtttcccgacaaaatatttgattaagctttgttcaaactatttactgtaagagaacattaaaataaggtaaaatggatcccgaaaaagatatacaattagttac

SEQ ID NO: 32219 - DNA, 1139 bp, Arabidopsis thaliana landsberg
tctcccaacagtctctttgtactcattcgtgatcgtttctctcactcgactaaatttttccatctcatccttcagcttcttcctcaacccgttaaccaccgaagttctttgccggtccgacgacgaacccggtccactttccggtaaacttcggttgacttcattagcccgatctaaagcctcgaggtttcctttcaagcgcctcgccgtcttaagcgcaacagtgacgtcagcgtccatcttcttcttcagctccttcaccgcgttagcgttatgaagcgtcttgctctgttcgttgctcgatcggaggttgtgacagagacgatctagctctttaaggtcttcgtttacaacctccacgtcgaggaagaacgtgtctaggttgttacaccgtggcaacttcgccggagactttcgtttttgacatctcaaatgttgtgtgagtgcgccgccattgaacggtccgcgacggaggttttaaccgagccggagagaagatcgttcatggcttaagagatcttcgattttgaaagttgaaaggaattgagaaaagtaaaatcttttgatcaaaatcggtttgttacaattgtatttatattgacgagtcaaatatggagaaaaagaaaaggaaagttttaaacattagaactgaaaataaaaaaggaaaagtctgattaaaacgcggttttgaaattaaaggatgcttcgtttgttgtcaatgaagtagtatctacctaaccgggttttttagtgagtgaaccgaaacacgtttgtcaataaatccgtttaaccaaaacaactttggtgggttaactaaaccacgtcaagtaccagattttatgtgtgctgactcggtcaaaatttcatgatctagtctaacaataaaatagaatttctagatgattgtttgaaccggtcggtttgatgaagttaattgaattgctgaagggaaaccagaccagaatttccaagaaagagtggataaggctaggatgaatgtgatgtattgatattttaggcaaagtggaagattttagaattcatagtcgccggagacaattaacacaaaggtttgaattcgtcgctgtccatttcgaatattttaatgctaagttttttgtggtgaaattgatatatgt

SEQ ID NO: 32220 - DNA, 1040 bp, Arabidopsis thaliana landsberg
tagtcatcatatcttgcatcatggctgctaccggcggcctcatgtttggttacgacgtcggtgtctccggtaagaatattaacatcccttagttatttttctatatgtataatacaatccttttatcttatattatacaaaacgtagaagaagtttttattttaaagatacataagtttttgttagtgcaagttttctcaaaaaacgattttaaataggacttgctcatgttttcaactaccgccaataacttctttggtagaactatttcacctaatacctaacttctttggtaatcaaaatgaaatttcagtaactagctcgatgttaattaatattggttaaagtaagaaaataatcaaaaaaaatcttagcttacaaaagtttggcagctaaagatctagaccgtccttgttttagttagtatattgacaaaagtagtgtcatataggttttagttcttctttttgttattttcttacaacacacatgctcgatgttgaatttgaacatgggatacatcaacatgaataaattaataaatttatgagtataatatcctatagggtttaacggtaaaaattgtattaacaaaaataattttccatcattgaaatggctatacgcaggcggagtgacatcgatgccggactttctcgaaaagttttttcccgtggtttatcggaaagtagtagctggcgccgacaaagacagcaactactgcaaatacgacaaccaaggactacaacttttcacatcatctttatacttagccggtctaaccgcaacgttctttgcttcatacacgacaagaacgctcggaaggaggctaactatgctcatagccggcgttttcttcatcataggtgtggctctcaacgcgggggctcaagacctagccatgcttattgcaggcaggatattgcttggttgtggagttgggttcgctaatcaagccgttccgttgatcttgtcggagattgcacctactaggatccgtggtggccttaatattctctctcagcttaacgtcactattg

SEQ ID NO: 32221 - DNA, 797 bp, Arabidopsis thaliana landsberg
  unsure (1)..(797): unsure at all n locations
gatgccttgggtcgaaaggagcatgtttattcagctattgttgcccagctacccgatgagattgttgaggatttcaggagacttaacctggggatagttgctcatactgaaggagttattattgatgtggaacctactttggagcaagaaattcgcaaaggtcaacttgacgatgctaaaataaaagagattaaggatctgattactgaaggtcgagttccggaatttacggaagatgagcaaggcaccgtatggttcaaggacaggatgtgtgttcctgatattgaaagccttcgagagtctattttaaagggagcacatgactcggattattcaattcatactaggagtacgaagatgtatcaggatttgaagcaaaaatactggtggtatgaattgaagagagatgtggctgcacatgtggctatgtgcgatgtgtgtcaaagagttaaagctgaacagcagaggccagctggactattgtacccattaaagatacccgaatggaagtgagaagatattggtatggatttcattactggattgcagagattggtatggatttcattactggattgcctcgcacctcgaaaggatatgattctatatgggttattatggatagattgactaaagctcatttcattccggtcaagactacttataagggatctcaattggtagagttatatatgactcggattatgtctctacacggtgtaccaaagaagatcattttggatcgaggtgcacggtttaccttcagatnttgaaagttatcatgagaatcagatgcg

SEQ ID NO: 32222 - DNA, 719 bp, Arabidopsis thaliana landsberg
ggtttgttttattgtggataagacagacgtggggaattgaatttttgttttgacaggaattcttttagcaaagacagagatgatatagaatggaatggaggagacagagaagcaaacgcgcttaaggaaatatcttcagatttcgacaaaagatattctaatgcctttgtctctgtagctatttgctttatgtcgtcaacatcttttttgtttacgttggtcatattgtacttttttcttctgactaaaacattctattatgagttattttcttttctttttgcgcgtcttttacgtttttgacctaatctggtcggttccgccggctttgtatcagtttctgtgagatcaaaagtgtttttaactgattttgatattcaaaaaggaaagaaaaaaagatgttaagaacgctcttgggaagtttctctaaagtagtccaacgcttcaagccttcaactgaataaaaatttaaaatgagaaaaagttgaaaatgtaaattaaaatgtttatattataggacttattgttatatgttttgttcattcaaattacaaaagtcacaattgtttctattattgtatatttttcaacattgaactaacgattttaaacactttaaacaaaacgaaggaaaataaaacacttaaaacaaaattaattttttgatggtgaaacaaatacgcgcccccaaaaataaaaatgaaattaaaaaaaaaaat

SEQ ID NO: 32223 - DNA, 877 bp, Arabidopsis thaliana landsberg
gcaaaatgttatggtaagtacacattcccttggttcccttcctccttttataaaagcatgaaataaccaccagctgacttgatatcgaaactcatttaccattttagtgtaagctcttgtattatcagaaacttcttctaaaggctctttcttgtacaactagattcagacacagaaaatgaagtagttttctctttgacgtgtttgttcccacgagggcatatctgatcttgttacattcattcaggtggagatatttctcggaagaagaagcttcttaagaaacaggtatatctctctataagggcgaaatcttgatttcatgattgtatcttcagcggtttctgtgttccttaaaatgagtttttgttttgaacaggcggcaggtaagaagagaatgaaagccataggtagagttgatgtccctcaagaagctttcatggccgttctcaaacttgaacgagaagtattgtgacatcttgtgggtttctccactgagtcactcaagattcactacatcatattttattttatcattttgtaatattctgcaaactaatttcacataatgcaattatttttcgcatttcatttgtaaattgtactgtttttaaagtttttcatacaaaacacatcaaacaaaaaaaacaaaagcgtaatagtgtttatgatcagattcacgttcaacatctttaagatttcaaaagtagtgcaattaggatgtcagttatgtggatgcaaaattggaactgtgtatcacttactctttcaatgttctctggccaggaaagtgtgagctctatcgaacagttcttctctggaatatggatgctcgggctcgtaatttgcatcagttgaaaacatcttgaatgtagag

SEQ ID NO: 32224 - DNA, 2139 bp, Arabidopsis thaliana landsberg
  unsure (1)..(2139): unsure at all n locations
tttttgccaacaatttggtctctatttcttgaatatgaaaatcgaggaatttttatatattgacaaacaagtcgattatttttgttatggtttgaactttgatgtttacaaaaaaaactcatttagtaagacacataatgttgttctactgaggaaaatattatattttcatgcaatggtttcggtttgtcacaaaactcattttatttaaaagccggatgaatttaatgggcctaatataaaaggcccaataagctactggttagagtatatgtggactggtttcaccaccgccgcaaaaagggagactgagataaattcacacagcaatcggagttactatgtggacagtgaaactggcggcgatgccggttcaatttctcatggagcaatctccgttggctatttacagccaccaccaccgcataaagtaatgatcaagaattcttctgaaaatttctgagctcaatttcttattctgtgaattgatttgtggcaagagcgactccatgggaattgccgaattggagccatctcgtctctgctgcttatgcaacaggtaacttttcaattgctagtttgtcgtttgtgtttttaatttcggttcggtttacatggttttgaaaaattcaattgatttcggttgggtttgaattggaattaaaggagaaaaacactgaaatcacgcactcgaggctttttttaaaaagagcgagggtgtttcaaaacaagccatttggtggattagaacccacagaaaacgtagacacgcgctcaacacgcgattagtgagagtgggtgtgaaatcacgtaaaaggtgagaatggggtatgacatggagcgctctgattggtttatagaatgaaaatagtagagatgttgctcctctcttccaatgtttatatttatttacttctcttttccaaagtatgaaactaatgcaattcatagaagaacacacacaccaaacacgaaaataaaagattcaaatatgaaattttaatagaaatattccaatgacaaaggtctttttagtcttgcaaacacacacaccaaacacgaaaataaaagattcaaatatgaaattgttcttaaccaacagcaacgcctccaattttttaagagatcaaagaaagaaaacaaatgatattcatattcttcaaagctttgaaagtaaaccagtctgaagannnnnnnnnnnnnnnnnctctttgacttcactctccttagtctccaattcgcatggattcggtggcacatctactgccggtgagcagttgaaaaatccatgtggctgtattttacccaaaacccaaaacattttttaaccaatcctttgtaagttttttttttcattgaaagttacagtcaaagatttaacttaccattagtgtgaaaccaatatgttcgacgggcataaccggccaatcttcaagtctaggaacatgtgtgatcccaaacacgtacctggtgacaaatgaaaattccacattgaaagtcacataatttggtaactagtagtttttaactgaatcagataagtaaaacaaggatacagaccaaagaacgacgtcagattcttccaaggagcgattctgtttcacccatgtggcaagaccttcaccagcccgtgggttttggtttgggaattctcctccaggaaacttctcgtctggggcgtaacgggtaacccagagattatgcttcaggaaagcggctcttcttagaaacttcgcctcgggtcgagctaatggcaaacaatttgaacccggaacaagtttgtatcccgttaattggcccgtcctgtttacagtccttgtgttccttacctgataacacattacaatgatttgtgttgaatatacatcttgcgtgagtataccatctatacttcagctacaaatcatattcaatgaaactctgagatgattttttggtaaaggaactcaagtatgagactatataaacacatgactgaaacttagggatgctcaggtgatctcttatcccaaatccagtctcaaggatgagactagtagatagtcaaggatgaaagaaatataaacaaggatattacagagacgggtacgagcactgacaatgtgaaagttaaacatgcaataaatggacgagaacatg

SEQ ID NO: 32225 - DNA, 815 bp, Arabidopsis thaliana landsberg
aaaactctctcttttacgtggaatattagaactagaaaattttcttttttttgttaaatattttcttactacattggaatgcaccattataaaattcttgtgaaaatgatatgtgtatctttttaagaaaaaaattcatatatagacctaaatatccatgtctattaccatagtcatagttttacaaaataatatttttgtttagacaaattgagaaatattggatcatctcatatacctcaattgtcacacagctcttaccatcccaattcctaacagaaaaatatgtgaaatctcatgttttagtcaccacacggtcaaaatataaactttcttttccgggggttcacattatcgtaatgcatatgaaatgagactatattgttgtgtatttgcttgtgaaccggtagatattgcttcgaattcatgacccgttggatattccactcatgaacttcttctccttacaaattttagttttcaattttcaatctccaaagagataactgatgtttttttccttatctttttttaaaagctcaaacatttaccttattatcttatgtgctcatactttaatataatgttgtgaaaaatttgaataaaacggggtcttaactttaaattgggaacaattgggaacaccaatatttgtaccacacacaggattcatcaattaaatatttcttactccaacaagggtaaaaaccctctttaaaaccattaatttttcctttaaattttaattcttaaccttttttccttttctactcttggatctttattttctttttaaaaataatctttcttttacc

SEQ ID NO: 32226 - DNA, 529 bp, Arabidopsis thaliana landsberg
ggccataattcaaaaaacaaaaatctgagtgtttcgatgttattacttatctacgtctaaaactcactctcatttgctaattgttaacttgctctgagtttgaagaaattcatcaatggcgattcgcagagcgcaaactctactttgtctttctaaattcaaaaccaatttcgtgtgtgggtcgctccaccggttctcttcttcgtctcaaaattcaaatcaattccaggttctgctttttaaattgtcttcatgatcagaaaacataatctcttttcctcataagtcacctagaattttattgaaacgttctaaaaaatgatccttaagtagttggaataaaagatcttaacttttgtaatctcgagcatagctaataagaattttagtggccaaattgcttattgatcttgaccacttatctaaatacatcagttctgcaaaaaaagttgtctggattagatttttaacagcaaaatttgtctgattcagtccccaaaatttatgtaaatgaagtctcatttttgct

SEQ ID NO: 32227 - DNA, 473 bp, Arabidopsis thaliana landsberg
tcgtattttcctaacaaagcttcggaataaacctagatataaaaatcattttgccatttatttaatgttgtgtattatcatagttacgatgatacaatgtatgctttgtcagtttaatcaagtatacaatgttagttgatgtggcaattatactttcatattaaacattgaattatataaagcactaatatactttttccaaagtatattaattttgtgtaagcactcccaatctaagaattttttttagttgactacatttttctccatataaattgattttacttttcaatattctaattattaaccctattttattatccacttgtttatctaaaaaacactatttcattagtatatattttagtttttcccacactgcttctttaactctctaaactctatttctctcgctctctatctctctcaaacactatggaatcccaaacaaagttcgattatgaaagtcttgc

SEQ ID NO: 32228 - DNA, 412 bp, Arabidopsis thaliana landsberg
aagaacacacctttactaaaacccttgaaagataaatgattgaaagatcaaaagaaacttaccattgagagtttaaaaggacaaaactttgggtttcctcttcttcgacatttcaaaagctgtgcacctttcttcaaagccaagattgcctacaagaaaataacgatcactaatcatctctaaatccagaaagatcttgaattctgtgacagatctctaaaccatttaaaactaactatgaacagagtgattctaatgtgtttcacagaacagagatttcatttgaggaaaaaacaaaacacacaacaatgtttgaagatgagagaagtggtaatggaatgaacagtaatcactgtcgaggctaaaactggaaattttcaagaaatgcatcaatttcttgattttctattac

SEQ ID NO: 32229 - DNA, 3274 bp, Arabidopsis thaliana landsberg
tccaaactagcccactcaaattgtatttactcgtcattaaaaggcggtcttattatagaccctaggatcataatggagagcattaccataggatagcttcaacttatatactaacttaaatcgtaaacacacctattcttctataatagttcagactcaacctttatccgttaagacaaatggctgccctgtaagaagataacgaactgattatactgtggcgaaggttacaaaagtggtcatagataattgtggaaaatgtcttaaaaaaattgacatgaacttaccaaaagtgttgaaacaaggcatgggctttgctggtggtgaattaaattgataactttattgaaaaatagttattttatttataaactatttgcaatagacattctttccgaatttttgtgtgaacaaattatgaatatgtagttgacttaacaattttagataaaaagaaaagtcaatatcaatatgtagttgatatctaattttttagattttaaaatttaaagaaattagatgtcggtttaggtttataaaagaatgtttacagttgatattttacagttaaacaaaattttatgttggtttgggtttataaaagaatgtttaggatttgtattttacaattaaataaaattatatgtcgatttaacataacatattattgtattttgattggttaattaaaaaagaggaaataagagagttcatccctcggatgaatctaaaaattgttctttaataatacgcgataataggtaaaacagaattaagagatagtaaaagtgaggaaaataatattcaagagttagaaattaaaacgaaaatgagacgtcaatttttatttttttgggtcatagacctcaaaaaagtcatttataaagaatattgttcaacttaagaaataggaagaacgaaacgtcaaacccgtggcattcattagtttcgagacagaagcgaactaaatattattattattgtcttggcctcttgggtttcagatctatatcgattttttttcccccccccctaattgtctccaaaaaaacagctagacctgaattactttgtcgtctctctctctctctacccgattgagcaacataatggcttcccaaagacattccacaaaccccaaacttctcaagtgaatcggagaaaaaaacatcttaataacagagaaaagaagctttattcctcaagagagtaagaatggtggaagtaataccaaaacccatcaaagatgtttgggattagatggaacataagaggagcaatcattctaagtcttactcttcaagccattctcatatgcttctctcctttattatgtatatagtttcaatgtaaatattatggttttgtataggtttaattggagtctgtataggtttggtttagctggtttagaggctctggtttaggcctggtcaaatgtatataaacccacaattgtatcttttaccaaaggaatgagaatgagattatttactgatatcctttaaggaaacgcacaccaagaaggctcttgatcatgctcgtttggtcctcttatctcttagcagattggtctgctaattttgctgttggtctcatctccaaaaatcaaggtaaagatctcaaacctgatgaccctccacaggacaaaaagctcatggctttatgggcaccattcttgctcttacatcttggtggaccagacactatcacagctttcgcccttgaagataacgctctctggctccgacatgtctttgggcttgtctttcaggcaattgctggtgtctatgtggttctccaatctctccccaatagcctttgggtgattatagtcttagtgttcgtttctgggactattaagtatctggagaggacacggctttgtatagtgcgagtttggacaagtttagggattctatgattcaagcaccagatccaggaccaaactacgccaagctcatggaggagtacgaggccaagaaagaggcaagacttcccaccaagatcgttctgattgatgagcctgacaaggagcataggcctaagaagttagagcatccatcattagcttcgaagaacagagaagagttgacccatcttgagattgctcagtatgcttacaaattcttcaacacattcaagggccttgtagtcaaccttatcttcagcttcagggagcgtgacgagagcctagagatctttgagaatttaaatgatccagaggaagctttgaggatcattgagattgagctcggctttctctatgatgctctattcaccaagatcgcgattcttcataccggtattggaactgtctcacgggtctttgcttctggtacccttgtggctgcattcatcatttttcataagaaacctaacaaaggcacagattttcatggagctgatgtcgtggttacttatacgctgtttgcagttggcctagttttggatttcatatccatccttttgttcctgttctcagactggacatgtgctgcatacagtagtttgaaggacgatccggatgagcttcaatcatggcaagagagatgttttaactggttacttgaattcagaaagctgcgttggacgccgcaagagtgccacaagactggtatgcataagtgtaccaaagaaggtttgaaaccgtgtatcatgaaaggtgctgataagaaggaaggtggcaataagaatgaaggtggcaataagaaggaaggtgacgaaaagaaggaagctgctgataagtgttcattggtagataagcatgacgttctcacaacgcgtttcttccttcggaggtggagtggaagcatcaacgtttttaactttatagcgtacgccacaaaagcagatgtagagaggatccacgacgccagaggtagtttccgccgctactcatggaagatcataacttttccattcaaaaaactcaacttcgtcataaagaaaatttttggatcgattgtcaagtttatcaatgaagtgcacagacggatcagccacgaagtcaatgcgttatcaagaaagcatctttgggctcgtcgttttctttaccctatctatttcgagttcatatcccgcatccctcacttcatcaaatcagtgtgggatatcctcagtgagttctttgacatctcggatacgcttgatatggtccacaagacactatttgtacatggagagcccatgacgagagaattgtggaagttcatcttcgaagagcatagaaacaaatcaaagtatggagacagtcctgaaaatgccaagagga

SEQ ID NO: 32230 - DNA, 1066 bp, Arabidopsis thaliana landsberg
  unsure (1)..(1066): unsure at all n locations
tttttgggatttttcatgggtattgaaatgatgataacgtataataggttttaatcagattctgtttgtttctaagcccactagatctatatttgtgacacaaactaggggtttcatgtttctataattatgatttctgaaaattaagaagcaatatgtatgtgagttaatacaataattatgtccttatactccaacatgtaagaacaggttttgcatgggaagatcaatagcttgaatttggacctctttctccttttaaatttcgcattgtaatatgtaaccatttagatcatttagtctcggattatacttaatagttaccactagattgctaatacgacatttactatgcatcttagatctttcacttgtgtagtgaaaatcttcaatctggtgttattcttgaaatcttatcctcttattgtacgatgaaccagattccagatatttagtaaaccagacttcgtgtgtgtatatatatataataattatcaacaatttaaaagtaaacaaaatgtggatgttgtaaaatttcagagtgaaaccattacgcatagagttttcatcatccttcgatttttctttgttcaatttatgtttcgttttttttttcggcgttgagaaacactttactaaatggtgaatcttaggaggaaaaccaaataagataatactccattcgtgtggaagccgtcaagaaatagagagcgtcttaaatcaaaacaacaaatgaagaaataaattattattaaatttttggaaaaagtagagaaaaatcttactaaaagtgaagcttttttggttgtcctaaagttttcacggattacacanattccatggctcatcggatttatcttttttactatgtacttttaaccaaaaactttgaccacattttctttcttctacgggtttcagtgtcttttcctgctgaacatacggctatggtttatgtcaatttaatttttgttcacagtaggccggttcctatataaataacctgctgaacctacggctatggtataagttaataacatttatatatccatgaatatatgccgaa

SEQ ID NO: 32231 - DNA, 663 bp, Arabidopsis thaliana landsberg
  unsure (1)..(663): unsure at all n locations
agggaaatcctaaggtatacaatacgatagactgcaaggaaatcaatcaatcttgttgctgttaataactagagacttacttgtgagatagcgaggcagcgtgatcacgtcctgggtaaacattaaccgtcaagtcgagttttcgggctgcttctttgatctcttcagagtcctctccatcaccgtataaatcaacctctaactcggcaagttccttttggtgtttctcaagtagtttaagaagctccttgtaccctttgctccagaccatcttaccaatgtagtatgcgcctttagtgaagggctgctcctggagcttctgctgttctagttttctcaacccaatttcgagaaatttagggttgacgccatgaacattgcagactatagatttagggtattcttgagtcgcagcagataacctgattacctgcaggagtaacatcattggtacaagtcctgattcacatcaaaaggaccggccataattgtggtcacattccaacanactgtcttgattctcaaattaaacccagccattggatatattcacataattgagcaatcactctatcatgtcctagtggctggaaaaaaaaaagaagtttaccttgtggcagtaaatgacaacaacccaactatttgagtatttagaaaaaatgc

SEQ ID NO: 32232 - DNA, 2922 bp, Arabidopsis thaliana landsberg
aaacgaaacttgaaggggtaaaaacaagttcccaagtcgtgatagcgagagatatgagggtgctttcatttgtaacgcaccaccatacaatatacatacacatgccagtcataattaacgtctcaatatattgattcccattttttgcttttatgtgcttttttcttttgctggttgaatcgtagggagacaaacaaaattggactgaaatgttcacgttgttttttttgttttgtttaattcacataagagactcaaaacaacctactcatgatgactttgcaagcacacagtctttgttaaacttactcatgatgaaaaaatctagccttgttgtacgtatatgcttaaaaaaaaattcatctcgactagtaaaaagttggctgaattagagttttcgagttaataaggcaaaaaaattgcaatctgtaaacgacagcttgagtagttatagcatatactgtatatgacaatatatataatgaaaaagttgtttcattgaactcccattccatttggatggggaatagaagcctagataatgttgaaatcctaggcatggtaactaactccttttgcctctccttaagattgaaggctgctatgagggagatttccactgtctttaaacactttgagtttgcgagaatgtatgtcactaaattgtttctcatcttctcttcttccattgtctttccaaccaaagatctctagatgagttgacaggcatgtgggaatagaactcgactggttccaggaaggttggagaccctcgaagtcctggtatcagtacagtttattataatgttgagttcatcaaaattagatggatgcgcttgtcaccgtgttttcgttgatcataagagttttcagttttagagaattttgaagcaaaaacataagtggttctaaccagtctacggaattttgtgtttgaaaataaaacgttatgagcagagagaagttaatggcgctacaacacgcgacttatgatagaggaaaacgaagattagttgaagaaacaacaaggaatacgagagagagagagatatataaaatggctaccattgatttggtcaagcgcaaatccatacatcagaagaaagagatctaagaaacttggtatcgggattaggaacaaagccagtgtctgccacatcaaggcaagacatattctctatcaagcaatagtcttcccaaacgtcaactaagtccacatctgttaatgaagggcaatctattaccaacgatccattgtgatcaatgatcatcatcctctacctgatcaacctaattatcctcttcctcaccaaccgatcattatcctcttcttcatcaacctttacctcatctttatcctatatatcgttgagtctatattttactgatttttgatagctcaacatcattctcttatgtacatgttataacaaaaacaaatggctcacgatattgctaaagagtaaaaaaaaaatgttcaaccgcttatgcatgaaatgcattgtgcttaatcaaaacatggcttttaacagtaatcaaaacatggttttaatgacccgtctccatggagcggtggttaccgaagcttcctcagccttctatctacaaacccacccaactttagacccgtcgtcacccatctccttgcagataaacacctcaagctcgcccttctcgtgcgggcgagaacctcagtcttggaatcttcatactatagaaaatgataaagatttggccctacaatattttttttcttcacgcaaaattcatggtgtttgctaatgtcagttactttagaaaaatgatgctatctttaacctaagatgtccggggaaaaaaatgaatagtacaatatgtaatggatctaataagctaggccaatgatgcatgttgtgcccgcagtatttcgatgcaaggaaattggatccttcaatagatatcatgcatgaacaggctaggtacacatgaatgtattctatgttcacaaaacattaatttaactggtataaattatacatgccttgaatttcagcaaggaactaccagaacaattttctcaccataacattgtaagagaactgtaaattagtattttaactagaaacaaattagtaacctttatcatctttttaccatgcaaatcacgggtatcgtccaattatacactgtttattacaactaaattttgcaagaaacacaaataaaaattaataggtagaatgtaaatacatagaaaaaatgtagccataaaatttagaacttgggaaattgaactcgagagtcgcatcgaccatgcggcataacaggacagttgatgaatttggaggccgaagtgtcaacacataaataaatctgatagagttggctattatgtgacgaatctttgttacattcaatgcccggagcaaacccaactacttgtttgatcgtattctcaatatctttcatttcataaaatttatcatccggtttgatccctacatcatgcaacacaaaatataataagaaaagaacatccacttatacataactaacaatggagatcaaaatgaagggcaaaacaagtgaatattgtaccagcattggtaagggcatgaaggagattagctttctgtttgagcttgagaccagcttcgaagtaatcgtgttggtcaagctcggactcagcgcacgtaccgtgtttctcccactcatgtgtccaaaacttcataccatcattgctcggacacgacaacgttggccattctctttgtaaatcgctcatcagatcagaaacctttataaaagttttcgattctcattagttatttacgattcttttcttgtggttaataatttccgaagtcccaaaatacaaaaactattgtgttataaagtaaaaacaaacccgtaaatcaataaatcgactgtcaggattacaat

SEQ ID NO: 32233 - DNA, 1222 bp, Arabidopsis thaliana landsberg
  unsure (1)..(1222): unsure at all n locations
ctgttaagtttaaaaatttttatattggcaagtccccccgcaaagcggccccatatccaaagaaaattcctacttcgaacttagtatacaccgcttacccctacacatatgaaagaatttttatttggagagactagtactaccgtggtggcagagtgactcgaactcgagacctctgacactcaactgtcagaagaaatactactagaccatatatggatccttctcaaaaaacgataacttcaaagttagtaagttcaaattcaaacttttggaagagttcagacgaaactcatctaagtctatgtcggtatgcttggaaaggtcgatattacttatgatatccctctattttaacgatctttaggtaggtaaaatgtttaagacatgcatgcatatacagtatatgcatatacaaattcacgatattgaggaaataaatggttaaatcttagatattggattgcataatatgaatcatcagagagggagatgtcaatcttacaaagcccaaatttctcagcgctataaagcccattaatttctttaagatagaaggcttttcaaagataaacaatttctttgccatacgttgcagtttggttgtctaacgataacacacgcctactcggttaagtccacttatttgccatgttgcatttttggggaattaagtgtgatagtagttgttcccaacgttgattgttataagaagtaaacaatcaatcatggcttgtttcgaatcacatatttttccaccatccatgatgtggtccgtctacttatcaaaaagtgaagtttgctttgttgtatatcggtgttatgtatatctgaattcactcttcatgatgaacaaagaatgcttacaacttctctgtgaggtaggtgaagaatcaggcaaagctaatgtttgcttcttggtcttcagagatattgtcaggagaaaaaaagaaatttgtttttgttggatttaataattcagcagagcaggacaaaggtttcgtgtggtgtcagattatagaaaatgtagaacaagttagatgttgattttttgtctcgtaacgcttttgttctttaccaaactcgatcttcttaatctgaactatnntgctcaatcttcttctttggtatatattatatgacttcgaaaacaaatagagtaggacctaattgataaagtttatgatagcgtcccatcattattaataataatcgcattaac

SEQ ID NO: 32234 - DNA, 1538 bp, Arabidopsis thaliana landsberg
ttgaaatccatcattggtaaagcctttttcacttttaaaaatcaaatcaaaaacaggttttctaaaaactgaaaataaatgagataaagttttatgcatcagagagattcccattatagactatagtcaacacagaatattttctgatgtccctgtctgttaatcgtcacttgcaaacaacacaaatctaaaaaaccagatgataccaagttgaaaagaacctttaaacttgaaaaaaaatcttcaaagtaattaaaagttataaaccatcaaaggtatcaacaactatcagcaaccaaatcctataatactactaaattcaataaagaaataagattcaaaatagagaaacaagattgtaatgaagaaacggcgtttagaaacagagactaaagaacagagagaatgataagttagggttatggatgtttgctcggacttataaagaggttggttcttgtagttaaggttgggccgggccggaccgttatctaatagaataaaatatgtaataaatatatagtttagtgattaaacagcaatggggatgtagctcagatggtagagcgctcgcttagcatgcgagaggtacggggatcgataccccgcatctccacttagttactattttaaaacagttttgttatttagtgaaaaagtcaactattgaaagataggtgaaaactccgtgagtctcaagcaagacccacaagttacctgagcttttttcttttcttttcccggcagctacttggatgaaaagaaacagctgccgtttcaaattcactcattttccgacagtgaacagagccatatagacttgagcgaagaatctttttgccttttctcatctattggctaatcagaaaaatttaattccattgacttttattcgattacctcattttctattataatatacacagaggtaccaaatttcaacagtagtaggcagatacctattgtcttagaaaacgttttctctttgttctgtttcttgacacaaaggaagaagaagatggaagcaacatacgatcgtgctagtgaggtaaaagcttttgacgagttgaagatcggcgtaaaaggtctcctagacgccggagttactcagatcccacgtatcttccatcatccacatcttaatttaaccgactcaaatctacttctttcctctacaacgatggttataccaacaatcgatcttaaaggaggcgtgttcgacgagtacacagtcacgcgagagagcgtcatcgcgatgatcagagacgcggttgagagattcgggtttttccaggtgattaaccatgggattagtaatgatgttatggagaagatgaaagatgggattcgtgggtttcatgagcaagactcagacgttaggaaaaagttttatactcgtgacgtcaccaaaacagttaagtataacagtaattttgatctttatagctctccttcagcgaactggagagataccttgagttgctttatggctcctgatgttccagaaacagaggacttaccagatattgtgggtcgaa

SEQ ID NO: 32235 - DNA, 510 bp, Arabidopsis thaliana landsberg
cccgttgctgactgcgccccccttgacgctctcctcgggcggcgcattctttaggtttttgtttttgagacacacgaattggtcgctgaaatggcaattgctggtcaggtttcccgtcacagtaactgctgctggtgctgctctgttccaacatgctaatgacgaagtgctccgggaagtggtggtcgtacttgcttgctatttcgctcatggagaaccactttcatggcggaatcatttgggacgtgatcatttggctctaaacactcactcacacaccgttgtgtgattggcaaaaagttgttacacctctcttgacggcagcggtggcagcggcgccatgtgtgtgacaatcgcctcaacatctgacattggctcgtgtttccttgagcgctttctcttcctcgctaccccacgctagtctttggtcatttgcatcggaagcgaacacttcaattccacttgaacggaaagtggggccgtacctttgcgtcagagtgattactaatt

SEQ ID NO: 32236 - DNA, 832 bp, Arabidopsis thaliana landsberg
ataacccatataggattgtatgctttcgaggtgcgaggcaatccagtaatgaataccataccaatctcttcccacttccactcgggtatctttagtggatgcagtagtccagctggcctctggtgttcagctttactctttgacacacatcgcacatagccacatgtgcagctacatctctcttcaatccataccaccagtatttctgcttcaaatcctaatacatcttggtactcccaggatgaatagaataacctgagtcatgagcttcctttagtatagtctctcgaaggttatccatctcaggaacacatatcatgtccttgaaccatacagtgccttgctcatcctccgtgaactctggcctctaccctcggttatcagatccttgatctcctggattttagcatcaccaatctgacctttgcggatttcttgctccaaggtaggttccaattcaatagtcactccttccgtatgtgtaacaattcccaggttgagtctctcaaaatcttttgctaattcatcaggtagctagacaacgaaagcggagtgaacgtgctccttccgactcaaggcatctgcaaccaaatttgccttgcctgggtgatagtgaatttccaaatcataatccttaatgagctccaaccaactgcgttgcctaaggttgaggtccttctgagtaaatatgtacttcaagctcttatggtccatgtatacttggcacttagttcccatgatgtagtgtctccaaatcttaagtgcatgcacaacggcagccagctctaagtcatgggtggggtagttcaatttatgcttcctcaactgacga

SEQ ID NO: 32237 - DNA, 463 bp, Arabidopsis thaliana landsberg
taaaatctagtttgacttataaagtcaactgataaaacttgagtttactaaatttgaataaaaaacaataaacattctctttatatatactcgatttattgaaaacaaaatatatataataatgcctacaaaagttattaaaaaacatacccgtccaacggacatgtctccctctacttatcattaaggtaaagttcataaaggtattgtacttggctttcttctgttgtctgataaatgaaagacttaaccatcattaacaattggatgttggtttaaaaaagatgtacatagaggacaataataattaataagacataaatttggtgacagatgctaaaaaaactctctcatgcactcttctcgaggtgtctgaaattggcaatgtttttcaaaaaaagtagatcttgacttcttcttttagctattttgagaaactgtttttacccttccatgaactttg

SEQ ID NO: 32238 - DNA, 742 bp, Arabidopsis thaliana landsberg
tacaaaattcgttcgttaacttataaaaatgccactcactaattgcatacaatttctagtgaaaagtataaaaaatgttcaaagttatagaagttggactggactagactgaagaacatcagagacaaaatgtttatacgctcataaacaaatataaaaatccctaatctctatggaaaatgtcattattttcaacacaaaattcgatcatatgtaaaaatctgccaatcgctgcaatatatagtttacatagtaaaaagcatgaatgtcagaaacaaaataagtttattcgcataaagtcatgaacactacaaaatccttaagaataatcaatggaaaatatcatattcatcaatagaaaattcgattatagaatatgacattcactgtaaaagcataaatgttcaaaagaacaaattatatagaggaacctgatcatcagaaacaaaaaaatcatttattcgcaccaaactcaagttaccaaagacaataataatccatggaaaccacaaaaatccagaaaccctaattaagaaaaaaaccataaaacacgataagataataatgcagatcaaaacaatcaaccatcatcacaagatcaatcgaagagactcatcattccaccgtcatcttctgattcctctttctcctcttccttcttcttggtctccgccgccgcaggctcagcgactggagcagcaccacctcctccaccagaagcaaccgcaaacgcaccaccacc

SEQ ID NO: 32239 - DNA, 2079 bp, Arabidopsis thaliana landsberg
aaggccgatggaagaaagatttcatgggcttgcatacgataatccggtggatgaatccacggaccccttggtgtgataaggatatcgttcggatcgtgtggatggatcgaataagccggaagctttaccgaccttgctaattttatttttaaacataaaaaagaagactgcaattttttattactgtctgtatcgtgttatataattttcgtttttttatcgtcggataaaatgtaaagatccatcgtggaccgcacgggtaaacggttagtaaaccgtggacgatcgtagtgttaaacgacctgttcaaaaacattgatggttcgataagccgagggctcaatcgtccaccatgaaaacgaaggggcgtacgtttggaggacggatggaccaataagccaagagcttgattcggccatcgtgaaccaagggatttagaccataggagttggttggttatatggctaagtaacgatagagattggtccatcaatacacggttgatgaagaatcgttgaacgattggaataagatgacaaacgggaaagggaaggattaatggacagatcaaagaggaatcgaatacgcatattggccaaggtatgtaacgatctaacttattagttaagatagacgtttgggaattgaccttgaaaataggataaaggaatatgcgattgttaggcttagagtggttagcaaacaatatgcatgtcttgaccgagtaaaggatcgatctaactctaagggacaaagacaataaaactggtacaagggtttgttggaattaaaccaaagttagaaagacttccgctgtgtaataagaaattgattatagaattaagcctcataaaggcaattctatgttgaatcgcaaaacataaagagcttcggccgggaagagactcgaacgtgagtcaatggtcgccggatgccgagacgtcagaggcggggtctcacattgactctcacaatgtttaggtagagaagagattgaagagaggaactaagaagtcctctgtagagtattcattggatatttccggatatttcctcaaagtaggcttccttctcatcagcagtatagtcttcttctcctcaatcaggttcctcaaaccattcctcaacttcaggtcttggataacccttaatcatttccttaagctccaagatagtatagttaaattcttccatcttgaggtccaacttttcaatggtgtcctcttgagcttcatactccttcctgagctccataagctctctagcaatataatcaacatccaataggtctccctcagtctctacccttgagctaggttctcctctcatcatagcaggctttttgggctgcttaggctctcttacgcagtgagtcggaatggagtttggaatgaagttttcaaacccactcaacaactcagcatctaaatttcctacttcgatgaagaaaggctgcccttctatggtgggcttcttcattttcttggaaatgtaaaagctcatatggagattcttaccaagttttaaatctatcttccccatttgcacatcaattagagcacctgcagttggtagaaatggtctcccaagaatgagagggtcttttggttccttatccatctctagaaccacaaagtcggttcgaatctcatctgatccagtctttaccggtaagtcttctagcatcccatgagacactcttactgatctatcagctagaataaggtgaatgcagctaggcttgaacttagcgaaccccaatctctttgcaacagacaaaggcatcaaactaactgaagctcccaaatcacaaagactcttgttgaacactaagggtcctggaaaaccaggtagagtgaaggaacctggatcacctagcttcttcggtatcaccttcctttttatagtagcactgcactcataactcaattcaactatttcctgaacttcttggggtctttctatcatcacttccttgtgagtatcaaccaagggtatcttctgctctaactctttgatgaacatcatcttatgtttcttggagatactttcttcaatctgtgcaatttttcctagaaa

SEQ ID NO: 32240 - DNA, 350 bp, Arabidopsis thaliana landsberg
cgtaccctcgggaccgtactatagcaccgcgaggaccaggccgccgccgtcgcctacggcctcgacgagcttgcgaaagcgggggcgcggcggagtgcctgaccccggcccggccgtggagcgctccggcccggccgcggagcgcccggacgcgtcgcgagacccgggcgccccgcggggcggtcaggccgagcggatcgccgtggggttcgcccgcgcgctgcgggcggcgggcgtgggcgggagcacgggacgaacgctgctattcgccgaggccctgggacgtgtgggcatagagcttcgaagctcggtctactgggcgggccgtgcgacgctgttgacccgggcgg

SEQ ID NO: 32241 - DNA, 1089 bp, Arabidopsis thaliana landsberg
tacgcggggctggccgatgccatcgtgcaggccgagaccaacaggcagatgcggtttgcggccttttccgaacacaagacccgtcaggcgcaggccgtgcagatcggcgcggcgctgttccagttgctgctgctggggctggtggccatcgtgtccgagcgctcggtggcccatcgtctgcgtgccgaacgcatcagccggcaggcggtggcgcgcgccgagcgcatcgtgcagaccgtgcgcgaacccatggccatcatcgacgcgaagctggaggtgttgatggccaatgcggcgttcgacgaactctacgagacgtcgggcgtggtcaagccgggtacgcgcgtggcgctggccaacatcggcagcggcgcgtgggtggacgaggcattgcatcagcgcctgctcgacgtggtggcgcgcgaccgcgagctgtgggattacgagctggcgcagaccaccatggatggcgtggaccgccaagtgctggtcaacgcgcgccgcatgcgcctgcccgaggacgacgagccggtcatgctgctcagcgtcagcgacgttaccgcgcgcgccctggccgagcagcaggtttcagaactgaacaggcagctggaaggcaagatcggccagctgtccgaagccaaccaggaactggaggcgttcagctattcggtgtcgcacgacctgcgcgcgccgttgcgccacatcgccggttttgccgacaagctgggccgccacctgggtaacgccagcgacgaaaagacgcagcattaccttgacgtcatcaccacggccgccggcaacatggccgggttgatcgacggcttgctggcgtattcgcggctggggcgcggcgcgttgcatcggcagctggtggacatgcgcgcgctggtcgaggacgtgcggaacctggtcatggaaggtgcggccggacgtgccatcgagtggcacgtcggcgagctgccgatggtcgcgggcgacgagagcatgttgcgcacggtctggcagaaccagcttggaacgcggtcaaatacaccggcaagtgcgagcacgccgaggtgcatgtcgacgccacgaccggcgccgagggcg

SEQ ID NO: 32242 - DNA, 513 bp, Arabidopsis thaliana landsberg
  unsure (1)..(513): unsure at all n locations
caacaactatgtcaaacccatataaagaagaattgtaacctcctagtgtttcttcctgatcgataataccaacnacatataatgtcttacaaacaaccttactattagagttcgtacttctacgtacaaaccatataatcatcaattttatgctcataaaagcattggttgtggcttttgggactttgaaaccttggacatgccacaacattttgatctcgcaagtctatttaacacagtaaatggagcagtaaagaagctgaaccactcttattcgattagaaaatttcatgctattaggatgccacaaagcattttgaaagcaaatatttgccaaatataactatatttttcaaataagctagatttctagtctttgaacaaaggatgcacaaaacgacatttgttgtgaaatagagggagtaataatttttttttttaaaacctatagattcaatgaatcatatggttagtagagaaattaaagttgaggttttgaagtgaaaatgataa

SEQ ID NO: 32243 - DNA, 1100 bp, Arabidopsis thaliana landsberg
tagttctctaattagaggtagctataaaggtgacaattttgcagagctattctaaaaccctattgtggaaattagaacccagacgatttctccaagaaccctagacatagttacttgagtatatagccaaggaaatcagtttgttgtgaaaatacagaagatataagcgaaaacaatagctgtacctttcgagaaaactgtgttcggagtcgacgaaaccaactgatgaagaagttgtcggagaagaagaaactcgatttcagtgtagagaaaagcgattttggagacggagaggaaacaaaaacgccgcgttttattatttttcaaaaacgtcggcgttttaaaaggtggagtaaattaagcccaaaccgtcgaagcctgtttattttttccacaagcaaaatatggcttcagaaatgtttgatttggctaaaatcagagttttataaagtttataactaaaaagcagaaacaaaattcatgataacaaaaataaattaaaatctgattcaacatattttgcattttctctttgcattgttaatccattcttaggtatgcaagttttcaatatttggttgtgtgtacatgatgtttattaatatatatgaacacaaaataaaataacaaatatataaaacctgcccacactatcaaatggacttgactaatatggttttatagtgttgaatctgtgatattaaaatgacaaaaacttataatcaagcgtagaactctatatatgagatcaaagtttgaactttgaagtttgatgttgaatttggtgaacacattgctcttacaactctagttagaagaaagttgagtattgggattattatcaagaggcatgtattgcgccattatagctcttatctctgagtccatatatgtgtgcacacacatacacacacaaatcaatcaaatatgtgtatatgcaatattaatgaacaaagtattatacatgatttgagatatctgattacccgagttctgtatttatatacagcgtaagctcctaaagcagctgcgcctaatcccattattaatatccatatcactccccaacttgaaactcctcttgcatgtttatctgtaca

SEQ ID NO: 32244 - DNA, 1025 bp, Arabidopsis thaliana landsberg
agagaaaacacaacaaaacaggtgattggattgaaaaaacacatataagatctaaaaatggaagtagaaactatgaaaaaaaaaacccaaagaaagacaacacttaaaatagaaactctaggaaagaaatcaggaaccatagatgcaagcatcagcaacagaatacaagagatggaagagagaatctcaggtgcagaagattccatagagaacatggatacaacaatcaaagaaaatgcaaatccaaaaatatcctaactcaaaatatccaggaaatccaggatacaatcagaagaacaaacctacggataataggagtagatgagaatgaagattttcaacttaaagggcaagcaaatatcttcaacaatattatagaataaaacttccctaacctaaagaaagtgatgcccatgcacatacaaaaagcctacaagaacttcaaatagactgggccagaaaagaaattcctcccgacacataataatcagaacaacaaatgcactataataaagatagaatgttaaaagcagggggggggaaaggtcaagtaacatataaaggaaggcctatcagaattacaccagacttttcaccagagactagaaagccagaagagcctggacagatgttatacagacactaagagaacacaaatgccagcccaggctactatacccggccaaactctcaattaccatagatggagaaaccaaagtattccacgacaaaaccaaattcacacaatatctttccatgaatccagcccttcaaaggataataaaagaaaagaagcaatacaaggactgaaatcacgccctagaacaagcaagaaagtaatcactcaacaaaccaaaaagaagacagccacaagaacagaatgccaactctaacaacaaaaataaaaggaagcaacaattacttttccttaatatctcttaatatcaatggactcaattccccaataaaaagacatagactaacagactggctacacaaacaggacccacattctgctgttacag

SEQ ID NO: 32245 - DNA, 505 bp, Arabidopsis thaliana landsberg
  unsure (1)..(505): unsure at all n locations
attaagcgagaggtcattctcgactgctgatctgaagcttgagttgcagctttacaaggtccggtttgtgtttttcaccagaaacttgcaactggccaatcgcgaagtcaagcatgccaagaacattgctcatgcaagggactcttatatggctctcctcttggaggcccagcttgagtatgctcatgggaatcatccaaaggctatgaagcttttgttggtctctggtattcataaagaagcagggacttcagggatcttcaacaacaaccttggttgcatattctatcagctttggatgttatcaggcttcctctgtgctattctcaaaggccctaaggagctgttcatcacttagaaatgagaaaccagcgaagacattctctctctcacagaataagtctatgttaatcacatacaactgtggtntgctttatttggcatctgganagcctctacttgctgctcaattttccagaaggcaagcaatggttntccgccgaca

SEQ ID NO: 32246 - DNA, 1072 bp, Arabidopsis thaliana landsberg
aaaaaacaaaaggaattcacacatatctctatatatagacactgcagctcttaataccatcttaatttcaatatccaacaataatcaaacagagcaattgttctaacctggcggataattttgtagaaaacatcaagagttcccttgtactgattatctgagcatacagatgcagagccagtaattctacacatccctggagcagaattacttctcaaatcatgtaccaactgcaaatgcaataaccagaagataaaaatcaatgctttagcaatccagaatccatttcaaaactaagaatcagttagcaaatataccgtggaattcgtgtcgaaacaaccaagacgacacgagccttgatacggaactcctgcagcctgtgcttgtaatctcgtctgcttattacaataaaaagaagctcaaaatcagattttcgcagacaagtttccaaagccaaaaagtgtggaaatttgtttactttcgaaccttaacaacatcgagaggattgactatgaccgccgatataaaagcggcgcctccggcagacaaagccctttctccaaatttcaaattctcattcggaatcgatttcgatttaggatccaattgtgcttcttccaccatcaggaaaaaacaaaactcgatcacaataactttcaatttcaataatccttcagccaatcagattctccaattttcacgtcgcacgatggcggatgggggggggtcgtcttagggctttccaattttgcatggaggagaatgcaagaaagaaaggaagaaaaatcttcggaaggtgattcgttgccgttgataaatcatcaaccaaagacaaaacacatactaacactctttgccgtttcaaaacttttgaccacactccctgccgtttttgactaagccttgttttcacattatgggcctcatatgggcctgtaacaccttttgctagaatgagtttgatcaataaaagcgtcgctggttttacttgactgatggaatctctgccgtttttaaggcttgaagaccaaatttaatattttgtgaccaaagattacgatttttataattg

SEQ ID NO: 32247 - DNA, 505 bp, Arabidopsis thaliana landsberg
aaaataatcatagaagagtaaaagacaaagcagcaagtatcctaagcccattctcctaattgtttcatgcttatgaataacatataaccaaagatgccaaacatataaaggaacatgaaaatagtgtgacattacactaaaagatcaagccaatgtccaatgaacgaaagatcagcctaactaacaacacatgaatgaaatatgaaattctgtaaatccagattataagtactcagtaatgccatctcgctttagcttttcaaagccaaaaatgaagggattgagtccaaatttgaagatgtgttctggttgtcagctgctgactctgtaatggcaccacctctatgagtagcagtagctgtggctctcattgaacttgcgaaagcccatccccagtttctgttccccatcttatgattatgatgatgatcaaccgttgatgatgttgtagatgatgtcgtagatgatgatgtcacgagcataaacccagcatatattctaccac

SEQ ID NO: 32248 - DNA, 1234 bp, Arabidopsis thaliana landsberg
gcacattcacgaatcactcacatggggaaaaggggtagtttatctttacgctttagcttcacacgttctttatcgaatccattattatcagatcaaacccatatatgaattatttttttaaccatgataatttacaagccaaagactgagacaagcagaatggttaaatcacaattctcaactagctagcttaattggcaaattttatcaaatctaaattcccttacttattataataattaaaaaataaaagtcaccgacacaacttccaaatacaaagtctccatcacctccaaaaaaaacttgttgtatataaagagcaagaaaaagagagattattgtttctctctaagaaacaacatcataatttagaaatcaagtaaaacaaaaacgaatgactcctttgaagattatggacatagtgattgcggtaatattcttgataatattcatcttatgtctcttctacttttgttaccaaaagagtcagaacaacggccggaaagaggccggtggctgttgctgaagcgtcgaggcggctaccaccgcacgacttgtcactcaaaccatttctttcaaagatttttatgattatatgtatttgttttcgaaatatgaaagatgctctgtagtttgggtttgtgtgtgcaagttgtagagatgaaacaaacatagacatgaaacaatttgttttgttgattattttacatcatattttactatatattgcaaactactagattttgtataatttaaattttataacgtttaatcgtagaacatatatatagtgctagctgatatctaactttgaaaactaatattaatttgtaaataatctaagtattttatcccaaaaaaacatgcaaaaatacaggattatgatattcataattgttactatcatatttatttattttggtttgggtaatgttttctcaatctaaataaaatgtgtaacttctcttaaattattttcaagctatcagattattgctatttatgatggttaaataatagtacttataaaattggttggatcagcttcagcattatctttactttccacttgatagaaaactatctagatatattcagtccaacaaaatcggctgataaaagaaaaagagattaaattcaattgaaaataagaagaaaaaaattcatattcttacccagaaaactatagtaacgcagcatctaaactaagaaatcggtataagtacataactaa

SEQ ID NO: 32249 - DNA, 659 bp, Arabidopsis thaliana landsberg
tgattttattagttttataaagaaaaagacgattttcagttctttttttttttttatcaaactgataatttttattgaaattaaaccttaaattcactcaagaaaaaggaggaaatacaagataacaaggcaagaaaagcctaaaaatactccaaaagaagatacataaatgcaagacacagctttataaaagaagcaaaacaagatcaaaacatgatgatccaaaagacttcatgagagactccatccagtccaacccaaaggattacaaatacctttaccattggcaattattttgttgtcgatgtaatttaggaagtgcagtctttgattgtggttatgcttcctcatcttggcatccgttgcctctttcttttcccaaaacattttttttgtttggagtggtttggactatcaaacgtttccaagaaacgatattcagttctaaacatacaaattaataaacaaatgaaaattatttctccatttctataaccttgataaaaatttacaaagtttaggggaatatatattacttgtcttttgggagaaaatcagaaaagaaatcgaacactcgtgcaacaagaacaaatttaaattcaacgctcttgctttttataataagccataaaataatgagatcccaacagtataattac

SEQ ID NO: 32250 - DNA, 1017 bp, Arabidopsis thaliana landsberg
gggttcaaaagtcttaaagacctttataaggaaaatgcgtcgagtattttgctcgagagcctcggttgggtcagtgtcaacatgttgagtgattagctcgaggacattagtatctatgaaagtggaaatggttatgaagtacatgtatgagggtattggttacagggatatgaaagatccatgtgcgttatatggttatagtattcatatatcaatagtaaagcgacatcacgtgaaattttttcttaatgtatcaaaattccaccaatttctattttcatttttgattaataaatacatttcactttgatagtatttagtaaatattgatgaataatcaacagaaacaaggccgtacgagaaaagttgtatactctcactattatattttattttacgacacaacaaaatggaaaatcttaagtcaaaacgggtggcaaaaatgtgtaaaaagagaggaagaatcaatcaattaaaagacacaaagcagacagtagacactcttgtcttcaccaccgccatgatcgcgaccaaatggctctctttatattttatcacaattttcttaaccgtttgtaacaatctctctttgaaaagtcaaaccttttcatacgtctcacgtgttcttttttcttcacccaactcatcagcgaaaataaaaggtcaaatctatgttcctcgttcgttccttctatgagtaaataatactaataaactttattaaataggggcagattttttctttttttagcatatagttatagggacagctttacaaagagtgtgtaataactaataatatttgtattttccgtgttttgacttttttaataattgtgaatttttgacatctcctttatatttaaacccaacctcctttctctcttcctcctaacttattcaaaccaattcacatcttcccaaacccaactactacaacttgtattaagaaaaagatatattcccttagcttctttgatcaatatattcgtcagggttctcgtcaaagtcctcagc

SEQ ID NO: 32251 - DNA, 3267 bp, Arabidopsis thaliana landsberg
  unsure (1)..(3267): unsure at all n locations
ttaagatagtatatatatctatggataaattcaacttttcacgttaaacaactcgttattttttatatgatataataaatgagtttagacggtaaatataaatatatcacataacttataacttatcacaatacaaaatgacttagcatgatataattataaacttcttgatataaattttttttattatgttaacctaataaatattaccgagatatttgttatcatgttatcctgataatacgttatctgctaactattctgatgcatgtatttttttacatgattattcggtcacaagtcaacttttttgctattcatgctaaatattttgttactttttaataatagtgttatcgtgttcgcatatatatcagtctttaaaatctaatcattgatttaataactgaaaatttgtttatatcgtcaaatatattattaacatattaagttggtttgtacgttatatcatttcatccatacatcaaactccatctatatttgttaatgatattatttcaataatgcagttatctgctaattatcctgatttttatcatatttatttatagggatatatttgtcatatagattttagttgaaaaaaagttacttaaataaatggttttaatgtgtacatgcggatttttatctattctgccatcatctgcgggaaaaattttcattttgccaatctcaaaattgattttcgttttgaattttttttaaatagagaagcagaaggatattacgaaataaccttgttaagttaggaaaactacaggatccaaccacaaatccacggatagctccaggatccgacccattgtcactgggttttaccccaaatcaaaacttttaacctaactaatatttttcgaaaatcaatattgtcgctttctcttctccgattaacttaaacggcgattattccggcgattcttggaaaatttcgtcgttttctcttctccgattagtttaccgtcaccggtttcatctctacttcttcaccaaatgatttcgctaagtcgttaccgctgctgttccaaaccgccgacgtttgtcactgccgtcgttccaaaccgccgatgttcgtcaccgccgtcgttccaaaccgccgtcgtttagccgccgttaccgctatactcttgtaagtatcttattagtttataaagtgaacggtttttgatttgaaatattagatttggtttttgttgtgttgatttgaacggtttctttgattgttgtgtggtttgcaaaggaattatggttcgtgcaaagttagtcactcctacttcgagtgagagtgaagatgagagggtcccgacccgtgaaatggatgtgaaccgagaagaagtggtagaggaaaacaaagtggaagacgaaaactgtgacgaagagcatccggaaaaccttaacgaaccggaagaagaaaaatctgaggtatatacaaatatctgaaaattttatgtgaatattgatatagtgtatagggacaactataaaataattagtacaatttaatagtatagttttgtgtgattggtgcatggatatacgttaacatgatcaatcatacattggtttgcattagaaaattgacttctgaaaaagttgataatgttgttctgagataactagtacaagtagtacagcgaaatattaattttatggttgtgtatgaattttcaggaaattaatgatgaggagccaattcaacctcaggggatggaagaaagccctgaagaagaggaaaaaagaaggggaagaagaaaaatctgaggtaacattaatttctgaaaattgtgtttgaaagtagtgtatatggacaactagaaaacaattagtacaagttaatagtataggtttatttgattggtgcatggatttatnnnnnnnnnnnnnnnnnnnnnnattggtttgcattagaaaattgaattctgagaaaagttaataatgttgttttgagataactagtacaagtagtacaacgaaatattaattttatggttgtgtatgaattttcagaaagatgatgatgtggaaccaatgcagtctcaggggatggaagaaaaccctgaagaagaggaaaaagaaggggaagaagaagaagaatctgaggtaaatggttatttatgtaaattgtgtttgaatattgaaagtagtgtatagggacaactagaaaataatgagtacaacttaatagtattggtttgtttgattggtggatgcatggatttatacgtgatcaatcatacattgatttgcattagaaaattggattctgagaaaattttataatgttggtctgagataacgcgaaatattaattttatgcttgtgtatgaattttcaggaagatgatgatgtggaaccaatgcagtctcaggggatggaagaaaaccctgaagaagaggaaaaagaaggggaagaagaagaagaatctgaggtaaatggttatttctgtaaattgtgtttgaatattgaaagtagtgtataggaaaatcaaaaccctaatttcttttcaatccaacccaaaacttaccagagaatttggatctggcgggattagattcggcgtcggcggaggttcgtcgtgttgttcgtcggcagaggttcgtcgtcagagaagagagaaggagagaagaaaagtttttgagagaaaaaaggagaagaaggaaataaagaaagagagagaaaattttgtaatttaatgagaaagattctttgaattaaaattgaaatacatagtgtgaacgcatagtgtgacacacaatagttattatggtaataaaagtggaatgcgggcccagacaaaatactgcgcattagccatagttgtgccataagttattcagttgtcccgtactcaatttatttgtactttgtggaagttttagtatttagagttggatttcattaaggaaattaacttttagttggacagatgatataatatgtttaataataagatatcatgatttagttatataagtttccaaatatatgcgttttgccatggttatgtcaagatggtccaacatgatacaatgcataccatataatgtaagaagtgttttcagaattggtgagtataatatgttcaattgttttttagattgtatgataattagtataagtgattaataaatgttccagaacaatgtatcgaaacattttccaagtatgaaactttttctttataattatgagaaaaattaaaaaattgcctcatttttaataatatcatattttagtagataaaat

SEQ ID NO: 32252 - DNA, 2528 bp, Arabidopsis thaliana landsberg
cgggcacatattcgaacatagagcatttggagatggattcgaactcggtcgcatatgtgtacataaagctttcggagctagattcagacctggacatagagttcgacctgaaggcagatcccgacctctttatccgcttatttaaaagagtgagtctcgattcctacctcttttccctcgttggtgaaacattgagtctcgagccacagccggagctcatatctctcatctatcaaatattctcactcgtcgtctctatgtattcagagtggaaaaggcttattttcctttaccctcaagtacatttttaattgaaaaaaggaaaatttcaagtgattgacgaagaagtctcgtggagcagcaatggcaagtggaagtgtctcccttttaactggaagaaaatctggatatctgaagaaggcgttagtcatattcgctgccaaacttgcaatggcgagaaccatggagaatatgaaaaggctccagttgtgatcaaacatactcttcatccaaaacattccctccaacttgtcttgttgaatggggacacaaccagggaatgttattgttgcgataaagatctcgaagaggtattttattattgctcggcttgcgattatgctatgaatattgcttgcataaagagaccaagagtattgtctttggaccaaccgaagtggcatgagcatacacttgctcaatttccaagaaagacttctttaacttgcaacgtttgtgccttgacacattcaagctgtccatttatatgtgtcccccttgtgactgtgtggtccatctaagatgtatcgacttaccacgtgtcataaggatctcacggcatcaccatcgtatctcttttaccccttcttttgaccaagaaagattgtcttgtggtgtttgtcaaaaaaacatcgacaatgattatgggggatattcttgcatcaaggagggttgtttgtatgcagcacattcaaaatgtgctacacaaagaaatgtgtgggatggtaaagaacttgagggagagcaagaagaagaaattaaagaagttgagccatttgtcaagataagcgatggaatcatacaacattttagtcatcaacatcatcatttgagacttgatgacaacataaatagagactacgatgagaacaaggagtgtcaagcatgcataaggccaatctattttggtaacttctactcatgcatgcagtgtgagtttattctccacgaagaatgtgcaaatcttcctcgtagacaccatcatccaatacatgcacatttgctaactctagtaacagagtattacaatgttatggtccatcgtagccaagtttgttcagcttgtccttcgttgttgagggcttgtttcttctataagtgcgatgaacaagactgtgatttccagctacacgttcagtgcgccgcagtttctgagccgctagtccatgaaagtcatatgcatcctttattccttacatccgaaccatatgaggcaagactttgttcggtatgcaaaaaagaatcatggcttcttctttccacaaaagaaacattcaattgcattgaagagtgtgattttgctttgtgttttggatgtgctactttacctcaaaagttaggtataagcatgataagcatatgctcactctttcttatgatgaagacttcagtggttcacaagaaagtggtccgcatttgtgtgaagtttgtgaaaaacaagcaaatccgaagaatggagtttatatgtgcaatgattgtaacgtcacactgcatgttgaatgtcttcttggaaaggagatgtatatgatgcctattggagggctcatttcccgtaacgtaaatgttgatattcttcccaataatcgtctcactcgcaacatatgccaacgttgccataatcgttgtcaaggaaaaataatcttcaaagcacgtgacagatcaacatttttatgttctttgttttgttgtctgacgaagagttgggtggacagagacacatagtccaaacgaaacgattatggcaatagagttatgaacatactagatcgttgtcggtaatagagttatggacagcttgcttaagacgttggtttgaaatagtagaaagctaaaatgaaaatttccttgattacgttattacttgttcttgtctcttttgctgaacatagagatatgttgctcttttctatgtatctatttgctttctctttctctttgcttccttctcataactaatgtttatttggggcatatatatatgaacttctatatataaaaagatgacaaacattacttcaagtaaacatatactattccacgagagccaatgcacaattttggcatcaacttgtaaataaagaataatggggacaagcaaaaaaaagtcattagtattgttattgtcctcctcccttgtgagaatgagatgatcccacaacttgcttaagtagtttgaccttgttgaaatctgcagggcaatagcttttctctacttcccaagcgagctgtgacattccattgaaggatga

SEQ ID NO: 32253 - DNA, 1515 bp, Arabidopsis thaliana landsberg
  unsure (1)..(1515): unsure at all n locations
gattaatctggattatagttttggatttgggaatagaaatttcactgtatttagagatattgtttaggaaatggaacttttgagctatgtgaatttgtgattatgtgacattagaaccctaattttgagaaatctctgtgtctctctcccttttggtacaggagttatgaacatgaatttttcgttttgttcaacatcttctgagttatcatatccaagtgagaatgttctgagattttctgttgcaagtcggctgttttctcctaaatggaagaaaagtttcattagtttaccttgtcgtagtaaaactacgaggaaggttttggcgtcaagccgttatgtgccagggaaattggaagatttgtcggttgttaagaagagtttaccgagaagagaacctgtggagaagcttggttttgtgaggactctgctgattgataattatgatagttatacattcaatatatatcaggctctgagtactattaatggaggtaacttcttagcatctatctttctcttttgtttgtctctatatatgcattctatgtcttattcaaactctttatttgtatgatgtgtagtgctttctgtcgttattcggaatgatgagtggacgtgggaagaagcttaccattacttatatgaagatgttgcttttgataatattgttatatcgcctggacctggttcgccgatgtgtccagctgatataggtatcagcaagttaatctagtttttgttgaaagtttgtatgatttctcattcttcacttttgctctgcaggaatatgtcttcgtcttttgcttgaatgccgtgatatcccaattctaggcgtctgccttggccaccaggtaatattatcttcataaagatggctgcacttcatttgtttagtgcttcgtcttagttctctgtaaaaaacaacatgttttggcaggcactaggttatgtccatggagctcatgtggtgcatgccccggaaccagtccatggacggttgaggtattgaaaaatgtgattagtatgcaggaatttttctaatgctctctctggggcttataataatcaccttcttttttgaatttttgtcaactgaaacaagtctttaagttgtttatatttggtcatatctcctccatttctcatttctaagtgtctgctagatactgtactcaccatttccatctacttcttgtagtgggattgaacatgatgggaacatatcgctttctgatattccatccgggagaaactctgattttaaggcaggtcatctacttttttatatttaacattcattgatcttctcagatacagagaacaagattttgttgcgccattctgcaggttgttagataccattcactgatcatagataaggaatcactaccaaaggaacttgtgccactcgcgtggacgatttatgatgacactggctctatctctgagaagaattcctgtgttcctggtgataacactgngagcccacttgggaaccgatctgtcattcct

SEQ ID NO: 32254 - DNA, 1215 bp, Arabidopsis thaliana landsberg
atctaagggagatattcaaagaccctaaaaagaaaaaggtttttcctgggatacttcaattccattacaaaaggtctaaaatatattttctgtgctctgaaatctgtttatgtaattaggtaatgcatggagcagatcgagatattatctggcttcaacgggacttcggcatatatgtctgcaatctctttgacacaggacaggtttgattttgtttcagcgatgatcttctatttttttctatgacatttcctgtaaaacataggagatccagtatccataacatacaccttttgctttatggaagaagaatgatggcaacatattggcttttgaatttaatatcccgctttcttcttctcttttcctttatgcctggaaagagaaaattagaagttttcttccgatcaaagtacactgaactaagctattttgagaatggttttagctaattataccatcaaagggataactggcaacgatttgcacaactctggatttttcttgtccttttaggagataatttcaaccccctcctgaattttagtaacttgtggtatgtgttgtaagacacaagtcaattggtttagttgaaaagctttggatctcatactgtggcgactaagaagcatacatgatacatgaaagaaattttaattatttagcttttttcccctaagtagaaacaatttgattttttcaggcctccagggttctaaatttggagagaaatagcctggagtttcttttgcagcatttttgtggagtgactgcaaataaagagttagtactagtcctatctggattttgtatcactctcgtctatcactggacttccaaattctgatttgtttattgctgtaggtaccaaaatgcagactggagaataagaccccttccagaggaaatgacaaggtcaatcttctctgtcctttgtcttttcactactgttctggcctaagttgacttgagctcacatttttggatttccctgcagatatgcaagagaagatacccactacctcttatacatatatgatttaatcaaactagaactgcagagaatggcaaaggatgacgcgcatactgactctcctctacttgaggtagtcatcattaaactatgctgaaaagtataatattcctctgcatgttggtattttgcatgatagatgtataattggctttgctaggggctggttgggtcttactatc

SEQ ID NO: 32255 - DNA, 702 bp, Arabidopsis thaliana landsberg
tttattagatattttcagtcaaattaatttttttataaaatatgggcctttttaaaaaataattcagaaaatatcatggaaccatgggctactgcccttttgcccatcctatttggaccgagcttgttatcatcaacttcgacccaatgggtgagtcgtaaggtgtgagggtcaagactttttttatttttgaagtaaaattgatatataaaaaacccatattttataaaacaaactacaattagcccaaaattatagttcaaaaccccattttttgttttgaaaataataagcctgattttgttttttaaataaagctttttatagcaaaaacaaattgggtaaccttacatctctaattttatttgggatggggctgattatcatcacaaggactatgcataaatgttttcaataactccatatcaataaaaaataatctggtttgattgcttttatccagctaactaaatttcacaccaaatgttgaactcatcattgttttttctagattttgcatgattcgtttgttcaagtaatcaggttcgactttcgattaaagcctaaaatctcatgaaacaaaggttttaggcaaagaactctctatataaatatatagacgcatcatttcataaaaagtttatttccgaaaagttgatggatatccgctttaggtggccagttcgatcctaatttcctaac

SEQ ID NO: 32256 - DNA, 481 bp, Arabidopsis thaliana landsberg
tttgtttaaatggcattacagaaataataacatgctaagtcaatgtcgtgtaaatagtgtcaaatgaggaaaaagtaatgatgactttgatgaacgttatataccaaactagtccttaccagatcacacatatcacaaaatgtctaatgtattagacaagactaatcttcatgagctctcgattgctccaaaaatttccactcatgatgagaagctttacgaatggctaaatgcggcatcttcttccacagggatctcgtcgagtccgcaacagagattaaccctcacgaaaacctatgagaggtaagagcggttgaagacaaacccaacaatgattctatcaaggtcgactaaagaggaacatgcaatcgttcatttcatagatgaacattatggtcaggggtgatggtataaacacagaatatgatgtgtccaacttcaaacagattctggaaaattacaggttcgtctttgatataca

SEQ ID NO: 32257 - DNA, 1555 bp, Arabidopsis thaliana landsberg
gatttagcgagagcttcggctgttggggctgtgcatctattgtgtctgttggctccgtttaactataaatgggaagctctccggttcggtgtgattctcgctatagtgactagtcttagcattacattttcataccataggaacttgactcacaagagctttaagcttcctaaatggcttgaatatccattcgcttactctgcccttttcgcgcttcaggtaaacatatatcgttttgaccaaaaatattaatagaactaatatatatccacaattatctttgcatcatcttttcttcccagggtcatccaatagattgggtgagtacacataggttccatcaccagttcacagattcagaccgtgacccacatagtcctatcgaaggattctggttcagtcacgtcttttggatattcgacaccagttacatcagagaaaaggtaacaaaaattttaaagtctctacaaacccaacatatgtgaatcgatcttaagttattatgagaactcacttggaagatcagtaagtaactaaaggtgaactatacgtacgatgttgtaataatgtaacagtgtggaggacgtgacaacgtgatggacttgaagcaacaatggttctataggtttcttcgaaacacaattggtctccacatcttaacattttggaccctcgtctatttatggggtggtctaccttacctaacttgcggcgtggtaagcactctatttatttttgtgcaattaaatttttgtatcaaataaaaaatggattaacgtgatgaatattctagtaacattttgttcgttttgaaataaaaattccgtgatgctacaacaaaaaatgaattcccgattattttctaccattcacgtcattcataaaaaaatacaagtttttggaaaacagctctgctatatgtaaacatgctagaaatatagttactaaaaatagaacatcattaatctatttaaaactattttctagcattttatgttatcttgcaaaacttttttcaaataaattattgctcttccatttcacaattcatctaacatactaactattacaaatataatattttcttggcaacagggtgttggaggaacaatcggttacaatgggacttggctcataaactcggcatgccatatttggggttcgcgagcatggaacactaaggacacctctcgtaacatttggtacttaatttatagacctttaaaccttaaccgaatctgataaagcttcatcaaaattagtattaagtgaatgtgaaatggtgcaggtggctagggccattcacgatgggagagagctggcacaacaaccaccatgcctttgaggcctcggccaggcacggactggaatggtatcaggtagacttaacttggtacctcatttgtttcttccaagctctcggtttagccacggatgtcaaattgcctaccgatgctcagaagcgaaaaatgtctttagctcgttagtcacaagctctatatctatgaatctatctatttcgttaattatatgtgtaatcatcactcgctcatca

SEQ ID NO: 32258 - DNA, 3624 bp, Arabidopsis thaliana landsberg
gatcaaatacagaaatcaaatacagaagatggagagaaggagagttctctcatctcctggttgccgaagaaggtatcgaaaagcttgcgaaaagtttgacccatctctcaccccaaaaaagcttaaacccccacagacgaattttactttctcttatcgataaaccaaaacagaaattgaaagtgaagaaacacagagagaatcaaagctaagatgatgatggtcgatttctccaggaattgcagagagtttcccaagaaagcaaaggttgcgttttcggtacaatggattccttatgtacagtatagagagattccacttggtcttacatttttatttcggtttacaagtctttgaaattaagaccggtttataaccggtttgaggttcgattaattttgagatcctaaacatttttcatttaatagtaacaaatccaacaaaaaagattgtaatttagaaaacctaacacttgtcttttctaagctttccatttctcaagatctctacaaaaaaaattccatttctcttttcgagagccttcttcttataaaatataaaaacaagacttaagaatcggccatgtcgtcttgaatttcgctgggagctataagtccaggaatcgaaagcattctttgtctctctctctccatttgggcagcagcttcctcagcatataaatctttgttatcctgaacaaaaataatccattcattagagtttttgatgaaatgtggtataaaagaagataccaatctaatctgtagcaattacttatatacctgagcagaaaattccttggactgtataaggaagtcgcgtatgttatccttaaatctgccaacatcgtttctcgactcgtaaagtccattcacaaactgtgtcacctgttttgttgtgttttgtcagtgttttattttcaatatcagtggcaatcgaagaattgaaaatcctctggtttagttcacgttacctctgttgtagtcatgttggggaatgatgagcttagaagcttggtggtgtactcaagcacaaaggcgacattatttgaataaggatgcggtaccgttgcagcatcccacaatggttctgccaatgatccgctctcaacctaaatattttattgatccgttaattccgcagtgactagccaagtggtagatttttatacaagtagtatacgtattatttaccaggctaaataagtgctgcaacaccaacacatgcaacttgaacccaggcttgtggaaggtatcggtcaagacagcaaatacttcttgctcaatttgcagaaagtatgtttggtagaatttgttacaaaagtcagatttctgccacaagtcaaagagcaacatgttaaatcatgcacacacataaagaggctaaaaatgccaacaaaacgagaaggaaattccaaaacctgaaagtttttcagcatctcgagcaagagattgagcccagtttcagcgatatttctttcagtatgcctaaatgcccagataactgaatccatcactagcttcagttgctgatgaagagacacaaaaacaagacaagctcagggataactagaaaactaataatatggaaaggtcgttattagctttctaagatcacgcaaagaatactaatgcaagaacataatcaccaacctgacttgacaactgtatcaacgcacggaaacaaaatgtagcaatagcacgaagtaacgagaaaaacttgagacggtgctctgggtaatcttcaaaattcttagtaatcatctgcagaaaaagatgaaaacgaattcactagtcacttccatgtatgcatagaactacgactgagtatcacatagcattgtttataatatttcgaaagggtggactgatagcttaaaaatgcacatgtgagaaatattttcaatggaccatagaatcagttacctccaatgtgcactggaaaacagcttcaaatatgaggggaacttcatctcgcattacaaccttgtatctacacgagcacatcaacaagttgggtttagaagatagtagattttcatgttacatctagtggtaaaaattcttttgagattatacagtattgaacattttatgcatcaactagtttgattaatacatgatgataactaaaaatattcttacaagagcagaccaaacatcctggattaataatacaggctgatacagaaaagtgacatacttgttgattattgtcgcaaagagtgacaagacttctgattctcttgcatcaggaacatttcttgcatagtcgccaagtacttgatccatcattggtggaacaaactgttttccaatgtgtggctggttttcagctttatctaaaaacgtctctatcagcttaagaatttccctcttaacagacctgttccatcaagcataaagatgtagtattattccagtttcttatatagggacattaattttattttgtatataaaatgccctcctaccttaaaagtttaacaagagatgttctcgaagcgtatgggccaccattagcaatgctgcttgaaacgagttcactatacattctggtgcagtagaggaagaattaagtccataaacataatgagtgtatgtgtgtcttataacttttaactgcaatataagtgttgtataaagagtttacctgtaaacattcagcatatccaagaagatcaacgaaatttgagacaggaagaatgttcctagtgaagttgcaacgcgcgtatttgtctgcacaaaaatataagttacactatgcagctaaaccaaagtctaccgatgcaccagctcaaccataacgaatgctatttttatgtataaaattctaatacgttcaaaaagaaaagcaaatttcaactaaaactccgtaagattcagacctggaggatattaagcactgtacgtatcacaacttgatccttgaggatatctacactttgacgtgcctgtcctatgatttctgcccatttctacattgtataggggaacaattttagtaagctattacaaaaacaaaagatgaacagtaccttttaattaacatacctgattcgggagagccatcaacctctggaggtattcccccctcttctgaggatctgattctgcttggatcatattaccaacctggagagagagacaaacgatgagatcacaacaggaatagcttcccatctctataaaagagacacgactaaaaaacttactgattcataaaatgtatgaatctgatgaggttgaagatctccgacgattgtagcaaggcctgatagaagttcagacacaaatggctcactttctccaacctgaaaagcgcagaagaccctcattagatgataaagtaagaattaaaagtatcaaacgagcgaatacattacgtgaacaataacaaattttcgcttacacttctgaacaatttttaagaatgtgtcgcaagccatgtcctgaaaggaaaacgtagggtatcagcttgagcagattttagataagccagacaacccatagaccagagggaaagcaacaaaatgagtcataacatttttatgaatatgagatgtgataaagctgtgggatttaaggctccgacggtttaatagtaattgctgagtattataaa

SEQ ID NO: 32259 - DNA, 3498 bp, Arabidopsis thaliana landsberg
  unsure (1)..(3498): unsure at all n locations
gagaacaaatcaaatcgtgttcggttcgtgtttattaagtctttttataattcgaactgaattaacgacttgccaagttaccgactaaaattgcttcatatcattggttcgatgatgataataaatataaagtaaagctgtatttatttacagaaaattatggatataattatttctcttcaacctattattatcctaatattatttaaaaaaaattatagatgaagattgacttcaaaaataatccaaagatcacactgtattcaacttcgtaaaaaccattagacgcgactgcgaaaatatttgttatctgaccgtctttttctattttagtattaggattattttatatatcaataaactatcctatcttaaaagggaattgtcgcgatcgacgaataataagttacacaaaaaattacactttgattcatccatatacaacactggctagtaaaataacaaaattacaccgtaataataaaccaaattcagatcacattcttattggttttcacgatcatcgttggagcatttttattggtgtaccattagatcatgttatatttggatatagaaactattgatttgatcataagatattaggtcacagaaaaccttgtggcataaaaaatatatacatccgaatgagataaagaaacataaataagacatgttaatattacatcaaaatttcaatatatcagcataaaaaattcttcaatatatcaaagttagaaacactatatgatctgcagttttctagtctctgcaaaaaccttcccttaaaatatgactaaaaatgacagaaagtgtcataaactctctttctacatgatatctagaacttaattaattaaccaaactgtttcataaagtatattcggagataaacgtaacgttaatggatggagatgatctttggcaatgtgtaaaaagcgaaatattttacactacttggagacaacatttgtgaacaatccgtgagtgaggattcgatgccttttcgtactgaattatttaatcttacagatacaacttgtctttccaaaaaaaaatcatgtttaccaagtggaatcgtacacgtggcaatccatgatcgggaccacgtggaagctgagaagctgtagaatcttgttccgttagagaaaactgtttgatcttggaccaaaaatatgtgacaaatgttgaataaaaatccgaagagaaaacagtttgatcttggaccaaaaatatgtgacgaatgtttcatacactcaatttggaatgaaaggaaccaaagaagacacgggaagagcccatccctgccggagagacttataaaaatgatagacaaaaacgtcagaaatcgtttaagtactttgagtggttgtggtgttttgaagtataaggatgaaatgagagtttggtttgcatcgagagcttagagaagagaagtttttttttcataaaaagtttcaatcagtttgcagttttgtgtaaaaaacgtttttttttattttgaatataatttagcattaaattcaaaaaacaaatgtttcataaatcttttgtgggcacattcacnnnnnnnnnnnnnnnnntttgcatgtctattcatcacttataccataatgtccttcacaaagctagtgaaacttgtagtaagtgtataatatatatagaggaaaatatttcattttccaatgtgaaataaatgtttatatttgttcattgctattataagctttcaaactaagacctcaatttcttatgtaatatgacttcaatttttacatgtagttacattagtttataatgttcattgcagagaatctaatgacttcaagatccgatcattttggtaatgaacttcaccagaagtcattggtttagaattgaagttccaacaagtagatcatttaactagacttagaaagataactatacttcttcttttctcactcttttttttttgtcaaaatttcgattcacaatcttctaatacattttgtccttttgtaggtttatgagatttaggggttggctttgtgaacgttggacactcaattagttccaattaccgatttgattcattggttattatagtttattttaacgaaatcttgttaactagtttacatagtattagaaacagacaccatttacatagcttgtatagtttagaccatacaattttatagatgatctagtctatcaacatcacatgtttggatggtttccgatactagttacaaatccattcatgcataaaatgttttcagccattgggctgaaaatctctaggcccattatcttccatcttcggcccaaaatttatctcacgacttggtaaaatagtggagagacaacaagttgatgattcccctttgagctagggtttctagtttttcaaaaccccgtcaggctcatcttcttctagcaccttcttcttcccttaaagtattcaactttatctgaatttgaccattttctcttcatttctccgactaatttcccttcatttcgatctttaagcatctgggtatctccctttctccatctattcatcggaatttgcgcttagattttaaatattttgaagctttttttgggatagaggagattgaaaatggggaaatctggaggaaggaagaagaagagtggtggttcgaattcgaattcaagtcaagtcaattcatctgaaacttcaggattatccaaaccgtcaacgattgttaatggtggtgttgatttcgatgcttcgatattcttgaaacgtgcacatgagcttaaggaagaaggtaataaaaagtttcaagcaagagattacgttggtgctcttgaacaatacgagaatggtattaagcttattcctaagagtcatccagatagagctgtgtttcatagcaatagagctgcttgtttgatgcagatgaaaccaattgattatgaatctgtgatttctgaatgttcaatggctcttaaatctcagcctggttttactcgtgctttgcttagaagagctagagcttttgaagctgttggcaagtttgatttagctgttcaggatgttaatgttttgttgggttctgatcctaatcataaggatgctggtgagatttcgaagcggttaaaaactgctttgggtcctcaccaagatttgcagagccgtccttcacctgcagctcttggtgcttcggctgctttaggcggtcctattgctggacttggtccttgtttgccttctcgtaatgttcataaaaagggagttacttcgcctgttgggtctgtttcgttgcctaatgctagtaatggtaaggttgagaggccacaggtggtgaatcctgtgactgaaaatggtggttcggtgagtaagggacaggcgtcgagagttgtgttgaagccggttagtcattcgccaaaagggtcgaaggttgaggagttgggttcttcttctgtggcggttgttgggaaggttcagagaagaggatcggtggagccgttgaagtttgttat

SEQ ID NO: 32260 - DNA, 862 bp, Arabidopsis thaliana landsberg
  unsure (1)..(862): unsure at all n locations
tgtagcaagtagtagtagtatttcggacaaacaataaactctgattcagctgctcttcgagaatatcaccattttctcctcttagcctcttcaaagtaacctcaagctctcgttctctaccatacatagcctaagatgaacattaatatgtagactgtaccttttaaatataatattaccaattaaacaaataaaaaacaaactttaagtgtgtgaattaccagccatctaggtgattcaggaataaaaaataaacatatcatttggataccacatgggattgcacctagtcatagattgaaaatttaagaataagttaaataatgtgattaaagtatacatactataattttgttatgatttgagatatagttcatttagagaaaaaatatagttacttaaaagagctaatgttctccaatgaaaaaagtttcnnnnnnnnnnnnnnnnnnnnnnnncaaaactttgtagaagctgcaagttcaaacgcaagataacaataataaattaaatattctgaaattataagctgtttgatgtgaggggttcattcttacttgattgggaaaaaaaaatcctccacgaaaagctttgggcgtaatttctgctatatatacaggaacctatttattttgatcaaatcaaatggtgtaaaacgaaattactatatcaacactttataaaagtaacaaataatttgttttcaaaacagatgataaagttaattaccacataactaatgagaccaaccccaaaccccaagaagcctcgaccaatatttaacagcattttatccttgaaaataaaccacagcaaatgaaatgttaactttattaaaaaattcctaaactttgggaaaaat

SEQ ID NO: 32261 - DNA, 952 bp, Arabidopsis thaliana landsberg
ctactctcgttctttcctcttcttcttcttcttcttcttcttccctctttttatagctttcttaattctcctctattccttcggaggtcaaaatcttaacagtcgaaactaattaaatctttccgaagtaaagacaacttctgcttctgattctgtcacttttagttaacttttctttcccggcgactcaaagcttaattgtcgccggcgattttttgttctcaagcattgatcctaatgttttccaagtacagtttcattctttgtcttattttcttcttcgtcacagcattttccggcgactccagagctcttgctggaaacaatgagcagaagaacatctctggcttttctgggattgactttccaaatccaatgcgtttcggttctgcttcttcttccacaagcaacgattgcggcttctcttcccctgagaaagaacccaccaaggaacggaccggagaaaacaagacggtgaagtttcacttaaagcgccgggagactacgactacagagaaggcaacaacaaattcagttcttgagcttcaaatccgagatctcacaagaattcagacgcttcacaaaagagttttggagaagaacaaccaaaacactgtttcgcagaagcagaagaagaatgataaagaagttgttaccactactccggtggcttcttccgtggaggagcaggctggtcaattggtggcaacacttgagtctggtatgactctcggttctgtctagtacttcatggacgtgttggttgggtcggcaccaaaacacttctccttgattcttgatacagggagtgacttaaactggattcaatgcttgccttgctacgactgtttccagcaaaacggtgcgttttatgaccctaaagcctctgcttcttacaagaacataacttgcaatgaccaaagatgcaacctagtctcatcacctgaccctc

SEQ ID NO: 32262 - DNA, 4205 bp, Arabidopsis thaliana landsberg
taatgaagagctccgaaacgtgagcatcagggaggacattatacctcaagaagaaggggtcaatagagttgggttaatatgaacatttcatgagttggcggaggagagaggcaatcaggcaaagctcatcgagaactaaagaacacaaacactatttttacaactttttttttttttgtcatccctatttttacaatttcttaatcaaatacgattttctattctaaaaataaggttattgcaatgaccatgtaagctgcgtttcatattataggcctataattaatcacttttgtcttaatgtaatttaaaagactaatgacaaaactttcgttatttttcctctaaaattatgtcgttaaagaactcatattgagatgcatcattattatctagggattattagagaagtagacactttgtagaaaataatttgagaagtagacactttttttagaaattggaggaataggtagtttttattgggcttgtgagatagagatcatgtgagatagaaaaaatgtggctaaagtccaaaagatgagtcaaatactattgtacccttatatgtgggtccaaaattttaggaataatggatcaaataatatttttgaagcccaaatactatatttcgtagcccagttaaaataatttacacctcagatgtctaaactatcataagtatatcacatacgtacaccaacattagtacactatatagtacaccacatatatacactaacattagtacaccatatacgtatacctagaataaggaaaaccaaaagaactcatttaaaaaatgcaatgaagtttaaaactatactctaaagccaagatagatgtctaaatgcaatgaagttcaaaactatacctaaagataagatagatgactaaactcaaagaaaaatccatttaaaaattcaatgaaattttaaactacactctaaagccaagatagagatttaaactcaaagaaaacccatttaaaaaatggaaaaatgttcaaaactagaatatgtacaccacatacgtaaaccagcaatagtacaccacacaagtacacatgcgttagtacacctcatacgtacactagaataagggaaacaacatacgtacaccagagttaatacatctcaagtgtctagactaacataagtacaccacatacgtacaccaacatttaaacaccacatacgtataccaacattagtacaccatatacgtagactagactacatacgtgtatgtacacttaatagatatcagaaatgtaaaatctgattggtatacagtatgtacaccaaaatactttacgtacacctttaaaaattcagaaactttaaagagttttatgataaacataccttccatattgttacgaatttgacaatgtatctgagatttgcttctgagattgtagggtttatccttttatatgacaatgataatatattgtagatgtcaagcccatgagcaatttaaaattggagatgttattgggctgattttaatgaggcccagtttatttcatcaaaacaacagaagggtaaaattgtattttactaaaagctgtattagtgggagagttctattagagaggagagataaaagtacctattccacctatttctaaaaaaagtacccatttctcaaattatttttgcaaaaactgtctactttccaatttatctcttatttgaatcatgcatgagtgagcctcgcatggttttggtaaagtcgataaaaagatcagaatctgatgccaacttggaggcaatcctatggagctctactatgttggaacgcgagagaatgtcatcaaacttagccattatctcgtgcaagtgtggtcatgcgtgatttttcgtgtaaaatcgagcttaagcacatgttggatcaatgaacttcctaataagagagcgttctttgcgattaggtcaaggaagtaacctttgaagcgatcttcagctattgatatgactcttttgagtacacagcaaccgaatacgtcacccgctaagtcaaggattatttgaatcatgagcgagcctcgcatgatttcaacataataaccatgatttcaatacaattatgaattaaagtgatatatttttgtagtctacaaaattatggttattatttgaatacaacacaataaccatgatttgaatcgactgtttaaatttggagtttaccttcattgggcttcgtttataagcccaacccaacacaatctaaaacctcacgtgccacgtgggataaaaatatcctaagaataaataactcaaacggtcgaacaaaatcatgggccctaatttgatcttatccgttagatctatcatctcacgatcaacggagaatagatgaataaacatgtgaatgcgttctcgatctagaaattcaaaattctcgccattaacggctctctctcaaactctcaaactctctctctcttcccttcttcttcgttactttgcccgaaacactgactgttgcagaagcagatttaattcttctttagggaatcttcgaattggttagcgcagagagatgaagcatttcatgatgccaaggaacgctatcttgcgtgatatcggagagtcacaatcgccaaaccctagcttgacgaaatcgaagtcacaaaggaagattaaatcttctaaagagaatgctccacctccggatctgaactcgttgattcctgatcatagatcttctccggcgaaattgaaaagtccattgcctccgcgtcctccgtcgtctaatcctcttaaacggaagctgattgcggaagctacggcggataatggagtagcgattggggtttcagactctggtgtcaaggtagtctgagctttttattttttgtttttcttgctcagaaattggagaatgttcgaaggaaaaatcctaatgtcttggattaattggtctaattaagttccagatttctataaattaacaaaatgaagatgattgcttgtatttttagaagtttatagttactaaattgaagagaaactatattatgttttctgagtaaagtttaagctaatctctaagtctttgggcatatgtaggttatagtaagaatgaagcctccaagcaaaggtgaggaagaggagatgatagtaaaaaagatctccaacgacgccctcactattaatgaacagactttcacattcgattcgattgctgacccggagtcaacacaggcaggcatttagttttcatgattggggtttcactatacaatgttatcttatgatttatataggctaacaagtctttatcttttttgtattctttgcaggatgagatctttcagcttgttggagcccctcttgttgagaactgtcttgctggatttaacagttctgtttttgcctatggacaggtagtcatcatttctcaatctgtttctacgggattgaatttcaatttctcaagatgattgtaattctaacatttgttttcaccagactggcagtgggaaaacgtataccatgtggggtcctgcaaatggattgttggaagagcaccttagtggtgaccaaagaggtttgactccacgtgtctttgaattgctcttcgcccgtctcagtgaggtgatgcttcgtgttgtttcctttcagtctgtttcattatgtgagagaggcagaacattcaaaagttgattttttttgtttgcaggagcaagcaaagcatgctgaaaggcagctaaagtaccagtgccgctgttcgtttctcgaggtttaatgagtggattcaactttagtttttgtgcttatgatgttttcatttatcaaagcttgatatacatggttccctttcccatcttttattgcagatatacaacgagcaaataacagatcttttggatccgagcctaaaaaacctgatggtaaaaggaacttgcaatttcaacttgtttttacattttttaaggaaaaagaacctgggttcatcatttttaattaatattgcaccagattagagaagatgtcaagtccggtgtttatgttgaaaatctgactgaggaatacgtgaaaaacttgaaggatttgtcaaagcttctggttaaggtttgttatatcattatatttcatgcttttctactttgacagtagagtaattgctcaaacgtacgtacacttgtgtttccattgcatttctcctaaacttttaaagatgggtgcaca

SEQ ID NO: 32263 - DNA, 696 bp, Arabidopsis thaliana landsberg
ataggacttatcatatctgttttagacatgacacaagaatacaacacaaaacattcatttcctcacagttatcatcacttcaacaaaatctgggccatccctttagcatcttttcaaaaccacagattctctcctcggttcagtccccggcctaatctgagaacgaattacagaagcaaaactggaatggggagggaaagaatgaagcaatttgattttgaatcatgcctaagatttgagaccaaaacagttgaagtatcttcaagaattgattgatgagaacatctatcttcctttctttctggtatggtatacaacaattctttaaaactcttgctaaatgatgtttctcccaagattttgatctactcggtacaatggcaactcaacctgcaagaagacccattgagcacacattagcttattttccattacatgattgaatctgatcaatgcaaaactttcaaaaccatctttcctagttcgaaagatattcccaatttcacaagtctaacagttcttcaccgataaaaaattctcaaccaattcaagaatggagaacataaccctaaaaaggaacaatctttcctagctctaaagataattcttcatgtcacatgtttgacagatgctctccgatcggaactggctcccccctccagcatggaggaacaagggtcagtgaacggaaaagcc

SEQ ID NO: 32264 - DNA, 352 bp, Arabidopsis thaliana landsberg
gtggcatttcaggcgcctagtactcgaggcccttatttacgacttgtttgaagaactcgagttcatcgagggcattgcggaggataactctaggaactaccaactgtggtaaagttcataccttttcacaccttgtttgatctatgtgcttttgatcatgaaagtctatgagtgggttatacttgtgaaaattgtctgatgaataattttgaatcaataaatggatatcgtacttctccatagatgaaagttcgttcttttacacattgttaagtgcatagcggctcatatctgctgagtatacagcgttaaaacccttgagtgtttgtttcgagatcgatggtccatgcta

SEQ ID NO: 32265 - DNA, 899 bp, Arabidopsis thaliana landsberg
tgcctgcaaggtagaggatcccccagtcagtggaggggcaaaatgactgcggtcacttcggccctgtcgattgaggtacgcgcgtcaggataaggtgtcagacgatccttgcattgaatgctcctgcgatacggtcggttggcgaggcgatctggccaaggttgcttctccgtgaagcctgcccgagctgggcctcaagcgagtcgaaggtgctcccgttgcttgacgaggccttcgggcgaggcgtgaatccacctgggtctattgttcctgcccgaggctgggttcgggcgaggcgagattgtgtcccttgagtggacggagccttgacctgtattgcgcccatcaggcctttgcagcttgtgctgatggtggttacagctgagtttaggagtcttgggggtacccctaattatggtccccgacaagagcggatctggtgatccgtggtaacgtagttcttaacacgttatcagcatgctctacctcaacgttgttgcgggatcagatctgcatcaactctccatcaagccggcaggtctctggcctaagccgaactgtcctacgcgacatgcttcgatttatctctacgcaaacggtatgtcttactatgtagattcgatctactgtttatcacgatcgaggactagccatggcgcacctgtgcgtcgttcgtcgatcttccaccgaattaaaaactgttgcgctgccactgcctgtccgagacggttgggaaaaaaataaaatacaataaaacacatataagttaattattttctctctctctcgtcatgcataaaggtttactcgaagtaatggaagatataaatgcatgaaagctttttgcatagaaatactcatttgagatctatagtagcaaagacttcgaatgattaagc

SEQ ID NO: 32266 - DNA, 912 bp, Arabidopsis thaliana landsberg
tcggcagcccggccccgagattggtcccgctcaccaatgacctggccaagctccaactgccgccgctgcgcctctgccgcgccgccgctgcctctgcccccatctcgtcacagagaaaccgaagtccaccgcctcggcgcttcgttgggagaggcgctcggtagcctcggcaagcgtggtcctcaggaaccacagcgaaccccagacgtcggcatcgcggcgaatgaacgacgactttgaaggtgctcagatccgttagatcctgaggaagggaagcggggcgtcataaaagaatgccttactcgattgaaaggttatgcttgaaatccttacctggaggatcctgggaacgtccctggaaaagatctccatggtcgaccgaagcgaccccatcgctgcctcggcatactcacggagctcatcccaaggctgctcctcccgctcatcgtcaaggacgaagaggggttttggggcgccatgggtccagaaccggatcgcctgcggcgccgctcattgggacgcgccgcgcggggatgaggtcgccgctccccaagacgggccgcggttctgcacccccctcctccaaggcgtcgggaccccctgcagtcgacgcatcgggtaccccctcggctaaggaggcgggcttccgatcaccgacctcgagcagcggcacctcaaccatctcagcatcagcggcgacgggtggctccacgggcagaacggcaacagcctcgacagaagctggtgccggtgccgacaacacattaggtgggctcaaggcggcagccgcgccagcagtctcccccagcatgacggccgccttgacggaggggtcagcctggggagctcaccccatggcaactcggctgcctgggcccccgcttgggggcatcttgtgcggaggccggccga

SEQ ID NO: 32267 - DNA, 1125 bp, Arabidopsis thaliana landsberg
  unsure (1)..(1125): unsure at all n locations
gccttctccagaattgccgcaacccctcgagcgccggagaaggcacaaatgtccccgcgatcactgaggatctcttcaaaagcatcggcttctccgcttatccaatcaataacaccctcggggtcaccttggatgaaattctcttcagaagagtatgcacccaccttggcaaagctggttttcaatttccttacgcaatcgaaggatttctcaaaacatctctccttggattcacgaattcctcaacatttttctccagcctagtgtttgaccattcacttatttcttgcttcacttttgcaagttcaaaattttcattagctttggcaagttttttccgaaggtcttcaacttcggctttatgagcttcggattgagagttaaattttgcttcgtctttcttcactttgtccaccaatgaaagtagaattttatccttctccaaggcttcatttctcagcttgataacttctgatcgaaggttgctgttggggcgttcggcttccgaaggtcctcaaaaacatgatttaacaatgtttctggagtatgatacatgaacaggtacttcggacttatgtcaaaaccacagtgtgaagaagcacaaagaatacgaaggatggcgtagagccgaagctatgcgcaggggagcttcggcgcgatagcagaaaaggaaaccgacttaaaggggaaaagactatttagaccccgatggattactatagagttattagcaaatgaaaagggcatgggtgtaattttacatgggctacgtcccgtgcctatnnnnnnnnnnnnnnnnnnnnnnnnnnnnnnnnnnnnnnnnnnnnnnnnnnnnnnnnnnnnnnttgtatttttaccttctttcaagccgaaggtacatttgtaatttgttatcatttctatttttccatgataataaaatagaaatgatttaataataatatttgagtgtttatgttatttctcatactttatatgaatccttcttcattatttgttatgctgatgaaggtatgtccttcataaccttcgtccgatactcattatatcccaagggaaataatgcttcgaaggacgaaggactctaacgtttaacaatttatgtgttgccttgttcttaattca

SEQ ID NO: 32268 - DNA, 796 bp, Arabidopsis thaliana landsberg
cttcttcttcctcacacacaatttcactttccgattttataaaattgattcttctcttcttcttaaacccatgaagagttcatgatttcttaagctcgcagcataatcgatggcgaatttgagtttgagcttgtatctaatcctccggatttacgctcttttgttgctgttcaatgtctccttcgctaaaacacttaaacgagacagtaagctcttccaaatttgtgatttttagtcgggtttttgctttttctgatttgagtttttggttttggcagtgaaagctttgaatgagataaagaaattggtgggatggagattggtatactctcgggttggagatgatccccgtggcgatggagatttgcctccgtggtctggagttacttgctctaaagttggcgattatagtgtcgccgtctagctgtaatcttttgactctcattctcttaaagtttgaggctctgaattgatttttcacttaaaaatgggttgtgatcttttattgcagagaagcgtattcaatgcctatagttgggaatttcccaaaggctataacgacgctctcagatctcactgttttataagtttcactgactttgccatgttgttgaaaaactgaaaacttttgggttcttgttgatcttgatggaaacaattttattgctgagcgcatgattgattgtttaaatgaattcggattatggctggcagggatctgcataataacaaattaacaggtcctatttctccataaattgggccgcttatgcggctcatcacactgtaatactct

SEQ ID NO: 32269 - DNA, 824 bp, Arabidopsis thaliana landsberg
ccgtcggtgtcgcttgcattgatccgatctgcgcaggcccgacccacgccgtcgcgttggtgtttggggacagcccatccgcgacgtctttcacccccggtgagacaacgacgctccttgtttgattgcacatcggcgttattttcatatgattaattgtgtatgtgtgctgttttatttttgttttgtggaggagaggcaccccgtgttttgagtggagaagaaggcaagccactcgacactcgtcgatgttcgtagcgatgcacaaatcggaatcgccatcgtcctcacaaacaccgattgggtttgtttatggtgagccgatgcatgtcgctctcgatcgactcgtttaattaatttgaatggatgtgtgtaaaatgtttcggttatgcgcattggtaggatcgcgtttgcgattggagaacaaaaggttatgtgatgtatgtggtttgtagttgtctaattatgttttggtcgatgtggtgcatgtttaaaaattgtattggtatggattgaattttgtggcgaaagaaaaagaagtagaaaagagctcggatgtttttatatcttggtaggaaaaatatgcgatgcgttgtttgatgtgaaaagctaagttacaaaatgcggatgacgtttggtaaatgtatcgatatgtggttatgcgaaatactatagttgttttatgcaatgtgatgggattcatgattatataggcgagtatatttattcatgtggcgagtagtttagagaacgctagttgcatagagggtgaattattaaaacatgagtctcggagttcatatattagtggtcacgccacatag

SEQ ID NO: 32270 - DNA, 659 bp, Arabidopsis thaliana landsberg
  unsure (1)..(659): unsure at all n locations
aaataaatatgcaaatcctatataacactttcaatgttattctattagttagagatttattttttttttacgcaaattaaataactaacaactaataattaactataaaacaaagtgtattgtattgcaatttgtaaaaatgttcttcgggtttatataatgtctaaaacatacaactttataaaacgagtgagtattgcagatatcttactgcaataatgccgacaaaaaatataaaagtaaaaatcttactgcattaggtatgctttcgaaagttaaaagttttcaagtggcaaacatttgtccgcctagacaggaataaaacaaaaaaaatattcataaaaccaaaactgttgcttttactaaagaagactttatgctacatttttaacaaaaaaaaacaaaaaaactttatgctaaattttatattttaaatgtgacaattaacaggtaacaacacgctggaaaaccagcagagatattaaatccggttaaggcttaatatttactgcttacatttccagtgacaatatagagaagctaacattaaattatatgaacatgagattaataaactcactatagtaaaataagcaggagacatcacgtgaagcgtcngatngttgtcataatgtcttcattcgaccgcaacgcgatga

SEQ ID NO: 32271 - DNA, 340 bp, Arabidopsis thaliana landsberg
  unsure (1)..(340): unsure at all n locations
tatcttttatttcacttagatttttttaatatttatttagcctataaaccagagaaaagtttttcatcatcttttgtccttagaactaaccaatctttcattcctcttataaaaacaaaacctactttacttgtctcttaacgataacaaaataacaaataattaattctgttcttggtttacttaatcttctttctagttaagtatattcttnnnnnnnnnnnnnnnnnnnnnnnnnnnnnnnttaagtatattacaagtcacccatttcttaaccaacaagcttctgtaacctaaaaagataatataatgaaatatagtatttgttttagaattgtac

SEQ ID NO: 32272 - DNA, 6280 bp, Arabidopsis thaliana landsberg
  unsure (1)..(6280): unsure at all n locations
ggatggatcaagaaactctgtctgaggttgaagctattctcgagcctgtaaagaatctgacatggccaagtggaatccatcagaactaaaagaagctctttgtgtttctggtaaactcttgtcttgcttcttgtaatgcttatgcattcgttgttgtgtcattgtgttaataagagtgtaagtttggttggtatgattaataaagtttcttagatatcaaaatcagtcggaacatctttgatcgaattgattattagataaattacagcggagggtgagacttgggaagaaattacaatatgtccatttaaaaaacacaagaaaaagactaggaaaaatctccaaatctccatcacaagcaactaagttcaatagcttcttggaacctcttgtcatacgtagcgggattgccaaatagccaaagactaaacttcgaacgagcagaactttccgatgagtttctcgccggaaaaaggcatttaactatggaggctgacggttccggtgtggctgtagtctgcagagtattgtttgttgttatctgctgagttagaggaagagggagcatgaacatcgcagctgatgaggccattgataagttgattcgaagaaattgggtgcaaattggagagattgcatttagatgtatatattatgagtggagaggatagagaatgaagggagtaggtgtgcgtatttttctttgggaccaaggaaggctgaaacagaaatttccgttttatatttttatccaaacataaccgacgggaataaaatatatccaaatttgaccaatcagttcatgacacgtatgtagcacaacatgctaacttgcgcaaagacggtggctaacttgtgccaatgataaggtaaagaacttgtgacgacgacgataccgtgaagtgcagaaactctctattgtcgtggacttgggaccaacgcagagagctgcatgcaataaacccacatggccacactacctcttatacaatcttattcaaataagaaagagtaaaaactggtctctcttataaattaatctgcatacaagaagtgagcagcaagtaacaaaaaaacatccgaaaattaactattgctaaatctcaagatcaaagataattgtgaatgatcatcataacaaccgtactcaatcaaattcctgataacacgctctctctttatccatttcatgaaaattgattttttcgtttttgtttgattttgtggcatgaagattggtgttttcgtatttttttatgtgtcctaatattagttaattaatatccgttcttcttcattaagcaatgctcttgggctcatttaggacttaaaaatgtttcttgtaatctcaatgttcgtggggtttttggttttctagcccatgtgtgggttgattaacttttaaaaagattttaacttatgggaattttttaaattaaagccaatgatatattacaacttattggtgagaatatttgaataacttgttggattattatttataacttattggttcataattatgatgtgtgaacaagtttttaaggaatcttggcgaatgacaaaactttggaaagaagagaagaataaggaactccaaaaccaccgatgcttcctctcctctctcgaatcttctaccgaagcagattcctatacttttgtcaacactttttaagtgttttgcgtttccaatgtactttgaagattattctcaaaactccataaaattcttactgaaacagagacattgtttttataattttaatataagaattatcttgaagctgtgttctttggcaaatataaatacacgtcgactaggacaacacttgcgctctaaagattgcaaatccgtgttctatctctctcaacaattatttcccctgcttccaaagctttgacaacatttctattcaaaaactttagttttgagtttttttttcttgtatacttctccccaaaatatgagcgatcccaagtatgcatatccttacccggcaccgggaaattacccgcaaggtccgccaccgccggtgggagtaccgccacagtattatcctccaccaccgccaccgcctcctcctccaccaccaccacgaaaagttggttttcttgaaggactgtaagtgctctgtttttatgtttcataatattagtttgtttctattattaaggagtgatctgttggaatttataaatgaacttcaatgtttgtcggtggtaatgtgtgtttttggtttgcagattagcagctctgtgttgttgctgcttggtggatgaatgttgctgtgacccgaccattatatgctttgattaagttttcaggaaaaagtatgtctgttaatttcattatgcttatgaggtttatacaataattgttgtgatatcatgtgactactactttcttttcttgtcgctttaattaggttttagtcttgccttttatatatgtatcacaaatttctgcagctcatcaagtaataagagaatttattctgatttctgattagtagttatagattatgctgaaaatgaaaatgcgtgtgatagaaatgttggatacagatacgtggcagtaggtagatatgcattttatccgaatacggaaaaaatggagaatgacgtgtccacttcttaaccgaagagtaaacattatcgtgtcttggctcttagccagtgatagggactagacaacaaatcggattttggtccgcatctatacagaaagtactgaggtgggtttggaatttgtgaataccgctgtccataactaactcttaaccatatcgtcaatttccagcataatctgtgactcgtataggggaatgttccacgtctcgttgctcaaaaaacgaagaaactacacaatttataaggtcgtgtggaccgatcatgtaatataacttattgattaaacattccccaaaaaaaaatttagagtgaaaggtgtttgcttcccgttattgttgcagggggagcatttgaaacaaattggaaaaaaaaactatatcacctttcactcccttatcaagtcaaccaatgcagagtccaaaaggaccaaaacccacactgtgtactggtttcctatataaattcttcatatgaccaacacataatttaataccaaaacctgaaagagccattaaatgaatgaaatgcgttatcacagtcgagagatattcgagatatttggatcatgttagaatccgtatccattttggtgttgatctcctgctcttctcgatcttcttgtcgtacttggagatgccgagtatgagctgcttgtcgaatactttgaagatgtcagtaactcctgatgttttnnnnnnnnnnnnnnnnnnnaatctgcttccagtggcaactcatctagtgtctgtttcacccacaaagaccacatggttacatgaatatcaaacataaattcttcatagaaacagttttaagtgaaaacaagactttattgttcaacggaacaaggtttatgacgattgatgtacagagttaggttttgctgagaacataccctgtaagcttgctgaagaacgtggagagtctcttgtgtgcgtttcctcttaactgctatctcatctggctcttgcaacatttcttcaaacaagttctccctgcaccagatgaaactactagtcagttttaagagactactaatccaaacacagatgtgaggaattaaaaaacacaggcatcacctgtaaagcttcttgatgaagacgttatgcagctcacgttttgtgtggtttacctgaagcattaaaaagaaaagaaatggtatcagcatcttcattcttcagagtttatttactgtaagatagcaacaagattattacacacaagatggacaaacggcttttcattttaactctctcaaaagacaatttcaaagggcaatcaaatatcaaggtgatgatatatcgtacaagtttgagatactgcaagaaacttggggaaagggatgagggtacttgccaggaaatgcatgattgcttttggtaccgagtcctcaatattcttccttacaatgtcatagtatgatcttagtaacagctttgttatctgaatctcaactgcttcctgttctgaatgggtttcggttggcctcaagacagctgggggcttcagaaaagcaaagcaaacagtatgagtcaaataggtaagcatgtattggcaatatgaatcatctaagatggcacaggagacacacctcctttagatagatcatggataagttgtgagacatatcctcaacagcttcactgaatggtttgtttaataagctatctttagtaactgctctagtatcaccccctcggaaaattgaagggataccccaccttgtatcactcgcatttgctatcatgtgtcagcaaaaccacaattaaaatctactcaggattataagctattagcgaatcgagacaagatacatgtttacgcagtctctgaaacatagcaagagattcatcacacagccaaaaatcttccaaaacacgaaatggaaggctaaaaatgacagcggtgagaaaattaccagcaggttgagctttttcagcatctgcagatacaactccctatgaacaatcatgagttaagtgtcaaatagtcactctttatcttgaaaatgtctaatttgctcatgggtccttagggctaaacccatagtgcacaatgatatacagaattaattatatataacatgtaaaatgacaatacctgatcagtaacaattccattagcttgcctgccgagaaacgatctagatttcacttgactcgtggaagaagatgttctatcaggctccacagtgtcctgctatatcaacttaaatgtataagaaacactgcagagtatatatgaaaccaaaaccaattttaatgtatttgctcagagtacttcatacctttggtcgtgccacaggatggggaatcctcgaagacttcacttgatgcattgcagcttccacggccttggttccaccaataaaatttggatgtgaagtgtttatgtaatccatctgcaaacgacattcaagaaattatgataccatcactaatactttagttcaaagaaactaatcaatcaaaaacgaggaaatcactgctcaagattaaaaaaggtccctaatcaaccaacatattagtctgggctctttatacacaatagagaaactcaactcaacgtaggattttcaattcattatacagacctccatatcaatgatatccccgatcattgcttctgagggttcaagaccttctcgcaggaaatccccgataacctcatccatgcgctttcgtaggactggaaatcgttgtaactcattcatcatacatctatggctaatctgtagagaaattcaaatttatgaagtaatcttattacttattaacaacaaaccaaaaaaacactcacctttattagctcttcaaaaatgaaccgggcacactgaaggctaggatctaacaaacgagatatctgcctcctaacaagaacttcaaatggaacctatgcataattgaacgagatcaagggactctaattagatatcctgggaagtggaaaaggcaaggaaacatatgaatgcttgaaagccctgacaaccaggataacttccatatatgctgaaacatgttaagaaacctacatctggaacaaataatgcagatcttggaccagttgcattctgaattgcagtccgaatatcatcatctgtcaagtcctcgcatggatcaacctcctgaagaggcaatgtgaaggaattcaatcagtctaaatttacagagatccacgagctcaacgtcagaaatatactacattatttccatttggataatgtcactagctaaactaagataagatagaggagccaatgcttaacaaagcagtnnnnnnnnnnnnnnnnnnnnnnnnnnnnnnnnnncgtaaacatcagtgtaccatccgaaagtacgcaaaagtattggcgaggttaagaaacgggaatgtataacaactgttcaacctcaaggaaaaaagtttaacgattgcccaaacgaacctccaaactcttaacaaagattgactggaaaatatagtgaattcttgctcctccagagagctctgacgtagacatttcttcacttttcccttccagcaatgaagagtatgctgttcaaaaaaatttacccatgagactcactatgaaccatagaaaaaataaaacaaatgtcaatggtctcaactgaaatatcgtcttcacatattaccttcacagtattggagagaa

SEQ ID NO: 32273 - DNA, 712 bp, Arabidopsis thaliana landsberg
tgctctaacgtttaaatcatcatcatggtcaaagctattgttcttgtctcgggttgcttcttaacctctctctaatcaaagaaattctttaaaacaccttttgctaagtaaacatcgcatggcatacaatttgcagtgaagttcgggttgagggtctggagacgcttgattatctggacaacttgatgcgtagagaaagattcacggagcaggcagatgcaattacctttgacggcgaggtaatgtgacgcacacgaatgccttttgtttttcgctaaaacttctctacaagcagaatctaatgtatcgtcagtaaaccctgtaggttgataaagtgtacttgaacacgccgacaaagattgccatcatagatcatgagaggaaaagaactatcgagttgcgaaaggaaggcatgccaaatgcaggtgcgtaagaatttgtttttccccttgatccaatgggtaaacaaaatgtgaagtttgtttcttatatgttggtggtatctttggtatgagcagctgtgtggaacccttgggacaagaaggccaagagtattgcagatatgggagatgaggattacacaacaatgctgtgtgtagattctggcgctatagaaagcccaattgtgttgaagccacatgaagagtgcaaaggacgacaagaactctctatcgactactcaagctactgcatcaggtcagctcgatccact

SEQ ID NO: 32274 - DNA, 2163 bp, Arabidopsis thaliana landsberg
aagtagggtgttgagggaaagatattttcgttatagcgactctttgcatgtaggagcatcaaatcgaccgtcttttgaatggaggagtataatggtagctaaaccgcttcttgtctcgaggcttcggaggactataggatctggaatgctgactcaagtttgaaaagatccatggattctcacaattcctgcacggccagctaagagcattcttgacataagagatcctctactctacgttaatactctatgtcaatgatttaatcgaccaaacacacaaagatgtggaaactggaccgtctccaagccttgatcgatccctttgatattctactcattttatggattcgcccaagtcgtacctacttgagtgatggttttagctagtctcacactaaatccggtaattatactgttaagtcaggatattgggtcacgagagatctatctcgtcctacttgtgaccctccttttcagggaccaggtgtttcggtacttcaggcacaagtatgtaagcttaaaactacgcggaagcttatgcatttcgcctagcaatgtaattttggttgtctagccacttgtcaaaatttgacttatcgtcatatgggtacgaatagagggtgccctcgttacggagaaacagaagagacaatcaaccatctcctttttcattgtccatcttcctgacatatttgagcattatcgcctattctttcctcagggaatatcttccctagaaattccatcttctataattttgacttcctttttctggcgcggccgagaatttggaatcggagaggaggtgttggaactctttccacggatactttggtatatctggaaaagtagaaatcgttttttttttaagaacttcagggaacctccccctgaaactttggctctggcacttaaagaggcagcggtgtggaaacatgcaactctaaaagaagatgcacacatccgcctaattttttttctaagctctcagagcccgcttacccgtctctctgaaagtcaacttgatgcttaatggcatgccgatgactctcttagcgagcatggatgggtccttgttcgacaagactcaatcctccatctcgggctcaagagtgctcgtcgaagcttatcaccgctccatgcaaaatttgactccttgttatgggcaatggaatgcatgatctccattggcgatacttctagtacttttgcttcagattgctcagacctgatttctatcctaaacaaccaagacgattggccgacattcgtagcggaattggcttcttaccgatctttagtttgttttttcccttctttcaatattagatttcttcctcgtagttctaatactcgagcagatagtttagctaaaaaagcttgggcttgaaacagtcttttctcccctgtaagcacattggttcctgaatggctttctctagcagagagtctcttcccgataacttaaatataaatagtgtttctgaaaagaaaaaaagatacaaatatgagattacttaaagagttgcttggtctagtgttttgaataaatttgaatatgtttgttgttttgttgtgtgaaggtccattgtttgggttcacgaaggcgaacgagttattcgtaggaagattggcacagttgggaatagcattttcactgataggagagattattaccgggaaaggagcattagctcaactcaacattgagaccggtataccaattcaagatatcgaaccacttgtcctcttaaacgttgctttcttcttcttcgctgccattaatcctggtaatggaaaattcatcaccgatgatggtgaagaaagctaaattatcatgtacttaaatttagtagagagtgtgtgaccttctcttcatgttgagacaaaaggaaatggacagcttaaattgttgtaatacttatatccttttgtttttaacttggaattttctgattatatatagttttattacacctaagtgactaggtgattgatatcatctagcatctcttaacagaaaaaaactgtggaattagaacagcttcatcatagtttttttttttgataaatcaaacagaatttaaaaataatatgttaaagtacatgttaggaacttatttgattccaaaatctagagtataaaattaatttgataaatca

SEQ ID NO: 32275 - DNA, 945 bp, Arabidopsis thaliana landsberg
gtatgaatgtgtggctgttaaggatttagtgtactaggtgtagggtaaccgttattcattattatattcctgaataaagaaattgtcgttaattgttcacccgtgtattagacataaagattgtgagaggtatatttaaagatgctcttcttgtgtaatttctcccattcttatagcacatccttctagaatatgaattgggagagtagatatttgtgcaacaaagtataaaaaagtatagaacataataatagtcgtccgtatataagcacgtaagtcaccaagtagttttggcggaaaaacttttgaatttaatttgggtgaatgatcaaatgtaacattttagtgctttttacggttgaattaataaacagtttgaaaagttatgaaatatggtattttggaaaatttaactagaagggtaacaacatattgtaactttaggaaaaccctaaatagactgctaattaaaattctcaatcatcattatacatataaaataaataatcaaatattattggtttagagttataaaaaattgttaatcacaaaaatgatgattgagaatttaacaaaaaggtatttttttaatatgtataaaaaacttagaatttagatcaattagaagcatgcagttgtaattgtaaatcggatcgcgaaacgagtctgaaacctaattttgatcacataaaagtagttaattatatttaatattttctaccatcatgcattaacaaatggtggggtgtgttagatttatgagacaaaatagtaaaaggtttgagtatatgacaaaaagaaaatggtataaaagaacatattacattaagttgatcacaatttgaacggcctttgtctcactcgaaactcttttctctctattggcttcaaccagcgcacttgcttcttactaaagaagggccttttctcatggaatctctcatt

SEQ ID NO: 32276 - DNA, 2159 bp, Arabidopsis thaliana landsberg
gcaatattactatattagtaaatgtttttatatagatattgaacaattattctagagatgtttggttttactattttgaagtaaattgaaacatatgataaaaggtgatcaggaaacaatttttggcaatggggtttaataatgctactgaggcatatttgcgtataaaagagtaaaaaagagtttaacttcaggcaaatctcggatgagttgcaagaaccggttcttctccggctcagctgaaatctccggcatggttttctcaatctgtggtaatagctttgccaattgcatccctgtggccagaccggtctgcgtttccatctcctctactaacgcaacggcacaacacttgagtgagatctctgctacatttgaaaaatcattgctgcaacatgaaaacaagaccaagaaatgtttaacaggctacattgcaacattcttgctttgagcattgaagcagaaacgaggacaaggctttaaagaagtgaaattgttcgtcttttgcgggttaaagagcagagattttttttaccttgcgagtacttcccgtgtctcggttatgagtagatgaaacttggtaacagttgcatcagaagaggaaacatcagtggttgcgtcttgggacatcattagataatctacccagtggtgtggacttcctgtgctcataaacacatcgagaatccgcatcacagtttctcgaagagcacttgtggttaacacatcctttaactgctttctgcaattaaacacacatagttagatttcgctatacgttcataaaagtatagtgattcttcataggcatttgagtttgaggcaccataaaatcaatcttcaaggatgagaaacaagggagacatctttgataagtaggtttgtaatgtaaattaccccttgagaacttctttcactgcgttctgcatgttagaaatcaaactcggcatgccactggtcgcaagaaaatcagcgcttgtcaaaaacttttgttcatcatctctctctatgagatctagttcgtcctgagaaaaaaacatatcaaggaaatgacgttggtaaagattgtggtaatccagccaagagttatatctaagaccaatgaatacactaatttcgataattttgaaaggaaaagatgcaaaatatcaacttctaccccttgaaatctcaatttgaaattttgatatctcaagatacaatgcaacaagtagaatgaaagtacacaaaattttatcagaatgaccaatttgctagaagtagcttaacaatgattcttaagacaataaaaagagaaaagtaaaatgtcttacaagtaaatgggagctcccaagacctctagcagtgtcgatatataaatgtctgcccaaaatattgacttgaaccctaatgtacaaactaagcatagtgaccgaccaaagggacaagaccattctcgtgaaacctgaacacaaggaaacacatttaaaaagattgattaatgagaagatccaatgttgccacagagcacgagaagtacaagtaagggaacaacaacgcactcaaaattttgagctcattccagagttgaagcttctcataaggaatcaatattcctttgcctttgcttagcttatccataatactcgagacatcaatctcttcaactacacgactactcaagtgatgaattgcgtgaggcaatgtagtagtatcagcaatcatctgaatgttatcgaaatgtgccttcattctaacatagagcatagagagaacaaaaccaataaggactagaaatcgataaacaagcaaaaaaaaaagacgagaggttacaaaaactcaactgggttttgatgatctcgtcgttttcacgctcattagcaagctctcgttccaaatcagcgagcttacgagtatgggcattgtatagtttatagagcaaatacccacttcccaaacaagtcgtcgtcaccaaaatcttccttctatgtttcctccacaaacccctacagaaacacaatgaactttgaatcaatcgtgatgtggattaaaagaaacctaattgtcctcagttgcaaacgtatctaaaaccctacggaactagaaaccaatagcgagagaaaggaatacataaggagatcagaatttagaacacacctgactaaatccatgacctttga

SEQ ID NO: 32277 - DNA, 548 bp, Arabidopsis thaliana landsberg
  unsure (1)..(548): unsure at all n locations
ccttatgatgactctggaaaaaaatattttcagcagcaataagtatgatcgcttatctactcttcaaattactatatggcatggcagtgatgctgggtattgtggtggtagttttttttctgtttaatattttaccggtagatcccgcacggatgacacaagggcatcggtcagatgtacaatcattacaggcggtgcgtaaagagtttgggttggataaacctttaccagtacaatttgcctactatctcaatgatctttcaccagttggtatacatttaaacacaccggatgaacaacagcgctatcnnnnnnnnnnnnnnnnnnnnnnnnnnnnnnnnnnnnnnnnnnnnntaaaatggccctatcttcggcgctcctatcaaacccacaaggatgttgcctcgttgttaatggaagttgtgcccaatacaattatactggcaactacctacatgttgtttgctatgatcatcggcatattattaggggtggttagcgccgtacatcaaaatacatggattgataagctgcggtaggttttctac

SEQ ID NO: 32278 - DNA, 783 bp, Arabidopsis thaliana landsberg
taaatcctcctgacataaagtattaatagttatatgtttagataaaatcctgttctatactagtcttcagaagagtagtcaatccgctctatctcccaacaaagcttagtcgcaacactttcatggcaaggcgaatattcctgcaaacaacaacaacaacacaaattatatggtttgaacatgaatatttttggatccattaaaatgtcaaattgtcaattgtcacgaacctccagcttctttacaagctccttggcagtaggtgcagaaattatgatctggcgtgcgtttgtactgatgaagccttcttcaacggctttatcaatgaaagagagcaaagagttgtagtatccatcaacattgagcaaacccacctgcaggttttttcccccaaagtggaaacaaacaaagatcaagacattattatattttggttatagtgtgtgattcagagagcaattccaacagtggaaagtgaaccggtttatttcacttacaggcttgtcgtggattccaagttgtgcccatgctattacttccaataactcctccagtgttccatacccacctgataaccatttgcaagaacagatcaattttaaagtcaattacaaaatgagtcttgttttggaagaaagatcaaactgtacctagtttcaaatttgtacctaacgaatgacaaacatttttcaagctttacaaagtatctaagttagttagttattatgttgtacctggtaaaacaatgaaacaatccgagtggcgtgccatttcggcttttct

SEQ ID NO: 32279 - DNA, 727 bp, Arabidopsis thaliana landsberg
gatttatgaaaatcttgaaaatacaaaatagtaaagagaattcatgtgttcaatttttaataagttataaacatactagtctaactgaaaataaggacaacatggaaaagtccaactatgtgtatgatactacaagtggtcaactatgtgtataattccatttaataaatacaaatgaatattatttaggtcccacattttatggatgcgatgcaacaaaatacatttaagtgggtctcaaattgatatagggaaaatttaaaaatgtttaaaaattctagggtttcacactatttatttggcctttcttttatagtttcatcttcactcttcttattcctcttcgagcaagatatatagatcggcagcgaggcatagatttctttcttaaattacctgcaatttgtttctatatgagtctcgcttcggctaaacatcgtatgcatcaacgtgttttataataactgattctcgattttgggttctaatagattaattttttgataagtaggttttttttaggcctacttatgtgctgaatgtgaggttcagtttaattcccctacatacactaacatgtcgatgtagctataggggtgtcaatccagtccactgttattgctagcaatctagacgtgtacataagcaattaagtccagccagattatcacaatggtggatttctagtaacaatcctagataaggattcagtcaagcaaaacaagaa

SEQ ID NO: 32280 - DNA, 1312 bp, Arabidopsis thaliana landsberg
  unsure (1)..(1312): unsure at all n locations
atctgattcaccctttctgtctggccatcggtttgtgggtgatatgctgagcttcggattacctgggtcccaagtgtttcttgcagtttctcccaaaagcgtgccacaaacagtgctccccggtcagatataatggtctttggaataccatgcaatcttactatctgatcaacataaatttcagcgtacttctctgtcttgtgggtggtgtgcactggcaagaaatgagcagtcttggtcaacctgtccacaataacccaaatagaatcatggtgcctggcggtattgggtaatcctattatgaagtccatgcaaatgtcctcccatttccaagatgggatgggaaggggttgcaaagggcctgctgccttcaagtgactagctttaattctctggcaggtgtcacactcggatatgtacttggcaatttccattttcattctagtccaccaatatagagatctgagatcatggtacatcttgttgctaccagggtgcatagagaatttggaaaggtgagcttcatccagtatttgctttctgatctcagggtccttgggatcaaccaatcgatctccaaaccataaaattcccttgctatcctgtcgaaaacacttgtatttttctgccttttgcttgagcatatctttgataacctgaacacccttatcccgaatctgtgcgtgaactatttgctcttgcaatgtgggtccaccgcgatatagcttatgtcacccggagaaacaacttctaggttcagcttgcacaattcatcacacagggtggtaactcttgcatccatgctcatgcaattgcactgggcctttctgctcaaggcatctgccacaacattggctttgccaggatggtaatgcacctccaaatcatagtccttgattaactctaaccacctcctttgcctcatgtnnnnnnnnnnnnnnnnnnngatgtacttcagactcttgtgatcagtgaagatgtggcatttgttcccgatcagataatgcctccatattttcagggcatgaactatggctgccaattccaagtcgtgggtagggtagttctgctcgtggggcttgagtaagcgggatgcataggcaataactttctcattttgcatcaagacacaccctaagccttgccttgaatcatcacaaaagatgacgaaatcctggtgtatatctggcagtgnnnnnnnnnnnnnnnnnntaagcttttccttgatgatctgaataccttcctcacattttggagtccacgcaaacttattgtcctttttgagaagttcggtcataaggtttgctttgct

SEQ ID NO: 32281 - DNA, 1074 bp, Arabidopsis thaliana landsberg
ttcattttctatattcagaagtaaatggaaatcttcagatgttttttcttttcccttttttctttaagagagcatttatattttatttttttgctaatcagagagcatttatatagaaagattaacttagcgacgaggtcgatcattataattgcttttgaagaatttgtgtgcaaagttccgagagatttttagccattcaaaggggagtgaatatcggctttctagcccaacatggatttgaatcatcctccattttcagcaaatatcaaatatgcatttaaattagtcagattactttttgtatggagtttggtaaaagcattatatagttctagtggtaacgtttgcactgtttgatccacctgtttcttcattataatacaataatgttctatgctcagactgatttgtacaattaataaatctctgttgggtgaccatccaaaattgtttctagatttaacgttccgatccaacgaaaaatatgtcacaatcgaaacatgtaagacgtcaatatttaagttgaatatgctcctaagaaatctattttactttattttggagatcgactaagtcttgtcggggtatgggggtgagattctagactgaccgagattaaaaatacaaaactgagattggaattcaattattaaagtcatatatatttataaaaagtcgtatacatttataaaaattctagtttgaaaaacttatttttattttcagtatataatctccatttaaaaaagaaatttagaaactgaagttacttatatctctatgtaagtggatatatcttttaactttattattatgataatcaataataccacctgaacaacattttaatgttcttaatttcatcaatttaccatgaaaatatgaacatttatatacgtcatgatccaagatcattaagcttatgatgcaatcgcacaatgtctcagactatcgtctaaccttgactcatataccacttgttacttctttttttttgctaagaatataaatattttatataaatgaaaataattttattttttgttaaataaaatgaaaattgaaaatgag

SEQ ID NO: 32282 - DNA, 827 bp, Arabidopsis thaliana landsberg
gccacaaatcctcaactttgcttctaattcgctattttttgttgatttttttattttattttactcacttaatttttggggacttcccattttaatagctattttttttgttgattttatcagatataacatattattttgtttcttttctttatatcatacaactatatgcaattgatatatgtaaaaaaataactagatttttttctataaatataagattaactaaaactgaaagaaaatatatattatgtttaaactaggtataaatattttaggaaattaacaattaatcgaaaaatataagagagaattaatgatataaatcgttatgttcattacttctaataatttttggaaatcttaagaatttaagacaataacattctattgtaaataagtgtcaaatccatgatttatttcaaaaatatctactaaaatgtgtatatagataacaactcctcacacaaataatttgtaacatagtatttttgtgtcttgtttcctatatttaagttggtcaatcacctgtgatttatttttttagtaaataatctcgtggtttgttttctaaaaatgttttaatcaaaaatataaaacgtaactgccactcacacaaatgatacgtaacacattttgtttcgtttattctatataggttggtcaattattttgtgatttgcttttagtaaataatcttgtgattgttttctatataaacatttcaatcatatctttaaaccaataatttttttcgcttaaatgatatataaaatattatttttaatatatacatatataatacaagaaaagaatttattatattt

SEQ ID NO: 32283 - DNA, 903 bp, Arabidopsis thaliana landsberg
ggtgttgctcttatggttagccttgaaacaagcttttctctttctctttgtcttatcctcaaacttcaaaggtggtttcttcttaatcgttttcttctccttctccagcttttccaaagcgtttcttagcttatcttcattttcttccccttccatcttctctagctcctgttacaattataaaaatagtcacatcaaattcactaaatcggtagaccatagcattaaggctttatatagcgttttcatttccaaaacaacaaaaatcaaattttcaagaaaatttggcgaactaaaaatctgcaaaaaatacttcctaatgatacacaatagaggaatttaacttgttataacttagtcgtcttatgtttatagttgtttataccttgacattgctgatgagtttttgtaggctcatgagcttacgatgaggccaacgtttaatacccaattcgcggcatctcttcttcaaaagagttaaaccaatgttaagctctctagccgcttgagttatcggcatgtaaaagtacaatgagggggactccttcgacaatgtctttgaaacagaacaactagaaaaacattcttctctgcatctcctcttcttggtagttgaggtttcactctccttcgcaaaaccagaaactaacatcgtctcttctgcggtccatgaagcataagcatacacactaagtatatctgctcaaacagaacgacaagaatgagaagcgcacacataaaacccatgagatcaaacaaactacaatatacataccttcatgagacacaaaggcgatggtttcaagatcaggctaagccagccagcttgaggctgaagtaataacaatctcttgaggtagcacaatgaagcatctctccttccaactcgaagaatggatttgc

SEQ ID NO: 32284 - DNA, 868 bp, Arabidopsis thaliana landsberg
tacaacccaaactttagttacacatacacacactgagtgactgaaacatatatcaaacacttccaccaaaaattgttcccttttcgaccaaaatgaactatctttatcctctataaactcaaactattatcaattccagagttcgttaggaaattcgaagcgactctaatctaaaacaacagagcaaaacaaaaaaaaaacgtaacaatttggggaagagaagaacatatactcacagaaggagagctaaggatctcgaatttaatcatccgacgtggaaaggaccaatatctccgtttctcagagaaccagcgatctcatcagcgatagccacgcaagtgaaaacccaaccactcagagaaaaccaaaccattctcatcagatacatcgccatgcccagcggcatcgccatctcaaagcttttctgcttctttctctctctttcgtcagatcaaatgattggccggcgaagccattagagtggccaaaagcttggggaaaaaaaaatcaaagatgattcggtaggttcaaggatcttccaaccatttagattcggccacgtcttcgtcgtatttattcaccagccgacggagactcataattaaattcgagggcccacatgaagataaaataattaggatccgacccggttttgtatccggaacccgacccgacaggatgatccatggattcccgctccgttgcctttttcaatttcattttgaaattgaaattccccaaaaggtagattcttctttctctctctctcctctgagcaaccgctctctctctctagaaaaaatggctcctccctttgtattccctcaaattctacgagccctaaaagaagatccgggagataatcacc

SEQ ID NO: 32285 - DNA, 1053 bp, Arabidopsis thaliana landsberg
ttagtttgatcttctggagtccagactcttgagttctttgtatatattggatattagtccctcctcaaattttcacaaaatagaaacataaggtactctacccaattcattctatgaagctacaattattctgatacgtaaaccacacaaagactcaagaaagaaagagaacttcagaccaatttcccttatgaatattgatgcaaaaacactcaataaaattctcacaaaccaatccaagaacacatcaaaatgatcatccattatgataaagtaggcttcatcccagaaatgcagggatggtttaatatacggaaatccatcaatataatccactatataaacacactcaaagacaaaaatcacatgatcatcttgttagatgctgagaaaacatttgacaaaatccaacacgcattcatgataaaagtcttggaaagatcaggaattcaaggcttaaacatgataaaagcaatatacaacaaactggtagccaacatcaaactaactggagaaaagctggaagcaatcccactaaaatcagggactagacaaagctgcccactttctccctacctatgcaaatagtatttgaagtcctagccagagcacttcaacaacaaaaggagatcaagcggatacaaattggaaaggaggaagtcaaaatatcactatttgcagatgatatgattgtatatataagtgatcctaaaaattcagtcagagaactcctaaacctgataagcagcttcagaagtgcaatagctagatataaaatgaactcagacaaatcagtggcctttctctacacaaaggataaacaggatgtgaaagaaattagggaaacaatacccttcacaatagtcacaaataatataaaataccttggtgtgactctaactaaggaagtgaaaggtctgtatgacaagaacttcaagtctctgaagaaagaaattgaagaaggtctcagaagatggaaagatctccaatgctcatggattggcaggattaatatagtaaaaatggctatcctgccaaaagcaatcaacgtat

SEQ ID NO: 32286 - DNA, 568 bp, Arabidopsis thaliana landsberg
  unsure (1)..(568): unsure at all n locations
tttctaatttttattaaaaccttctacttggctacaatcgggatcggggaaatgatacataaacatcaacgaagatgttctccaagcgaaagaaatcttcgagtcaaaagtggtggaccaagagactgcaacctaacatcagccaccacgctctttgtggggcaattcagattttctttttgccaacgaaataaagaaatctaagggaaacaacaatctgatacaggagccagatagagacatacacaggggcctatctcaagaacaggnnnnnnnnnnnnnnnnnnnnnggataaaaaaaagtagtgagtttaggacaacgcaaacaaaagtatttgtataagaatcaatcctcttattccttttcaagatactttagaaaaaagacattccatcagagaaatatattggagacaaaaagaaaatcacaaacattgcagcaaatccaaaggatgctatagcctttctctctctcaacaagaaagaaacaatatgcatcacatctaccttcgactaanaatatttttaagaaagttattaaaccaaataaaacacaacccatttagag

SEQ ID NO: 32287 - DNA, 955 bp, Arabidopsis thaliana landsberg
taatcagtgaagatgattgcatcattgggtctttaagtttcctattgggccaaaacaggtacatatataaagccaactatattttgttattatttcagtccattaaagattttcggcccgttttatcgttgggaattcatctatattttcccagtttgatgatacacataacattttcatgtgtatacgataagaggcaaattcaaaatttgcaatcaatgtaaagtggaaatgagaagcatggtggctcaaatcaacttatctttccttggaatacaaactacaaatgatgtcggatttggcttccctttgaatttaccttttacctctctcttttttttttataggtaatgttgttattggacaaaaatgttaagaaaataaaggtgaatgataaattagaagagtacccataactattttgattatttaagatgccaaccaagctagaccactttccaacttttatagacaaagtgtattatacttttcacatgctttccaacaaggaatatggagcctttgtttcaaaaagattattgttaaagctcttaatcattctaaaaggtgattaatatttgaattattggaagtcattggacatataccaaattaatcaatagtatcaatggacatataacatgttgtgagactatatcaatgttatattccaagccacttaaaccaatttataatgataccatttatagataaacaatacacattattttcttagaattgggtctcatatataacactcacaaaggtgacttataaaaaatgcttcaaagatcctaatcttttactgtgcattcctcacaatcctatatgatatgtatctttctcctattcgggtttcggtctacactttttgttttacgaattttcaattaactcattaacacatttataacataaaatgatatatcacaaataccgatcaatctttaatata

SEQ ID NO: 32288 - DNA, 1173 bp, Arabidopsis thaliana landsberg
ggcctgcatgattttggaactaagctcttttagatgtcgaaactttcaaagccaaaaaaaagaaattgttctaactttccaagagaaaatatagacggcttaacctcaaaaaacttgtcaacatgaatgggtagactaccacctccgctaataccagcctgtggaaaccaaaatcatatcagtgttaactattaatataaatctaacaaaacgaaatagaaaatagaattcgcaaactaccttcgatatcccaatagacgaatgaattttcttgtagataagcattttggccaacatatgtaatggccacaacaaggcagcaattactctcgcccacaaccaatccacaaaagcaacaatatacattggaggcttttgctcttttgtcagacacataccctgtaaaccagaccaaaaaatcaaaacttcaggaaccacaaaaagggataatcagaaaaactcttaaaacaaactataacgtaagaacaagtgttaaagaaggtatcatgaacctcatatatccttttcatctccatatatgccatactgactttgatcaatgtaagtgctagaaatttacgagcagcagaacttgcagaaatttgcttttgaatcccactacagagctcacaaaagagagaaaagtgtttagcaatttaaatggttgaggatgctgctgagaaaaggtttaatgattaaattcattaaaaaaacttattcattgtaaatcttatgaaacaattttcctagtaaagcgcatacctgtagagtgtctcatatactaaaggaactgaaataagatagtgtggttgataacgcttgagatcatcctataccaaaaagcaaaaaaaaaaagtttctaatccaaagggaaaaatacaaatgaatgcttgactcagtgcaaagtctcaacgtctcccatttccaaggataagatgtttcttttgaaatgtcattgtgtaacataacatagaaagacttacctttaagaatcttatagacgtatacttttgctcaactccacatgtaaatatgaagtattcacaagcccgttcataagcatgccatgatggcaacatactcagaaatctttccccagcttccgcaggcacaaaatcggacaagtttattatctgtaacaagtaattcaagccaaacgaacaaaaaaaaatc

SEQ ID NO: 32289 - DNA, 5849 bp, Arabidopsis thaliana landsberg
ggggtttatagatttcttcttctaatgaagaacacaagaggcaaagctccaccttattgagtcttttacaaaacaaaagagaaagagagatagatggtgatcttcgagctcaagagttgcggcggcgagtcggcagctctcggcgacggctagggtttgcttttgatgaaggcacacctagggttagggcttataacaagtatttgtacttgagggccaagaattaggtttagaggtaaaaacgtcaatccgccggataagtaagtgatagggccagtcgtgggcatcagggaaggagccaaatgacggtggcacaatgaggaattgacttgggcttgacctaatggtcggtggaaagcttctcggagctgcccgggttcaagtctccttggccggatgctttttggatttattatttccaaacgaccggttcttgacatgtcctcactctttgggtcatatcttgcaaacggcttcatggattgcttcgatttgacttcgacgttaatcttgactcttctagctttccatgcatacctacatatctcgtttccgtgatggggaagaactcggccgtatgctaaacttctgaagtactggaactgatcgctttttgatagttttaggttcaaaactcataaaaccttcttggcacctagaatacgtgtttctcctcttcttggatcaagaaaggcaccaaattctctttgaaacataacaaaacaatagctaaaacgggctaaaaagtcgtgttatcatcatgtctttggaaatccgacgaactataattggaaaaccgacaaacatttccgaccatttatttaccgtcggaaagtctgtcaaaaaaggctttgttctcttgtattttatcatattcaaatacaatctgaaagcttttgctgtttagaaatgaacacgaaatcagattcttacgaatcacatacacatggaacacgttcatgagtgtgaattttttcccatatgtgagttttaaaaccatttttcctttccttttaatcgtcgtggtgctcatgtttcccatgataagtttttctcattagaaccttgtttgtacgttgagaacatactcccgtaagagcacacatgcttcgtgtcaacccaccaatcattagagtttgtcatcatttttgcctctgaatcgaccgcaacaaactgattttgacaaggtttgtgttacatgcatctccaacaatgtcctttccgtcttatggcggtagtccttggctgtatgttcaggctttccatacatccaacaacatcttatggcttcttcttgctgttaaaaccctttggtgaaatgaacggtttcttaccgttattgttcttcttgaagaccttgaatatggacttgtttccttcaattacattggctttgattccatagaacaaaactcagaattctcattcttacgattttcctcttcgattcgaagattgagaactaattgcttgagacatgtcttcttgtagatgctttagatagatcttgaaatccttccaagttgaaggcaatttttcaatgctccaagcaacaaaaaacatttcatttagccccataccttcatcctacaattcataagtgacaatctggatttcttccacgtgttacacatttacccctacattggtgtacatagttttatgtggtcgtctattttctaggttataattatcgatctttgctttgacaccctacaaagaccctaggaaacttaactttgagattctcaaaaatcgatttggataagaagaagattagaatcaatcccaatcattacaagaaatgttaacatcattagcgcaaaatatctgctatcatacatataacatagcgaattcataaatgctatgacatcggcagccatcgtagggataaaccctactatagcatcttttaattgctacacaattgacgaatactatagcgaatataaaacgctagtatgtatttacatatagcacgaggtgttttgttatcgtatgtcattgtacaatagctattcaattttgcgttaatatatatatatatatatatatatatatatgtagcatcaatttggtgctataatatatgcttatactatagctcttttgtagagcaataaattatttacttcttatatttacatgtggtgtaatacaatatttgaaaataaatatttggtgatatgatagaaatatagatcatttttttttgctattgtatatgttttcatatagcgattatatgggtttttgtaaaataattaattatagatttagaattacaaactagctataaatatgaacacatagaaataaaaatcatttcacataaagtctgactccatatcctaaagagtaaaagtttacataatcattcatcatacataacaaaagttctaattcaaaaaggcataaacatcccataagttttttccaaaatacataacaagtcatattttttttccaaaatacataacacaagtgatgattagcttagtcttaaacttaattaaaactagctaacctggaccaaagttactttgttcccttgcaagaagcactcttgtatcagatttgttatatcatcaacagatcaagttaaagcataagcaagacagtatacatatcttagtttcttaaactgatcaatagatgaccatcttatccattggccatgcaatagatgaaccaagtgaatctctcatatactcgatttcatctgatgccctccaaactgctgcatcatctattttcactatatccaccaaaactctagctgcattatttcccaagcgaacatggtgtaccttttggtctgggtcgactgaatgcacacgtccttcagcaaccacctgcttccttccactgatatccattaacttacacttctgattggccttgataacttcagctacatctttatgctgccatgttacaatataaaccagttttaatgtatgcagaaaaataaccatattcaatagctaggtaataacaacatacaaaataccggagatcttctcagagggagttgtgaatccagcagctgacttttcttgacaggagactttgaacctttagctatggacttctcagctatggcctttgaaactgttgcaacggattttgtaccttttgctgtagatatctcaggggatggcttataacctgctgctgcagtttgtgaacctgatgttgctgctttcccagacgctactgctttctcggatcctgctgacttgcctactgatcctgctgacttgactactaatgctcctaacttgcctactgatgctgctgcttccaatggtgattttcctcttgcagtagaagtctgaagtggagatttctagcatgttgcatctgcagggttttcaaatataactttgttgacaggccatgcaacagaagacattaaacagtcctcaagataagtcacatccatcgttggcctctatataaacgtctctggttgaagaactgcatcgacaaagacttttactgcctttgggcatagaggaagtccattaactaactcatttgcatcttgtgtcagccaacgaccctcagcaactatcacttcatcatttgacaaatcgagcagtttgcacttgttcgcagaagttgcctttaggacctgtacaaagcagtttgaaaacacatccaatatgaaatatatgtatcaatatctgcgtgttccatcaaatcatcaacatgctgactactatagtgaaaataaaggttaccgtaggagcaatgtcttctatctgtagctccttgttcgagagtacacacttagaggctggccatgcgatcatctgtccaacagcttcctaaattgtagacatttgcaatgcaggtctccagaggaatgcatctggctttgtggcagtttcgaccaagactttaaggtcattaggacctagacggcagtcatttactaagtcatcaggatcagatgacacaatacgcccctcaccaacgttttcatcattaccacaccaatcaaccaagacacacttaggatgtgattttttgttcacactctacaaaagtaaattagaaaccctgtcagaactgaagtaaatagaaggatgaatgcaatgatataaaagaaattacgcactcttgctgctgagttttcaccaatctctggttattgtctctgaaacgaaaaaatgtagtcaacatccatatccaataaatcagcaaaagaattgagctgctaacgaatatctctaacctggttcttaagtttggtaagttcttcttgcaactcattgacctgtttaagtaaatgaacctgcttctcctgcatatctggcatacatctagtcttgacttggaaacaagccaatttggtcttgctcatgcctctacccattgcccttagcctaccaggattgtcagggcctaaaagttgggagaggtgatcttcttctggatttgcagtgattgttggagaatcacttccaaccagctcacctgcttttttctggaaaacaagacatcttctcagctttctgaaaaccaattaatggagaagaaaatcacaaaagttacaagtttctgtcttacaatcttctcagctgcgtttgtattcactggtgtaccatccttttttgtacgcgacttgacccacacctccagccttgtcacttgggaagggtctccactttcaactttctgttggaaataatccaaacatcactttatagaataaagcaggagagacagaaaaaatgatagaaagcttaccatgtcttctgctagcctgacgattcctttacggctagtagtatgaggtatctgtttactcctcctctctttgtatgtatcactcacagcctagcaaaaacaataattaataataactcgttggatatgaagtgaagttagtgatacctctacttcaatataccttaaaggctgtgcttgtgttcagcttgacaaatttacgccaatcagttggtgatacattcattggcctcatattcatcttctgttgattatttccagccaagttgatctcccggacaatgcgagacttgtatgacctccacaacccacccatttgctttaacacagcaatcctttgaaattcttcatcaacctcaaaccttgcttgcattcaatcaccaatccaaaaacatataatcatagacctttatctgttctaagtttgataaattgctaactttcttccagttttacctgaacagatttccagagaactgttttgatgtcttcgccaactttcttccagttttcaattatgactggaacatgttctctgaccaatgttccagcatatgatgacagcttaactgaccctggaccatatggatctcccagaagattgtagtcaactctttctcgaagagtcggatctttggcgaggtctttcatctttgttggtcccctatgcctcttacgctttgtaggacgctcatcttgatcagacatttcaatctcaccttcaggctcctcttctactccatcaataccagctgcctcttctgtttgagtagtgccttcattttggggttcgtgtaccgacttctccacttgtgtgcttgtctgcaggtctgcttcaagctgttctttcatgacaggtttttctgctgctgtctggggctccacagtaccaagatattcaggttcatcatcatttgcttttgtggctttcttttttctttcacccttcttcttagctttacccatctgaattcacctacaatacagaaatcacaatcacattccaggtctagcagttctagcagttctagacagacagaaatcacaacggttctattagttctagacaagtccagaaaatgaaa

SEQ ID NO: 32290 - DNA, 663 bp, Arabidopsis thaliana landsberg
aggtttatgggctaagaccaaaactatatccatagagatttgaagccttccaacgtacttatataggatttggcatgagagcgaagatttctgattttgggtgtataaagctcgtactcgagggagtcgactcagttgagacattaacaatggtgggaaccttcaactatatattgatccatattatgttggtaagttagaacttaatctttagcttattatatgtataagtatttgtgttaatttaatcatttttaaaataaaattaaaaatatatattttcaaaatatatttgtaggttttaagagtgtcaaaaaaggcagatgtatatgctttcggcgtgattctaatggagttgatcacatgaagaaagtgaatgatgagactttgagtgttgatgaacaaaatctggtcatgtggttacgtccgaagattaaaatttcaacattcttgaacttggttgatggtactcatattaacggacaaagaaaccattaagagaatcaagaagattgcaaaattggctaaatattgcacttctcaagaagttgaaagtagaccattaagagcatcaagaacaaaatctggtaatgaagttacgtccgaagattaaagatacatgtcactacaacattcttgaacttatatatttcgtatttttaa

SEQ ID NO: 32291 - DNA, 489 bp, Arabidopsis thaliana landsberg
taaaaggctgattaatttacctgaatcttttttataatgcaaccgagaagagcaacaacagtgtaaccaaacttgcgaagaactgatccaactttgatatattgttgggatgcacatttgttgcaacgccttgtatgtcttggctcccactttgcatacattgcctatatacatatgtgtcaatatgttcaatatagatattgggacgatattcatatacaaaaatatcaaatgaatacatttatcaatgttcattagaaaagaaacatttttacacaaagatattcaacatatataattcaactagtcggattcgaaataaagattttgatttaagatggcttacgagcgcttcgccggcggatttagaatccaaaacagtattatacccgctggagactaggtcttcattatcagattcagaatctgatgttgcgttgtctgtcagcttctcctcaaaatactcactcacacatgctaacatgtatt

SEQ ID NO: 32292 - DNA, 943 bp, Arabidopsis thaliana landsberg
atacgcagcaaggacgacggtttcctagaggttccatatttgttcttttttagataaattttgattaagtaattgaaggatgaataaaattacattatcaaataagtatttatagataatgtttgcaaaatgcagtcaaagaaatttattagaggtcaaaatatgaagatgtgcttacaaaagcaacacattaatttcttttattctgttttggaaataaattgagattacatttgacttttaaaaaactaatattatcttactttaaattttgggattattgacttgtctaccacttttgaaaagattctttccaaaattaccacaattgcattgatctttctaaaactaccatattttatggcgctatactattttattgacaattttgcccctcaaggtgtgaagtttgtattagagaaaaatggcaacttgtgcccgagagacagctttgtgtgagggaagaaggacaaaaacgctgctttaaaccacctcatatgacgaaggacaatcatcaagggcaatgtccgcgaatttacaggaatgttgattttaaaaaagactatagaaaaagtaatagaacttgtcccgatctaattatattacccatcttgcatggcatgtcccgatctaatacctttatcgggaacaagttcaaatcgaatgagtaatataattataccggggacaagttcatattgaatgagtaatagaatttgattgagaacaaattacaatcgaatgaataatagtggatcaagaacaagtttagatcgtctatttgacttttgaaaatttattattgtggtagaattcaagggaaggaaagaaagagaggaataatatatttagagaggaaaaaaagagaagaagaaagagagagaaaacagaaaataaaataaagaaataatatcttatataataaagaagaaacgtatcggtt

SEQ ID NO: 32293 - DNA, 1982 bp, Arabidopsis thaliana landsberg
atacaagaaagggtctctctttccatataagacagtcttttaagaacaaacggaacatatgtcaaaatcaattgtgatacggtttccacttttcccttttccccttaaggtaccaaatctttgcaatctgaaacaaatatcattttcttttgatttcctgcatctttcttgaaaatttcttgtttaatccttcttctattatctttttccaaatctgcataacgcttcttattatggacaaacgagtcaatgggctccgtcagtaaacgattgcgccttattatagcccataagtacagaatctagctcgctacgtggcaaagcttcaccgctcgaaagagaggaatctatataaaccgtatcgatgctaacaagtttcatcttcaaaacaaccccttgagatttccgaagatcatcaaattcaaatccctagaaaccgaacaaaaggtaggtcaaaattagctccgataaatctcgatttcgatttgaatcatcgttactcttagggtttattcgtttcccagttcttgatcttcgtcgtttgattctctcgcggttttgtttccttgcgtcgatccatgtgttttttctgttatcttggttctagaatattctcgtacctacttctgatgatttacctttaactaatgcgtaattgcctgatctgtttctgaattgttcgttgattttctctctgtttgatcaaattctgataggattgtctcttgggcctgagtgtttgatttccagatttttctggttgatttcttcaggaggtgtatcttaggctaattatcacagctgatttgcatagagtctttccttttaggatagctatgttcttgctccatatgttaactggtttttgctgtgtactgcttttgcatctgtacttgtagcagtatagtaatttttttgatttgattttgttcctagctagcagaagctaggactattcaatggcgtcgaaaagaattaacaaagagcttagggacttgcaaagagatcctcctgtgtcctgcagtgcaggtgagtgttttaatctatgatatctactgtgaaatttaaagaaccactttgatagattcagtagatgatgtagcattaacctcagaatcagttttaggagaatgtttttttttttgtccttaagatacattatgagctatttagattttaatgaattggtgatgttattaggtcctacgggagatgatatgttccaatggcaagcaactatcatgggtccagcagatagcccgtttgccggaggtgtgtttcttgttaccattcacttcccaccagattaccctttcaagccaccaaaggtaatgtgttgtgttatgagactctttatgattcatcggttcttatcattgatcttatgatgtgaatccatcgatcttgcaggtgtcttttaagactaaggtgtaccatccaaacatcaatagcaatggaagtatttgccttgatattttgaaagagcaatggagccctgctcttactatctctaaggttcgagtttgtgtatctctactcctaccattttaacacaaattatgttactatcttagccaattttgtgtgttaacgcgagcgatattgatgctgtggaaattaggttctgttgtcgatttgctcgctgttgactgacccaaacccagatgatcctcttgtgccggagatagctcacatgtacaagacagatagatccaagtacgagtcaactgcgagaagctggacacaaaagtacgcaatgggttgatgatacaagacaaagcaaaggatatgttattgcgcatcggaataaaataataacttaaaaaaaatgcacttgtttggtttatcaaacgttagcaagtatcgaacaacttagctgctcttactcctcttctgttctgatcactataaactagtattaatttcgattgttgggtctacttttaatcttttgtttacccctctcttaacttgggttgcag

SEQ ID NO: 32294 - DNA, 803 bp, Arabidopsis thaliana landsberg
cattgtcggggggaacatggggctaaccctagaatttaagcccactaaacatggtatcgatttgagagaatcaccagcggatggggatctatagatacggactttacaaccagtccattttatccagcactagtcatggctcgacatgaacacacatgctgggaaaagcacatgtgaggcgatcgaggcatgactagagcaatgactaggtggtttctggtcaacttaacctcaattcttgaaagtacttccttaacatgggttgaacacaaaatgagttcagggcaatcgataaaacgatctccaaactcaacctttgttaattgggcagttacaagttagtaaaaccaacttgctgaactacttttgacactaagaaattttgtttattacccatcggcaatccaatggtcgagagttcacattggttaacaagagatcatgcatttgggtagaaatccatttggtcaggttgttcttccgtttcttcatgcaagatgaactgacttggttcaataatacatggattaaataagagagcgaatgaacaaattcctgcatctcagcagcatgggaattgatttttattagaaggactaatcagttgtctctgaacactaaaaagctccaaggctccacctttacaacaaaggatgtaaagggaacttgtatgtgtagtcccaacaaagtcaagagataagagatcacacatgaaagaggtgattcttatcacatgatttgacatagatgggttctgattttttctgaaggagacttctgaattggtagcgaacctattaaag

SEQ ID NO: 32295 - DNA, 585 bp, Arabidopsis thaliana landsberg
tatgaagataattaaaagaattatagtaaagtaacgttttttatgtccaaatcaaataaagtaagtctcttcttctaaagaaataaatgattaatttgatataaaatatataaagaatacattagtttattatatagtaattgatcttaaatagttagagtaaaatatctaaatctacagaattttaacatctagtaaaaagaagacatgtgtcacatgtggcccttattttttggttttcaacatgttgagtctattcaactgtgtttaatccacatatgattttttgctgttaaacaatttattcaacacccccattactcatagtaaggtaaaatcattttttttttccttaaaactttagtcaaggtcataagatcgaatgtaattaaatcacatctcagcaacctcttaattttgtagatcaaacaacgacacattttactaaacgaaatattaatagactaccattttattatcttggttttaaacaaaatctgtctcaccgaacataagtctctaatttatttaaagttattagataaaagtcgaatcccatttatacattaacttaaaggttccatc

SEQ ID NO: 32296 - DNA, 1845 bp, Arabidopsis thaliana landsberg
ctcatctttcttcttcacgaacaaggctggacatccccatggggaagtacatgggcgaatgaatcccttgtataacaactcttgcaactgctttttcaattctgccaactctgttggaggcatcctatagggtctcttggatataggagcagttcctgtttgcagctcaatcgcaaactctatgtctcttagggtggcaacctggcaattcatctgggaaaacatctgggtactcacagaccactgaaattttctctacaggtgactctattatagcgaaggcacaagagcgggtacaaccctggttaggcaagtacaatgtgatttctccacaaaagatgagtgtatctcaatagctctcgctgctacatcaatcaaggcatggtgtcgtgataaccagtcagtccccaagatgatatccatgctctctaatcccatgatcaggagagtggtcttaaatacaagactacccaattttattggcatgcgtcggttgatttgataggtggcaaccctgcctcctggtgttgaaattgtaatacccccatcggtgtggtgaaaaggtaattggcacttggcactaaatttggcactgataaaactgtgtgatgcaccagaataaaaaagaataatagcaggataattcaaaactgaaaagataccagtcatgacgggtgctccctctggaatatcagctatggtggtgaagttcagcctgccttgcctcacttgcaccttctgcctcttgccttggttctgattaacattctgtccctgcctctgctggttcttggggcaattcttggcatagtgtccggtgttaccacaagtgaaacacttgttgtcattcacctgacgatattgctgctgctgttgattgttccgctgagctggaaactgggtgcggttgggtgcctgctgctgctgttgctgaggtcggattacccatcgcccctgctgctgctggggtcccctgccctgggtgtcggatacaatcctaaagcgctgtggctgagctgagggtcctgccacgggggtcttcctcttcttctctgcctgcctagctgtaatacagtcctcttgggagatagccatgttgaccaactcattgtagctgttggccctgacggcgttgagacgatcccggagcttagtgctgagcccctcctgaacctatccctcttcttctcatctgtatctgcatgatatccgcgtactggcacaagtcattaaaggcctggcatactgcaacactgtcctgttgccctgagtgagtgccaaaaactcattgagcttcctgtccatgatcccggcgggtatatgggtcctctaaaagctgccttgactccctccactccacctctcagtcctctggctgcatagcaagaaaatgatcccaccaagtccttgcaggtccgcgaagctgctgggtggcgaacctgactttggtgacctctgagcaagctccatggagtagggggaatttggattccaccactcgcagccacacatctgcgtccagcgggtcctccgcccttgtgaacaagggaggctgggtgctaaggaattcctggtatgtagccgctgcggggtgacgttggtggtctccaccaccataatgctgaggtggtggctgacgttgagccagctgcctcaggatctcattctgctgagccatgagctcctgcagagtgggaggtggtggcggcggtggaggaacgcgctcgttctggccgcgacgctgcctcccagccatctgaaaaaccacatacttacttaacaccacagttccaaatttcaagattttatcacggggaaaaagttaaaacagcatgatagactctg

SEQ ID NO: 32297 - DNA, 1046 bp, Arabidopsis thaliana landsberg
tatgggtgtaaccattctgcttgtttacgcacggtgctgatgatcaatttcgcaatgtatagatacttgtatacaaaaatcaaagatattaccagaatggttttcttaaattatgtttatatcatttacctttgttttttttttaaaacaaaatttcaatagaggttttggcgattaatatcaaaaagaaataatttaaacttgaatgtattatacagtagaaacatcattaaatagcattcaaaatgaataaaatttgtaacagttagttcttgtgtttgtttatgtatagaaattttagcgaagtatagatgttgacccaaaaaaaatgtaggaacatatatagttttctttgggcccaaaacgagtttattctttgttcttcagtgttgaacactattttgcttgaacattgtttgtaaacgttcgaccagccaattccacttcatagtttgcatattaacgaacttccatctttttgctgattacagctttcattataccgtttagatttttctttttttgcctaaataaaaaaatatgaccctaaacattcgtaattaatagaaaacattaaataagtacgatacaaaagactgaatctctataataatagattgagaccatattcttgtgagataaataaaagattgagaccatattcttgtgacaattggtatacaattaggttacaaatattctaatccaaatttaatttcgagaacataatcgtgtgagtaacgataaacaatttcattttgtttacaaagatatatgataaattgcactttttaaaatctaatatgcttacttttatgagctgtcattaatccccaaactccactttgggattttttttaaaagtctaattcaacgcgtggggcacaccgtgtgtaaacttcgactttgaaaagttataaacagaaaatgatgtttttttaaaaaacagggaaaaaaaagagaagtttctatttgaaataggttcaaaacccactggccaagtactttgttagtggcatgtttatcatgagaatatatttgacccg

SEQ ID NO: 32298 - DNA, 673 bp, Arabidopsis thaliana landsberg
gttttggtctgggttgggcgcgtaccagtctctcttcttaacataatgatgcacatgtcatgtacggcatcccctactccaggcgacgtcgcgcccgcgacatacgcagggcagccgagcatgcagcacaggaggcggctgcccaaaccaattagccgctaggattaaggcaataaaagatatctagcctattatttaggaagggattactcctttctgttagaagttatctagcctattatttaggaggggattacccttatctgtttcagccgtgggctatatctatactatacttaaagcaccagtttcaacggtcgtcgtgcgtcatgtttttacaagtagccgcgcaccgctatttcagggaagttgctattttgtcactctcagtagtggacttttgtattgtaccatcagacccacaaattataaatacaaatggtcccacaagtcatagacagagtgtcacataatagtagtgagcccatgttaaaagggctaaaatagtaaggacttcgctccaagcccacacctgctggcaccgcgaaactctcgagggggcatgctgccacttttcggcaagtcgagaccgccgtcgaagcaccggcgccaaggaagacttgaagagggctaaaacgaattagatgccgcaaaaattcgctcagcggcaaaa

SEQ ID NO: 32299 - DNA, 200 bp, Arabidopsis thaliana landsberg
atgctatttctggtgtgcgttttatatttgcatttgcatgcggacatgttttttacaaacgtgtgaagggttgtggaaaattcgctttgttcgaagtcattcatttagaatgtctggtcttgtaagaaaggcttttcatttaacacctcatctattcttctatagatactaggcactatgtagataaaaacaaatgtgct

SEQ ID NO: 32300 - DNA, 570 bp, Arabidopsis thaliana landsberg
taagctaatctttccacacaaaaataaataagtattagaagatcatattataaatcgcggccgtatacagacataaaatgacttttcaaacaaatctattataatacaatcttaatttgtaataacaccatattataataaaaatgttatatagaaagtttgctgtataaataagatataaatatatgtaagccgtgttttagctagttttagagagtatccatggaatattcaaactacaaattaaataatacaaaaaaagttagtaacttaattcttcgcaagatgagaacacaaaataaaataaaatatagatagaatagtagtaataattaataaaagggggcagggcatgggaatcgcatttgcatttatattctcccacttctcctctatatatatatataaatactaacacaattccaaagtgtggtctcattcatcataataatcatagaattttcaactttttaagctctagatagagagagagagagagagacaaagtaacaaagagaaagagagagaaatatggaagagacaaaatcgagattcaagaagatctgtgtc

SEQ ID NO: 32301 - DNA, 983 bp, Arabidopsis thaliana landsberg
  unsure (1)..(983): unsure at all n locations
gttgttactgctgatgaatgttgcatagcccctcctgttgtcttcaaatgaaattcctgataagagatggaaataatttaatctaaagccttaaaccaggatatgatggaatcactatagcagctgagaagaatccattcgtgaggcttacttggaattcaggtagtttaggagtgctgtttttccggatgggcaatgatggagcctcgaagatctacagatcacaaacacgagactgagcttgtggctatgctaatgaatatcatttctatcacacatttctaagtagcagatgcaaagttacaaacctttcggttaaatggacgtgctttgaatctatatacagctggttgctcttgttctaacttcgcatcattcttgtgcctgaaataatcattagcaaaacagccggtgagatgtgacctttcctgtaactattcactttcagcaaacatttagctgctaaccgtatcctgtgagccctctgtgatgtagcaaaatcaggctcctgtgggatagtaatctttgtcctggcatgttgagcgtttttatcaagagttgtatcctgcaaaaccatttaggaataattaaatgatttacatttcattgtaaaactctataaacaagacaagagtattcaagcaatagaaagcaaaccttcttggggatcttgtggacaaaactcatttcctgctttgtatcagcaacctgaaacagagaacaaatgtcttttattgccactactttcagcacctaaattcagattatcagatatatatacctagtacatagttaaaaagaagtatacactgctcaactcagtgtaccatgacagtcaccctattgaaaagtctgcaaaatactctaccttacgaagaagacctccatcaagcttctgtcttttagacgcttgaacttcagtcccagatgtcccacaacttcctttatcatgancttgatccacttgcatatggaatttacta

SEQ ID NO: 32302 - DNA, 832 bp, Arabidopsis thaliana landsberg
  unsure (1)..(832): unsure at all n locations
gtaatagaattgatttatttaaaacttcagatttctatttatgcagatatgatgcaaacagaagagcgagagaattggataccgttacgctggatctatctggatgtaataatctattaatattcatcatatttgtttagttgaacaatggtttggttatcgacctttagtcgtatacaaaaagaaaacaagattatattaatcggaatcttaatctaaaagcaatttaaagctgctaatatgttttcttttttggagtgaagagagaccaaaaagcaaataccttttnnnnnnnnnnnnnnnnnnnnnnnnnnnnnnnnnnnnnnnnnnttgagacatgggcacaactcctaaacatttcaatctaagaacacttgctcgatctactggagagagttagcatttatgagagttataaaacacataatcaggccaaatatctctcaaagtctcataacatgaaagattttaacttttaactcagaaagtattgcaaggttaagttacaacttggattacataggaaataaaagagaaatataaaagtgaaataggcgctgatatatagtgatatgtggatagaggtaaagcaacatgaacacaatgttttcgatggtggtttaactagactacctatagctattctttcgtttttttctgaattatataggaaacaacaagaccacaatcttttcaatgataagaggtcccaattaaaacaacaatggaaatactagaataattaagctgtgacaatccgatttggagttagattaaaaattgtaatgttttgtatttgactttttccagtaattcctaaaaacatagaaaa

SEQ ID NO: 32303 - DNA, 1047 bp, Arabidopsis thaliana landsberg
ccgtatgctgctcacagtatctccacaaggtaatgggtccgggactttccggttttttaacactgcccaagcgttggtaagtttggttcggttgtcaaatggaattagaagagcctgatatggaagaggaagagctggagaagttgtgctgcaagtacgcgccactctgtcgctagagcaacctccacaagcgcaggtcttacacgggattactgagtcattgaaataagaagagaatgagacgcagcatttaggaggagttggttgagtgatgttgcagacgacttgccagctagcaaatgcactcttgtttgaaggcaaaccgcttgtatcagggaactggcttgagctgacacgaagaggagggccacatttgtaatccgggttcagtgtaccgtttaatctccagttctgaggcggtgatagagcagagatattgagatcaggaggcattttgtacacctgcatctggaaaactgagctcgacttgctaggatccattgaccgtggtagaatcgtcccatttctgcagcaaaatgggataagaccgaatgtcgaatcattgtatttcgtaggagggagatctatgacggttggccgtcttgcacagcttaacacgttagagaagtcaagatcttgatagtgcttcgcctgtgggccatcaacacaatctgatgaatcaacaatactcgggtaagcccctttcatggtgtagataaactcgtcccgcatccagtcaaaactcagtttccagttatccagccggccaagcgggttatggttctccatagtgacctgtgccatataattggatgaatatgatctgaccacatcgtacatgatagtgaggtctccatcttttcgtggaagaaactcattatcaatgatctctgtgttatcatagtctgggtcaggaatacaacatacttgcagaacatttgtacctgacaaaacagagaaaaaacacagaaaataagcaaacacggactccacctgtaaaaaccttcaaagttacttatgctttacacgccacaacacaccatagat

SEQ ID NO: 32304 - DNA, 2688 bp, Arabidopsis thaliana landsberg
  unsure (1)..(2688): unsure at all n locations
taaatttgtgttttcaaattcaaatcttgtttgcttgggacttgattgcagtgtattagaaggttactctaccagatctaaatacttagtttggtttacaagatctaacgtttcatcgagaacaaacacttctctaatttttgggggtaatatacatatcttgttttatgaattctaatatacaacaagaggtccattcagtctaatttctggagctgaaaatggttattgttcacatctactatttcaaaccaatatcacaaactcattcccaggcttctcgttttcttagttcatttgcaagtactctgtttcatatgcgacagcgacaattaacgattagtttcggtcaaaacaaaactaacattttcctttgagttggttcaattcaaatatatttcttttgattaggtccaaatgacaaatgtttattcctttgattaggtccaaaacaattcaatcttcattatgacaattcaaatggaacaattttttggtcgaattaaatcacataagttattcagggccatactaattcactttcatctttatcgactgttatacttttggataaatgcgatcaatgtaaaaaaaatacatatgtatgtaccaataagacacaactgttcatgaagaaagaacagatcgcctggaaaagaaccctaagtttaatacacgagaaagaactatcgaaaatggtattttaaaatctgctattccctattcactatatccttcctcacaaattactatatccaatcattcaataaaatgaatcaaaagatgttaagaaaatcaaaaagaaaatgtaagaaactcggtaagcagatgaatcgaccggagagatctaaatccctctcgcgaccaccggccagatagcttcttattcaatctagctacagccgttattttggcaaattcaagagtaaaggtatcgaaatcgaacccttctctcggtacaatgcagccccaataaaaataactaatcaaacactattcggattcacaaacaccaacctaaacgctatagaatcaaaaaaatttgatgtgaaaaccctaaaactaggcgtcgtaatgtaagagatgatgtagctgaaacgttgaagcgatgtttatataagagagaacatcaggggtataaacgtcttttgctaaaccctctgtgaggacgcttctagggcaaaacgattagccaagaaccctctggcttaggcagagtctttctctttctcaaacaaaagcaattattgttaagtataattagattagcctataattatcacacacgtgtcaatagtcgaaaccttctagctcgacaagagtcttctacttgaaggaaaaaccaataaaattggtcgcttcgcaaaaactgagatctgagttcttccttcggtggaaagagcanattntacttttaagaaatttgaaaacaaagtttcattaaacagattggtgggattttaaatttgaattttgatcagtgaatcaacgataaacgattcgtcgttatggaaggagttggtgcacggttaggcaggtcctcgacacggtacggaccggcaacggttttcaccggtccggtgcggaagtggaagaagaagtgggtacacgtctctccatccactaagaaagacaataataatagcttctccggttccgccgctgctgcagcttccgtcgttaatggtggttcgaattctgacggcagtaatggatcgcatttgttgctgtataagtgggcaccattgtcccagaacggtaacgggaatgaagatggtaaaagtgagagtaattctccgagcgaggacacggtggcgacggtggcagaagatcctccgcggcggagattcaaatacgttccggttagtttttggtttttggttcaatgtcttgttgcattggagtgagctataaggtttttgctaggagtctgattagggttttaatcaccttattagcttgaaaaaaaggatccgttttgagcattgttgaaggagtaattggactggcttatgtctctgcttcgtcatttgtgattcttcggagtaattggactggattagtgtttttagtagctgtgatttggaaggatttgtaagatggaatcataaggtttatcactggttgaagtagatgatctttgtttaagaacctgtttgcagtatcattgaatcgtgttggattgtaaatttgggatttcaaactttgtatatctaatttagttttgattattagtgtatcatttgaagtgaggtgtgattaaaatggtgcagatagcagtacttgaggaacagaagaaggaaattacagaaattgaggacgatgataagattgaggaggatgacaagattgatgaggataataaggtcgagcaggaagacaaggttgatgaggacaaaactgtagaggagtcgagcgagaagaaagcggaagtggaagtggaagtggaggaaaagcctgatatcaatgatgttccaatggaagatattcaggtaaagcaatcaacatgtaatgttatctgcttcatcaatgattctgttgataactccattgttcattcatggattcctgacttattacttggagcctagctgcgttttcttttggtaggcttttcaaaactgattctttatcatagcatcatgcgtacttgaatttgtggttctagactttgttctatttagctat

SEQ ID NO: 32305 - DNA, 798 bp, Arabidopsis thaliana landsberg
  unsure (1)..(798): unsure at all n locations
ttttctaataagaataagatatagaaaatattagattattttaattatagtgattagggtttgggtggaagctagaattattttaattaataaaaaaaagaattttttttaacctaattgctattttttttttaacctaaccgctaccgcccgcaaccgcaaacgcttgcgggaaggagcttttgaaatctgacgattttgagcggtccagagcggtatctagcgttttctatgattggtggcaatcgctaataaccgctaccacccgcaaacgctgcgtttgcgggtggttggaaggagaaccaatcaagccctaaacgatctacgtatatgtatacatacacactaatggtagattttctaagcattgaaaatattactctctgtttacaaaatcaatgacaagaacatgatataacattagcaatctcgagttgaacatagaagctaagaccatacctgcaagttcatgtaggagtcaacagaggcgagaaaacctgtgaagtagaaggaagactgttagctatataagctctggatacttatcatcaaaagcattctgaagaaaaatctacctttgtattccattccccatttaagcttgacgataacagtcttgnnnnnnnnnnnnnnnnnnnnnnnnttcgggttaacccgaatagtctgcaaaacacacatacatacaaacttggttcatcaaatactaatggaatgaactcaaaagcatcacatttgaagataaacacattgggcattttccacgaattctcgaatgcatttttatgtagtggactatta

SEQ ID NO: 32306 - DNA, 588 bp, Arabidopsis thaliana landsberg
  unsure (1)..(588): unsure at all n locations
cgagtttcccatgacgtatttctcctctggtccgcgggctgatgcgggttaccgactgtcggggatccagtcctggtccggcgtcacaccggttcggcataacgccgttatgcacgaccataacgccgttatggcatgatcgcaagggtgagcgcacaagaatccggcaacccgggcacagaccctggcagcgaagccgacgcggacaaggacacgggcaagacggagggcacgccccgcgagcggctgctggccgccgcgctccggctgctagaggacgagggacccgaggcgctgcaggcccgccgcctcgcgcgcgagatcggcgcgtccaccatggccgtctacacgcacttcggcggaatgcagcagctcatcgtggaggtggcgcgcgaaggcttcgtccggctccgcgaccggctggcggcggtccccgagaccggcgacgccgtcgccgacttcctggtactgggcatcgcctaccgggagcacgcggtggcgaatccgcagttgtaccgggtgatgttcggcgtgacggcgccgggcggtttccggttccccggcgtggatcccaacggnctgatgaca

SEQ ID NO: 32307 - DNA, 551 bp, Arabidopsis thaliana landsberg
  unsure (1)..(551): unsure at all n locations
ttcgaagagattcatattcgaatcttcgagtattcaagctctgcaagcgaaagcttcaagctttgaagtgaatcaaccaacaagagtcgaagctgtttcagctcttatatggaaatctgcaatgaaagctacaagaacagtttcaggaacatcgaaaccgtcaattctggcaaactccgcgagtctacgctcacgagtctctccaccatttacaaagaactcaatagggaatctagtgagctactttgcagcaaaagcagaggaaggaataaaccaaacaaagcttcaaactttggtttcgaaaatacgaaaagcgaaacagaggtttcgagatatccatataccaaagctntgtaggaaacccaaatgccacagagatcatttgtagctaccagaaagaagcaggagatatgattgcaagtggagatttcgatttctacatattctcaagtgcttgccgattcggtttataccaaaccgatttcggttggggaaaaccggtttgaaaggagattccttcggttagacagaagaacatcgtgacgcttctc

SEQ ID NO: 32308 - DNA, 174 bp, Arabidopsis thaliana landsberg
ggtatgggtcacaattattacggggaacccgcatggaccaacgaccttttatatatttttccagtttttattcttggtaccattgcctgtaacgtaggcttagcggttttagaaccatcaatgattggtgaacctgcggatccttttgcaactactttggaaatattacctgaa

SEQ ID NO: 32309 - DNA, 1628 bp, Arabidopsis thaliana landsberg
ggtggataggtggtgtttggctgagtgggacgaggcgcacaccgctagccgggaacgcgtcttgatgatgcaaggcccctcccaccaccaaggcagccggagcctgggccaatatgccgaagcatgggtacgccaccttttttatttagatatatagcactaagttagatattatttctaactatctcgttggttttcgttgcagtcggcgtcacatggtggcaggccttgctccacctactcggcctatgctatggcccataagggtaaggcgacgtccgacgtcacctacaacccggatgacgggcccgaggcagcaccaaccccgccgtctacagccgcctccatgactacaccgccatggcgcaggaggtccatggcccagactatgatccgagcaccgagcctatcgaccccgatgtgctcatgagggtcggaggaggcaagagacatgggcggtactggattgctgacggggcaatcgactcgtcctccactcccactctgtctcaggtgagagcaaggagcactggctcgagcccagccattcgacctcggcacgacagctcacagcatcgcatttcacaactcgaggttagtgcttctgtaactcgtccttcctttagttatatacctagtctttgagttactataacgttggcttgtaatattacagacccaactattagagatggaggcgaggataatggcggagcgggcggcggctgatcagaggatggcggagatgttccagtacatgcagagccttggcgccgcacagggcatccgccgccacctccattgttccccccagttgaccctactctcttccacactcctgtgagtatcaaaattgtagttagatgtttgtaatgcatctggtataacacatgctatctcttctctgtacagggccaatctggggcggcatccaacaaccctccggaagggttcggcccaacgcaaccccggcaaaaccgcccacctccatgagtcattgttttagacttcagaacttatgtataatacttatgtttctgtttgatacttatgtgagagcttgcgacgtttgagacttatgtttgtgtttaatacttgtgttgaacacttatgtttgtgatggatatttatgtatgtggtcacggttttatgtttgtgttggctatttatgtctgtgatgatatctgtgatgtatatatgtgatatatatgtgatatcttctgtgtgtgtggatggaaaacaaaaaacaaataaaaaaggtacatactggtcactttgccgagtgtaacactcggcaaagaggctctttgccgagtgtctgggtcaaaacactcggcaaagagcacagacctgggcaccggcttaggttctttgccgagtgttgtgtcgctggcactcggcaaagaggtcggctttgcgcgtgcccgtttggacactcgacaaagagcctgacatggggaccctccctggcgggctctttgccgagtgtcccaagtgacactcggcaaagaaggcggctttgcgatgtgcttccaggaggacactcggcaaagatttcttcggtgccgagtgtgaccgttgacactcggcaaagcgccgtctccgtcaatcggcgccgtaacggtcgc

SEQ ID NO: 32310 - DNA, 1108 bp, Arabidopsis thaliana landsberg
  unsure (1)..(1108): unsure at all n locations
ttctagctatacaataagatttgttttttaagcttgttagttacaaaatcagcaaagattaacagcaatttttgttaatttgggataattttgacatgtctttttttttttaaatgtaaccacggtaacttgtttttctgtagtatgaaataatgtgaaatctatgggatatccaattggtattgaatattgttgaatccagtgagaagtactcagtttccttggttaaaagttcagacttaaaagaaaccaaggaccaaaaccggaagcttaatttaaaatttaataagtaacaattgtagttgatgtttccatcatcatcacgaccaccaattacttatataattatgtatgctcctataagaaatcagagataacatcaaaaccatgttgtattctacaaagcaagaatagcatatacaatatactctactatcaaaattgcattacttagtggaatttttatttttcctcctaactcaaaagtcatattttcttctttttttaattcccatgaaaaatattacaaaaccctaaaaaccctcctataaaaccaacctcaacccctcccacatttctccatcagctctttcttacatcatattccaatctatcactttataacaaattaaagtctacgttgagatatggctttaaaaacatggaagccattcataactgttgtttctctacaatttggatatgctggattgtcgatcatagcgaaattcgcactgaaccaaggcatgagtcctcacgttctagcgtcgnnnnnnnnnnnnnnnnnnnnaattttcattgctccatttgcctatttcttggataggtatagtatgtccatttggaatataaaattgtataatggtcatgcatgcatgtatgcttttacctatacgtacgtacttgtagagacttgtgtctacgtattcttcacgcagaatatgttaatcttctttttctgatcatgttactttaatatactttttgaatatcatgagcagaataatactgccgaagatgacgctatccatcttcttcaagatattgttgcttgggttattggagcaagaattactattttggccttaaaattttatttattccttat

SEQ ID NO: 32311 - DNA, 794 bp, Arabidopsis thaliana landsberg
  unsure (1)..(794): unsure at all n locations
tttttgccttttatcatttatctgaattaaaataaataaataaagacatttttcttatatcggggactaagcagagaatgtttcgagctttggggccaagtagattaaaatccttaaaatcccaattctttcataacaaaacactgctcttccttctctccgccgccgcatcgttaaatctctccgtcatctgtaaccggttaaagtatttccctgaggtcgacctgaaaacgatgggcaaacgaggaccgaagaagcttacaaacactcaaggaggaggaggacctaatctcaaatctgtannnnnnnnnnnnnnnnnnnnnnnnnnnnnnnnnnnnncttccaccggagatactcctatcccgtctcttgcttcattactcggtcgacgtctcgctgccgacactgaatccaccggaatcactactgatcccgatctcgtctcttgtcaaaggtatgggggattttttatatgacttgatttctaagcaacctaaaaaatcgttcgttttgcttcaataggtgctagtggaccatatagttcgcgatttttcaccattgctgcagaataaggtgcattgctctgcgtgcttgcaacgacttttatggccacgtaatgtcaaaattatgtcatgattcaaatggttttgcggcaggtgtgagaccattcttaagcctgtattcaatcgcaatgttagaatagatatagtttctgctacagtatacaaccaacctcctactgcgaagaagtctaacaacatctgtttccctcataacaatgtacactaccattg

SEQ ID NO: 32312 - DNA, 363 bp, Arabidopsis thaliana landsberg
atgaaattgacatgtgtccactcattaattgcatataataaatcaagtttacatactaaacataatttcaatggacctttagttttattttagggttttgggcatgaaaaacattgcgctcgtgttgatttggatatagacctttaacctccaaaaaactgcaagtaaagcatacgaagtaaaaagtattacgcaatataatccttatatgatgagtcagagagtctacttgctcatgagctttcattatagactaagatattctatgaacatttgatacatagatgaggtcaaagttatcataaacactgccttccgacctaaatcgatatcatagaaatcatggactatccattattgcac

SEQ ID NO: 32313 - DNA, 524 bp, Arabidopsis thaliana landsberg
  unsure (1)..(524): unsure at all n locations
caaataaaaaagggtattctggtcactttgccgagtgtaacactcgcaaagaggtactttgccgagtgtcaaggtcatagcattcagcaaagaaggcacgtctgggcaccgataaagcctatttgtcgagtgttgtggccttggtactcggcaaataagcaagctttgtcgagtgcatcctagcgcactcggcaaagaaaccgacaaaaggggccannnnnnnnnnnnnnnnnnnnnnnnnntcagtccagcactcggcaaagaggtagcttttaccgagtaccgcctaatacgcttgacaacggaactggtaaaaggggcccacgaggagcttctttgtcgagtgtcagtacagcggacactcggcaaagagggagcatttgccgagtgtcactcagtgggcactcggcacaggctccgtcgccgtcacctggcgccgtgacgatgatttttctttgccaagtaccgagtgacactcggcaaagtctttgccgagagcccgataaaaagtactcggcaaagaa

SEQ ID NO: 32314 - DNA, 1018 bp, Arabidopsis thaliana landsberg
agacctatatcataactcactaataccatttgtaccacctgtcctattgtttttcattaaaacacttgtaccgcttatactattggatctgagttttaccatttgtcccagttcgtcaattcagggtttcacaaatcgtaaatttcgattgaacactcactaaactctctaattcaaaacgatacaacagcccagaatgaacaatacaacaattttatgttattaacaactaactccaacaagaaattcacattaatctacaaatcaaaacgagatcggatttacttttgccgttgaagaggaagctcactttggaagcagactatcggcttggaagctacggcgatctcggaagctaactcgccggtgaaattagagctcaaatcgtcggcgaaatcggagctcaagtcgccggcggcgaagtcggagaaaatcacgtcggaagtcggagaaaatcccgattttggtaacggccgtttttctttttttttactaaatgatttactctttattttgaaattctccttcagttattcattaaggagagagatgtaattgcacatggttgagtggtactcagaataaaagatggtatgtcagaatagttttcaaaaatggtggcagaatagaacgtggctcaactggtacagaggttttactcgaaagaagaacctctggttgattggagacggttatatccgcccgggacaaaataaccggaatcgaataccggaaatgaatcaatccaaaattagggtatagattagaaattcagtttcccgctcttttgctaccaaatctcagaaggcccaattttaaagagaaaattatgtttttttatttggtaaattgaaaaaagaaaaaagaaaaattcaaatttgcttgtaataatcctctcaaagagaattcagttagacgattcgtctctacttctcctgcaacggttagattttgaatctacgctctcaatttcggaagcttgttgtgatacctccgtctgcgtttccatttctagggt

SEQ ID NO: 32315 - DNA, 668 bp, Arabidopsis thaliana landsberg
  unsure (1)..(668): unsure at all n locations
tagctcgtgaacaaagaagcacaaaagaagagcgtacgtttcatttattttattaaattcaaaattttcaattcaattcattaatttattatcttttcttctccttcatgtcttctctaacctctcctcccactatacatcgtccttaacttttcctttttctcgttcaaatgaatccaattcctataaagctttctttaatttttctctcctatttaacccaaacccatttcatataacgtcaaaaaaaacattattaggtcttcattaactcatctccaagaaaacgaaaaaaaatggtttttgttaatgatcatcaagatcggttctgttcttctacacgtaagcagcttcctctgttttcatatccaatgaataacattgcatatgaaactactccgggattagctacacctccggttaacatcgctggatctgttccttttctttgggaagannnnnnnnnnnnnnnnnnnnnnnnnnnnnaaccggcgaggttgaatcagaaaggtgtcgtgagaagtcttgagcttcctccgaggttagttttacccggagaatcaacgacggtgaatgagccttctccgactactgttcttgatggtccttacgatttacgtcgtcgtaaacaataagcttccgagatcagcggctgttattaggaagtt

SEQ ID NO: 32316 - DNA, 2890 bp, Arabidopsis thaliana landsberg
ttatactcaacagaatgtagcgattccgactaagaagattgggcagaaagtgaatcttgaggttgatatcttggggaagtatgttgagaggcttctcaccagtggtggcttctccaaaggtaactaggaaacttaaagtttaagtctttttggtaggattgatttggaggagaatgaatggtgttgattgctatcgatcttctaagtcctgagcttaaacttgtttagaactatgatttacagcagtgttctcagaacgcttcgatctgagctctccttttgcaaggaatcatcatcagtagatttagtacattgttttatgcaatagtccgagtgtctagtcacttggctcaactgtctttgtctgagaaacttttagttttgttcttgttgtgggggatatgtgtatttcatttttccctaatcactctgctcagctaaattgttgaggaagcttattcaattggggggcattgtatttggtattgtttggagatctctggtcgccatgtataagcaaaacttgtctgaagaacatcttgtagttgttgaactaagaagcattctgttgtatgggttgcaggaaaagaaaatatttgatttgatgggacttgggagtgggagctttgttgagcggagcttgaccttttcgcctggggttatatgtatcttaacctctgtttcttcgtaatggtgctagtgaacagtccacgcatttaggcgcggtgagaagagtaaatcaaccttattgagtaatgatgatcaaatcattcgtgtaataaacccaagaatcaaattttgtaatatggcagtgccccttttaaaacttagattctgttatgcttttgttagaccttcatatgtatatctttaagtgtttcgagaagtttataagaaagggagttgtatacataagaccaagaggcatatataaatgtgtttttacccataaaacaagttctgagatgtgttattaagacttcaagacgataagaacaaaagacacagaacgaggaaggtagaaagaaccgcgagagatgcagttgtggaggcacgtgggatagaatcagaagttgcggatgcggactgggtgacatcagtgcagtcaagaccttctttgccctctttacacatgttggcaaagattccaggaggataacgaccgtaaaggttgatgtagctgaacattgtggaggcacaatcgttcttttcgtcgttaagaacttctgcaaaagggcaagcaaagtccttgaaggcggagcaacacacatttgccggataatttggtcctttgcatctgcttgttatgattgtgtagttcttgttagcaaaatcttctttgcaggctgtttcaataccaacaaagaaaacagaagatccatacttaaagattaatgtgtctacatatatattctaaacgatattagaatcatcaattaggaaggatgatctttacttgtccttgtctgaagaagagctctgcttgttgctgcgtgaccatcaaattcatcatctgcacattcaaatccattaactttttaacaatggtctctctttttataatgaacatgaacatagtaagaaaaagaaaacaaatcatcaagaaattgaggagagaattacatgaaagggagaaaccagagaggaggaaaatgggaagaagagaaagcagacagtaaggagaaatctccattgtttctctgattcttcctctcttctcttctcttctcttctcttctcttctctttttccattacttccattttttgtgggggtatttctgtttcttttttagtaagatgaaagttataggacgagagacaatttcggaatcattacaaaagtatcattaatatggggttttgagaaattgacattgaacctaacccatattatagcctaaacgacgccgtgtcagtactctgctctaaaccctatacttgagtaagcttgacgagtaaacagaagttgaattcgttacaaaatctatcccaaaggtttgatttttttcctccaacttgcaaaatgttaaaccttaaaccttaaaccttagcttctctgtttgaaatctgtatcacggcccaagtatgaagcatcttcttcttcttcgtcttgttcttccaaagccaaattacattctcagaaggagcttccttttccactccggcaagaccacaccatcgccgttggacccttacgacactctgcagcgccgtgtcgcgagatccggagatccctctgcttcgattatcaaagtgttggatggatggcttgatcaagggaatctggttaagacttcagagctccatagcatcatcaagatgcttcgcaagttcagccgtttctctcacgctctccaggtctctcatttctaaattcctctgctgcttactttaaaaaaaaagttcatcttttttgttgttgttactctgtgatgatacgaatccaaatcttaaaaatggtatcttttttttttgttgttgttgttattattgtgatgatgttagatatcagattggatgagtgagcatagagttcatgagatctctgaaggagatgttgcgattcggcttgatttgattgctaaagttggtggtttgggagaagcagagaagtttttcgaaactattcctttggagaggaggaactaccatccctacggtgctctcttgaactgctatgcgagcaagaaggtgttgcacaaagctgagcaagtgtttcaggagatgaaagagcttggcttccttaaaggttgtcttccctacaatgtgatgctgaatctctatgtccggactgggaaatacacaatggttgagaagctgctgcgtgaaatggaggatgcgactgtgaagccagacatcttcacagtgaacacgcggttgcatgctta

SEQ ID NO: 32317 - DNA, 699 bp, Arabidopsis thaliana landsberg
cagaaggggtgctcctaggtgtgtgtaggggttgtgtttgttcgcgagaatggattcctcgtcaagtctgtttggggggtgtggacacacttgcgcgaattcaggtaacggctacaagggagaaataaaaaggaaactgtacccgaccagggatggacgtaaactcgtaagctaccgaggttagggataatcgtccaggtcttattgtgaaacaaaaaagccgccccgccacagcaagcgggttggttcctctgtcgtcgccggatagctcttggcgaggtacttttgtcactcgactgaaaggagaggagaccttaggataagttgctaaaacaaaggggagtagaggatcgacccgttcagtagaattccgaagaaagactgttgacagctggtggagacatttctttggcccccggcaaatcaaaaggaaatgcgggcaggtttaagctcggcagagggttcaagaatagggtcctgcccttcagattctcagaataaaaaaatagttccaaacctttatgcatgcacctccgtataagtgctgcgtacaagttccggccaggataattgggaaagatcaaacccgaaacaaccgctcacatcacagtagtagtagcgtaaaggccgtaagtcgggtagcggccataccataaagtaaggggctattactttcacatctctccttctgtcgtacta

SEQ ID NO: 32318 - DNA, 1004 bp, Arabidopsis thaliana landsberg
aatttttgggtgaattcttcgtttcttctggtaatgaaattacttcagactatgttcaaaagttttttcaacatttctttactattacaaaactttaaagtctcttgttttctttaacgaaaatgaaaatcaaaacccatttctgtcgtcttcaaattgaggcatagatctagcggaaccagtatcagacatataatcagcttctgatattcgtgatgatctcgaagaccctccattaccagcttctttagatttctttctctttgacttctttggaacctctggtaatccagcactatgttgagacaaagaagaatcttcatctttagttgttctcctagacgatgaggtagaatcttcgtctttggttctcctagacgatgatgtgcctttgtttgaagtccgacgtttggtcttgtctgatctttctttggtcggagaacctttctcagacgatgattttctcgtggattttggtagttttggtaaatctctagtccgaccaccaaactctgattgacatttcactgagtaatcgtatactcaatatccttgtttagactccatagcaggagaactcttgaaatcgttcatcttccacaggttttatgacatgacgttaatttctaatatacgtacatatgtgtgaaatgaccggtagtacagcatcagagtagtacccagctaggtgcagtggcattatcatccggtccatcacaaccaatgtggccaacaagctatacgtccgttggatttcatatgagcatctattcttccttttccccttcaaatgcttcatatcgaccattagcataaatcataaccttttcatgtacattcatctaaaacccatacaagccatacaaatacaatgtttggttctatctagtatccataaaatttgtagtgttgatgttactatttttaatacaacaccataatataggaggtggctcaagaagaagttattataaaaaaactccaaatccgctaaaaaacttttt

SEQ ID NO: 32319 - DNA, 2372 bp, Arabidopsis thaliana landsberg
ttttatataaatattagaatttcactcgtaataaactgtctcgtattaatattattataaatatttaaaacgttttatagtataactttttaaaagttttcaaatttttaatatttttaatatttttaaatttttaaaaattcagttctttaaaataatgattcagagtaaaccggataacacttttaattttggatgcctcataaatcaaggttatgtattcaaacttttggttctttttatagtaagattttgaatcattgcccaatttcttaagtaatgtgggacattttatacattttttttctttatcgattgagtaatatatgtttgtttttaaaaatttgaattacatgatatgcaaaaacaaatctaatattttattaactatatgtattttatataaaatcaaataaattagatataataacaaataaaagtgaaagaaaaatcatatatttatatttaatatagatacagaaagtttagaaaattagtaattaattgaatgtagttcaataatgataagatttaattaagaatataaatttagacaaatatgttttaagatagattttgtagggactaaatatgtaataaaataaagagtattcaagtatttagtgcaaactaataaattgtaagtttttaataatacaatatttagttgagatataatttgtaaagatctaaatgttaatagtaaataataaaaagatttttggtcaaaaagactactaaaatcatatacgtagatttatcaatttcaaacacattatgagccaaaaagagtggtcttctgcctacataagactgcactccgtccaccattacgacttttttgttcccatttcagtaaattggtaccgaatttacgtgacaactccttattgtagttccaacaacgtggcaactcattattgtaggaccaacaaaaatttgaggaaaaaaacattaaagcaagggaggagcaaaaagctacacacccagatcaaaacaaatctgaacgttatacaggttttctctcttttctctctcaaaaatttttgagagagagaaagcttttggcctttcattttccgacgatgatgatgtcggattttgttttcggctatgtccggttttctctttctcgcctatgtgcgagatcctctaaaccatcttggcttttgtttgttaagtttttttgttccttttgcagctcttagttttcttccagcaaggaagaatttatgccgagtgtataatcgaaatctctgaaatcattggaagttcaattccgaccaagaagataataagtccttcatctcctattggagccgtaatcggctgtagttgaaggcttcactttaaaatcgagaattgtgttgagtggagtttggtagccggcgtagaatagttgagagcgtgtttgcgaccaatctgaactctcgtcttctcacgagttccagcgtttcatagatctgatggttcatggatttactcctcatactcgaagaactgggcaaaaggatttgagtcagtgatcaaagaaagtagttgttcgttgacggaatctatagtggagataggtgaattctgatcaggaattttcatgggcgatttcaactcggcggcggtgatgattcactaacgtctttccaatctcaacatgcacaagcacacgtgtccttgatgattaaccataatattttatttcgttgtaaattttggttagatttatagttgggctttgatgttgtgtaattgggttttggtcattattgtactcttttcaaaatcagtgaaacaggttgacgacaaaataaaataacccaacaaggaagcccagaaaaagcccaatcgtaaatgaaacaagcggaagagacagagcacagtgaacagttaattcttaacgccgtgaaaaatacctttaacgccgtcttttgttcgtcgtcgtcgtgttctctctctcaaactctcaggtaaccaaaccttcttcagttttccggtggtttcgtttgtagaagcaagtttcttcctttcccaataaaattgtgtagatattaaaatcccagaaattgataaaaccaaaatttctcccttgtgacaaaatttgcaggtaagttgagatttcagaaaagattgagcttttaacaattttcattcttggaatcacttactttggtgataactgataagatttgtgtattgtaagtttgtaacatatagaggaagctactttcaatgaaacactgcggaatgagagttggaattggtgttgttcctgttaattttctatgtatgagtggaaatgtgtgcgttgtattttctgcttatattggatgttttggatagtgtttcaaaacgtaacttggtgttaattaggagag

SEQ ID NO: 32320 - DNA, 664 bp, Arabidopsis thaliana landsberg
cacccactcggcaggcccttctctgacccataacaaagtaggacaaatgctatgggtccattacaaaattcaaaaaaaattttattgaaaaaagacccatttaaaaaaaaaaattactaagaggttttagattttttttggattttaccaaaggcccataaatatattgagacgggcctgccactcggcccttagttctgaacagtctttagtgtatctctccattgtcttgatcgagatcattacaacagtttcatcaaaagacctggtgaaaccccgatcaaaagctctacacttttcattgcatgaaaagtttgctagaaattccaatcaagaactgaataaaacattctctttgggtaagaataaatttaataaacaccaatttctcattaaccttcctcctatgatagtatgattaatgataaatgtccttaaaatatttcaaacaaaattctaaaaaggtgagatcaatctcccaatattgtatagtttctagtccacacaccactactttgctacaattaataaacatattgataatttaacacaattactaaaattgaagtttaactagatgtgaaaaccatcgtccagaacagaagttaattaaataccacttgtacgtctgcatcttcaaaggcagatatcgacattttgatgc

SEQ ID NO: 32321 - DNA, 349 bp, Arabidopsis thaliana landsberg
ccattcattgttttatcagcaaaaagactagcgtcttcatatgattacctccataattattggctccttacggatgaatcacctggcttgagagaggctttacgctacacaatatatgggaagactggcgtttttgatgctgaaagattcatcgatgtgatgcaagcctttgagactttcattacagcagccaaaagtggaggaggggaagatatgaatggaggcatggcagagatggctcttatgcaaagtaagacacgcacgcttggttcctatgtttccagctagtgcatcccaaccggaccagccagttcaaacaagagtcgctttgtcttttctgctttcggag

SEQ ID NO: 32322 - DNA, 947 bp, Arabidopsis thaliana landsberg
tctctctctctctctctgcccagagagaaaaaacactaaagaaatagaaaataaaaaaacaactcataatattttccattttctcactattttcctcgtttttttaaaaacatttctgggaaagaaaaaataaatccaattttgtcgttttattccttttcctggtttcagaccaaaccagttagaaacaaagtcgtttttttcacaaatttggattttattgttccactgagaatgaaaggaaaccaaaaagactcatcggagaaacccatatgggatcggagctcatcgggtatatccatgacccgacccggtcgattaataatctggctcatcctcttcatctccgtcacttacatcatctacactctcaagatcgtctccactacacacccttgcgaagatctaacctccgagtcaattctacaacaaagaccggagaaaaaagcggttacagtaattgttaatgcggtttctgcgtttcaagaagcaacggatctaaaccagggggttggcggtattgctgcgtcgtcgaagctatggaaacaaaggaaagagtatatcaagatttggtataagccaaagaaaatgagaggctacgtgtggttagacgaagaggtaaagataaaatccgaaaccggagatcaagaaagcctcccgtcggtgagaatcttcggtgatacgtcgtcgtttccttatactaacaaacaaggacaccgatcagcgattaggatctcgaggattgtttcggaaacgttgatgagtcttgattctgagtcgaagaagaacgtgaggtggttcgtgatgggtgatgatgatacggcttttgtaacggataacttaattagggttttgaggatgtatgatcatgaacagatgtattatatagggagcccgtcggaatctcatttgcaaacatttttttctcttatggaatggcttatggt

SEQ ID NO: 32323 - DNA, 991 bp, Arabidopsis thaliana landsberg
tcaacatcaaagttataagaaagcttatattttgctggtaatttccccccgccactgctctgtaatctctcttaatcatactgtatcattactcctaggatcaatactcgttcttatatttgaagttcgtcaaagtcttttgagtaaaaaatatctatatttctctagtgtctaagctctgtaaattctaagtttcatcaaaatccataggttacttactgatcattgttggaatttacttcttttacaaattggcagtgatgtagagagagtttgtaatttatatacatttccccgatgaggtgattcttgttgtatttttggaaagagttgatctcaggaagaaacaataaggaggaaataataaatacaatccacatgcaacgggaacattccaaactaaaaagataatccccattacattagatcacaaattaggtcgaaaaaagaataactagcagagctttacaaattacaaaccataaggcaaagaagagtgcccacaacacaaattaagttgtagaaaagaaatccacatccatcatcatcattatcatcctaatgtaataataactcgatataaaaaataagaaatattaaaagagagaagaaaaagaaaacactaccataaaccaccaaccaaaggaatcatcatcagtagagagcgaaaaggccaccaaccaagaacacatttcagatttcatgaaaaatattaatgaagccgaagtggagcagtgaaattttcgtctaccaaccgtggaagaagaaggaaaagaaagacttacactactactgcatcagacaggaattgcatctacgttcgatgaatcttcgcatctcaatacaattccttcaagacttgcagggaatgtgcacttactccattgccaaccagctgctaatggttctgtcgacgggactatcattaacacgttatcgtttctctgaaccactccaatcacacttactgtgcttccttctttgacgtaga

SEQ ID NO: 32324 - DNA, 403 bp, Arabidopsis thaliana landsberg
taacccgatctcccgagcagatctaccatgcaagagcagtgttcgatggtcgggattataccataacgagacctcataagatcaaagtatttccacccttcttggacaagacctgagttcttacagacagacaagacagaggtaaacgttatagcatctggttccatgcccgcttcaagcatcacactgaaagccgcgatcccttcttcgcctcgcccaaacatggcataacccatgagcatacagttccaagaagctagcgatttgttcttaatgccccagaaaatctcaatcgcactttgcagatcccctgattttccatacatatctactagtgcagttgcaacatatgcatcgcagatcaaatttttcctcaaacagaaaccgtgaacctctttgccac

SEQ ID NO: 32325 - DNA, 772 bp, Arabidopsis thaliana landsberg
  unsure (1)..(772): unsure at all n locations
actcttcttcatacgttgcatcaacgttcctttcccgccaagaaacagagcattgtacgatgtcgtcacagtcttgttcccaccggttccagctacgttgaagagcactctgatgaatagctcttcaacaagcttgtccgcaactctttgccactttgagataatcttgttacccacgtcttgttgtaacgttttggtgacggtaaagacggtcacggtcttattatcaggaacaagcttgatcttccatgctagaattatccggaaactccctccagcgcctcctctaatagcccaaaataggtcctcacccatcgcggctctatcgagtaatttaccatttgcatcaaccatctttacgtctannnnnnnnnnnnnnnnnnnnncatacttcctcatcaaggtaccgtatccaccgcctgtcatatacccacctatgcctacacttgtgcacaaacccgcgggaaatccatggatcttgctcttctctgcaattctgcagttaaaaggtaaaaacgttaacagaattatcaagaagatgcggtgttacccaaaaaaaaaaaaaaaagccaaaagattcaacagtaggatacttccttctgcatttcttttgtcaaaaaaatgacccgcaagttggcctgtcaatttagtattgtcatgttgtcgctcttgttacatatatagacttatacctgcgtatgtttatataggagataagtataaatttaaaaaataacccgcaacnataagcatgtcaatttgattatgcttt

SEQ ID NO: 32326 - DNA, 725 bp, Arabidopsis thaliana landsberg
atttgaacagctcctaagaacgcgcctaatacatttggaagctgcaatagttcaaaaaacgtgtaaaggacattaatattccatttattgtcgacaaaagaagttggcaaagaaaaattataaaagggaaattaccgacatcacaacataacaaattagtttttttgtttctagtatttgctattgtactctcaattccttagcacatttagtgggggtccaattatttatataatgctaataataaagcgaaaaatgtgtacggttcaaaatcatatagtttgaatgaggaaaaaaaagacaaaggtaactactgtttttactttattaaagaaccacccataataattaatctaatcatataatgttgggctgtcctttataatatactttgaaataatcgaaacagaataaaataagagaattatttgagaattgtataaataaactcacggcaacgtagaagtctttaatagcgagaccgtagaagagccacgtgacggcgctaattgtaagaaacaacgataaagagaaaggcataaactccacacttcttgttcgtaccaccactctctgcaccaaaattagtagtttttaactattttaatatttcccaacgtgcaaaaacctaaataggaaaggagagacaagacacaacatacattaattataggaatatttatttattatgttcttcggaggtcatgtaacgtaaaatattgctt

SEQ ID NO: 32327 - DNA, 1204 bp, Arabidopsis thaliana landsberg
  unsure (1)..(1204): unsure at all n locations
tgaatcaagaaagaaaaaaatggaacaagaagatttctatttccctgacaccgatcttgatctcagcttcacatccaccactaccgaccgtacattcgcctcctcgagcgctcgcacaagtctaacattaagcttcaacgacagactctctacttcctctgcagtcacaacctcatccacctcctcctcctccgtcaaccaccgtcgtcatgatcctcactggtcagcaatcaaatcagcagaacttctctcctccgacggaaacatccacctccgccacctgaaacttatacgccacctcggcaccggaaacctaggccgagtgttcctctgtaacctcggtgactcttccgaaagattcgttttaaannnnnnnnnnnnnnnnnnnnnnnnnnnngagaagaagctctctcaggtcgagacggaggcagagatcctctccttgctggaccacccttttcttcctacgctctatgctcgtatcgacgagtctcactacacgtgtctcctcattgattatgctcccaatggagacttacattccttgttacgcaagcaacctggtaaccgtttaccgattcagccggttagattctttgccgccgaagttctcgttgcattagagtaccttcacgcaatgggaatcgtataccgcgatcttaaacctgaaaacgttttgcttcgtgaagacggacacgtcatgttgtcggattttgatctttgtttcaaatccgacgttgtccctacttttaaatctcgtcgctaccggagatcttcttcatctccgtcgcttcgtcgtagaagaagcggttgcttctccgttgctgcggagaaaaagtacgagagagaggagattgtttcagagtttgcggcagagcctgtaacggcgttttcaagatcttgtgtcggaacacatgagtatcttgcgccggagctagtttccggcaacggacacggaagcggagtagactggtgggcgttcggaatattcctttacgagttattgtacggtacgacgccgtttaagggagagagtaaagagcaaacactgcggaatatagtatcgaccactaagaccgcgagtttccatttggacggtgatttagatgaagctagggacttgattgagaagcttttggttaaggacccaagggaaaaggctaggatgctcccagggggtgctgcaaggatatttaaaacgttt

SEQ ID NO: 32328 - DNA, 800 bp, Arabidopsis thaliana landsberg
acctcatatcagcatcgttgcgaatcaaatgaggttttgttgttttacaagaaattcaacacgatcaccaaatccttgagtcattatcatattcagatttcagagtctcctaccataatcatatttatggttcgactgtacattattactgtttaaaattgatttgatttttgaaaagttaaaaactaatagttgactaaaaaattcataaacaaatatatactttttaaagagatacgttttgattaataacaaaaaggaaatatatacattaagtattataattaatatacttataactaaaaatcactattataagtaacaatatctctaaaactttgaatggccattaaatttttcaaaaatagatagaagaaagaattttttaaaaaaagatatatccaagagatttccaactatgataaagcaaatatgtcataattatatttattggcttatcgcgacacgatttccagattcttattattattttgtagtgtaatttgctttaataactctttaactagtaactaatttactactaattgtttttaggaagaatcttttccttacaaaatagtactaatattagtcaactattttcagcacaggttaagtacagtggatcccaacgtctacaaaaaaaagaccacgtgacgtgatatatctccaaacaccaaggacaaaactgtcattcaccaagctagcacctacgctctttcaattagctgagccgctactactatcattgttcacatttgagctgtggagcctttcgaaatcaatcgcgcgaatacacc

SEQ ID NO: 32329 - DNA, 5561 bp, Arabidopsis thaliana landsberg
  unsure (1)..(5561): unsure at all n locations
cttgttcttaaattttctgagagcaagcactctttaagtttattattaactttggacatggttggtctatctgatgaagagtggcttacgcatgacattgctagttcaagaatcctccagactgtgtttgagtcgtaatctccattaaggtttgtgtcgacgattttttcgatgtctcctctgcttataagaatctttacccattctgctatatgagctttttctcgggttagttcaatcactgatcggtttgtgatgatttcgatgagtactattccgaaactgtagacgtcgctcttctcgtttaaccaatttgttaggtaatatctgcaagaagttgaagtttatggaacttaatgaaggaaaaaaacaagttcaagttacattacgtagctgtctatgaattagagaacttactcaggatcaagatatccgggtgttcctgcaacaaccgttgccacttgagtttcagctccgacagaaaacgatcttgaaagtccaaaatccgcgagtttggcttcgaaacgattatctaatagtatgttcgtacttttgacatctctatgaaccattggtggctcacacccaacatgcaaatgtgaataaaagaagaagagggttttcttactgaataatacttttcattaacactctcccaaacccacgatgaatacaaagagcttatacttatactacaaaaagaaccttctggatccttatttgcagtcaaggatctggttacacttgtcaatcatctagccactctcttcttctgatgtgataggactgaaacggttacatagtacgatggtcggagagtcagctggttgactctgcttcttctgcaaattctgcaaactctgttttgtctgaccgtgatgttgagaggaactcttgacttggacattgttttgttgggcttgtgattgggctgactgggcttgtgtcttgtcacttacatattgaacctcagggaaagaggtaagggagcctcgggaagaggcgggacggacttctgcggtgtaaacaggcgcaatcatcatagcataaccaacaccgataccggctacaaaacggccaaccattatgaaagggtagtttgtggcaaagcccattagtagggctccgcaaaagaagaagaatcctgccaacactattgtatatcgtcttccgatccaatcagaagttctaccagctgctcctgaaccgatcagagagtagatgtttagaattcccataagaatctcaagttgtacatcagacagcttcaaatcgtcttttatgaaaattgcagctccactcatcactccaatatctgcaacatccataaaatgtgaggatgattatctaaaccgttaaaccaaaccaaatctgaaatttgatcgttagagaatgattagaagaccaaccataaccaaggatgatagaagtcatggaggctaagattgcacaagcaaaagcaaatcggcttctattccctcttggcggctcggactcggcaacaacaacacctcgttcttctcctgaggaactcattgtgtccaccgcgattgtaaaacttacggtgaaaacgtaattagtaaggagaagagagagtgatattagcagatgaactttgtttcttgtgagacacgagacctattgaaagatgaagagatttaaatagatgaatgatactcacaactgaagccaaccaataactgaatgtttaaacaataaaaaacattcagttacttaaaacggtttaaaaagtttcagaggataggaaatcggattagaagatatcaagagacgcaggttttttctctcaactacaagttttgtcctaaaattggcagtttacagtaagaccagatcatttaagattttaagttttgtctcacttcttacgttttttttttgtgttattttcttttctaaacttagaaacataagtaaataggcatctacacgtatcagattgttataaatctaaatataaacagtacaagtaagaattgtgtagatacatgcaataagattgctcactctctttttactgatgcttaatttgtttcacataggccaatgtttatatccattcgttactagagtcaagaaatttccgcatttttgaggctccgagcaacgtacaatccttgtcaactccaataccagttttttcaatgataatttgatttgagcggacaaaggcttctctaagtctactttgacaagcactctagccatgtctaagcgtgtgcatctctctcgacgggagttccaaccaggctgccccacaatattatggaggggtcgtaccttacagagttgcaagtcaagggattgacatctatatataagaacaccaaaaacattgtctcattttaggaatcgacacttatctagtatcttaaagacttatcaaaacctatatgtaatcggaaaactccaaaacaagaatattcaaaataaagataaaagagaactaaaataaaacccaacatggagaagctccctagttcctacatcagcaagaatctcaaacataggattgaacttggtaactgaattcgatgcatctcaatgatgtaaagagagttccacgagcctgaattttggatatatactttttaagagtcggctatcaacgttgcaagaaagcacttatagggctgcgttttttgaaacttttaaaattatttgatctagtctcaaacttcaaatttcagattctctgatcaaagatgcgtataatgtaacaaaggttttttggtgtataaaatttaaaattcatgcaaaataaaaaatcttttaagataattcatttttgtttgtatttctatttaagtttttagaattgtatcttacttttatcttgattaggtgattttatcaaatatagatttgaatcgaacatgcataacaattatttcactaagttagcatcacatatatatattttttttacaatagaatacatcaaactttaaatattaaagacaacatgtacatgtttttttctcttgaataactaagaagtcataggccaaggttgagatccatacattctcttagtccggtgaccaaagaattttatatggttttctcccgagtgccactcaagccagcgatttttaagttttgcatgagaaatagcaaaaggttagatcaaagtggcaaaatgtttaaaagatttaagtgatgcatatttatgtccatgtccatgtctgtgacctgcattgaagtatatgttaagcttcttcttgccacctcccttcttcaagtgtttcttctgacgttgtccaggatctgttcaaaaatgaaattatcacatggagatctcaatttccataatcgaaatataccaaaagcaaatgccaaaaatacatcaatcatgttcctaaaaattaactatcaagcgccgatttatgcgaataattgttaccaaaacaaacacagctcgaatccatctaactcttatctttgatttacctcttaccatggcttgatacttagatgagactaagcatgcaaagctttctcattcagtagctgagttgcatatgtccacactatacggtccaatggacccttcagaaaaatcaacttcattgaatttttgacgttcatatgatcattaagatcatctccaaagtgagtaggccaccactgtatcagtttttcaacagttaatctctcaagtttatgtcnnnnnnnnnnnnnnnnnnnnnnnnnnnnntcaacaaaatccaaaaaattgtatatgagtaagcaccttacatcactaggtaagaaacaagagtaacattattgagggtgtccagcgggagacttttattatccacatcaagattgaaatcattctagctattgtgttaaaaatatcaaacatgagtcatttatcatcgtgaaaatcatagttgtaagtatcaggagaaagtcaatgaatatttaggccattgttcaaagagcctttgactttatcaacctatttctcacaatctccattggtttaaggtaattgcttggagtcatgaaacaaaacatttctaaagcgcaaaatatttagtcttttccaagacttgataaatgcttagttgtgctagaattagcacttgtacatgttatcacttatcactagtaaaaatatatagtaaaacctctataaattaatgttaggaccatgatattttattaatcaatatttattaatttaagtgaaaattaataaatattttttttaattgttaaatgttttttaaaaatatcatttaaagcaatttgatcttaataaaatgaatgctttgaatgttataaattttgtagttttatacgtaaccatctaatatttagaggaaaaaacaatttttgaacaatgaataggaaagattatagaattcacatatttttttaaaaaaaaatatgtgttttcaaatttataaatagtgacattaattttgtatttgaatatcctatatgactattagtaatgtaatgcatattcaaaatttgaaaacttacaaagagttttggctatttacatgattattaatctatgatattattgggactatatttatacacattgattttttaaaagttattatcttatagaatttggtttatttttacactgagcaaactcgagaccagcaaagattaaatttatcgtatttattaattcatcaagtattaatttatagaggttctactgtaataagatttttcaaagagagtgaaaattatatatcactatattactacaatataaaacaatatccaactctggtaatttaatacaactagctattagataaactgcaagggcaatgattggagctgtgaatcaagtctcaagactcattacagtagtattggttgcaaattaatttgattgtctgtatatctacacaattctaccttcaatgtttagatctagattattattttttgtatgtacacatgtattgatgcctatctacctctgtttctaactttggaaacaacaacaacaacaacaacaaaaaaacaaacccaaaaaaggaggctaatcttaacgtaaaatgccaaatttaggacaaaaatgtggatatgagaaagaaaaaacttgcatctctcgatacatatttctaatctaattgatatccttgaaacaattaaaccattttttttttctgtaacaacctaacaggtattcagtttactgaacatacgcttgtttcaaacagttagtattagttggcttcagttgtgagcatcacacatctatttaaacctcattttccaaaaggtttcttaactcacaagtcacaagaaacagttttcacgtattactatcagattctcttcaattctcctcaacaatttcatttttcaccttcatatttacaatcaccacggaaacgatgaattcatcgggagttgaacaaggtgttgtgattgccgaatctgagccaccgagggggaatagaagccgatatgcttttgcttgtgcaatcttagcctccatgacttctatcattcctgggtaccgttcgtcttcttttaaattaaccatcaattcacatttggtttggttt

SEQ ID NO: 32330 - DNA, 682 bp, Arabidopsis thaliana landsberg
tttataggctccaggggcggtggccgtgaatttgggatggcgcggtagcgtcgaagagagaggagagcactgtcgcaagaaattggtggcttttaccgtggcgagctcaccggcaatcaccggacatgtgtaatatgagctactgcgacgtggtaaggcaccaaggcacgtgacgcatggttgatcagtggctaactccggtgagttcatctgaattggccgtgagttaggcggacacggcggccggagtgaaacagtggctcaagttcatccacaaggcgatatttcttaaccttctgcttcatccatgtgcattgggcacgaatcaccgcggctgcccgaatccaggcgcacggctcatcgacggcgaggttcagtggattgggatatttgtggtgcactgtaccattgaatcctcattcagtcaacctgaaatcgcaagttgaagggagatctgctcctaatatcatgtactgacgcgacctgtcgtttgtacaaatgttgtagccctatgatccagctacaaccttgctatagcaactataggcaaataatgactggatcatagtcgaatcccagctcaaaggttgcccaacttcactgtcatgcgatattcagtctgtgcattatttgacagccagacttcagacccatttaactcctaattttgtacaataccaag

SEQ ID NO: 32331 - DNA, 2391 bp, Arabidopsis thaliana landsberg
  unsure (1)..(2391): unsure at all n locations
gatagtgtagttcggtagttataccttctttaaccaactgaaaaaaccgatcataatctaaaccggatgccaaataaattaagattgttgtaaatgaaagacttacttgactcgctnnnnnnnnnnnnnnnnnnnnatgtctacagagagtttactaagttgaaaggaaactacttcctaacatacagagacatcgcctttaatggcgttatcactttcaggaaatttccacccactttccaacccttaaaaaggacaaatcctctctaattcctagtcttgtagattgtgatgtgtgtggctgtgtacccacttatttcctcacgaagattttttgggtcatgactcttgtctagattctaacccattttgtgggttttagtgtcctatttctttttgctttcataagaagcaaaaacttggaattgtgtgtcatacccattttcccctgttcttgttctgttttctactagttgtgtctgaaagtaaagtcctctgtttttgctctgtttatgtcgtctctgaactcctacaatggcgtttaatcacagaaagatgcttctttcatgtctacagtttaaagatttacgcttttgtttccggcaataccctcccccgccaccaccaccaccgccaccgagggagctctctctcctactccccacctcgatctgcgtcgtcggctcaatcatactctttctatttctagtcttcttcctctacctgcacatcacgcaacaacggcggatttcagccgccagcgtaactcccggtgacacaaaccaacaggaagatgaggacgaaacagaggagagagatttctccgactttcatcacgtttggaaatcccaaccgtcggtctccaccgttccgcgatcaactcgatcacagtcgttggattcaaaaagggagaagggataatcgacggcacagaatgctctgtctgcttaaacgagtttgaagaagacgagtcgctgagactgttaccaaagtgtagccatgcctttcatctaaattgcatcgacacttggttgctctctcacaagaactgtcctttatgtcgtgcccctgtacttcttatcactgaaccacctcatcaagaaacagagacgaatcatcaaccagattctgaatcgagcaatgacctccgtggaagacaagacagttccagatctagaagaaaccataacatttttcttccaagggcacaaagtgatttggcaaactactgtggctcaggaagagtagaaaacgtgagaagatcgttttcaattggaggaagcttatcactttgcgatggtattaacaatgctactagaagtggaagacagttctataccagcttcagtgctaacttgttctcatcatcaagaagagtaaggaacgaacaaccgattccacaaaaccaaatgccatccgtaactggtaacaccagttaattggtgtaactacattgaagcttaatgtaatatctagtgtgttatatacagtatctgaaataaatcgaaactttcaatgtttcaatattatatgatcaacgagcagcaaaaccaaagaaattaaggaaaataagttctattaaacaggagagagtttcgttggggtatttcatcgaacacttcaaggctaactaaaccaaagtacctaacaactgaaaataaaacgagccaaagctcaacacttacaagaacccattactactaaaacgcaaatcaaaatccagaaatagagttccattgacgaactaaatcaaaagatataaaccataacaacagtcttcaagctctttctcctctgattctcctcgcgagctggatatccttaggcatgatggtgaccctcttagcgtgaatggcgcaaaggttagtgtcttcaaacaaaccaacaaggtaagcctcagcagcctcttgtaaagcagcaacagcactgctctgaaacctcagatccgtcttgaaatcctgagctatctcacgaaccagacgctggaaaggaagcttacggatcagaagctcagtgctcttctgatacttcctgatctctctcaaggcaacagttcctggacggaatctatgcggcttcttcactcctccggtggccggagcagatttccttgccgccttggttgcgagttgctttcttggtgctttgcctcctgtggatttcctcgcggtttgcttagtacgagccatttcgaaatcaaacaaagactaatcgaccgatcgaattttcttcttgtggaggatgcgaatgagaaattttgtagtgaagatcaacgcagaagagggactgcttttatggggagagaaatttggcggtgaggtgaaaaaaacatgggagggagttttgtttttggagggaaagttgtattcttgtccgttggattaaataatc

SEQ ID NO: 32332 - DNA, 1115 bp, Arabidopsis thaliana landsberg
tgtacattcaaaaccttagggaaagaaagaaagcgtttagcttataagaagaagaataaagaacctcggcaaagtgtttcctcctggttctgctcacagaacaaaacaaaaagacagccacataagaaggaggaacttgttggtttgtaaatattgtttgtttgttccaattcctcactcttaaagacttaaaagctccaagattttagattatctttagtaagtaatatggataataaaaatagaaatgagagagatcgttcatgagaattggagatacagacgcattctctcaaatcatgaatccatgtgggaaggaagtaggatgtgattacttctttagatgtctccctctgcatgtgacttctgtcttctagtttagattttctccaaattatccttctttttatttcttcccattttttctaaaatacattgcaagcactattaaatataatgggaaataaaggaggccatcaaaataaatgaaaataagttttcttctctatgtttttacatgagcaaaaagaagaaaaacgaagtagttgttacatgaaatttagaaattttgttttcatgtaaacaggttgatagaatcacatgctatgctaatcaacaacgaaattagttggatatggaactacatgctttagcctttagtagttggattgccaactaggactagtttgacttttcttctacgttatctccaaaatttatgtttcctactgaatgatcgaccaaattctaatctagctctagaaagagtaaacaaggctagagttgaaattgaaaaccataacatgataaagggtaaaaccagtttagaagaatcactccacattctagaataaaccatttttatctgacatttaagctagttcattgtgcaaaaaaataaaaactatgagggaggaagcataacattgcttggaagttgaattaaacccgaaaaaaggagaaaattgcagagaataagaaaagaaggaaaagaaaaaacctaactcagagctagcttctcatcatcctcaccagtgaccacgataatctaacttagattctaaataaaacccaccctatttccagactaatgtacaggaaaagaaatgatgttg

SEQ ID NO: 32333 - DNA, 829 bp, Arabidopsis thaliana landsberg
tcatgaggttgtatgaagaagaagcaagacgtagaacaggaacagaggaagacctcagcaaggtggcggctgagacagacgcagcgagctcagtctgtccggagactctattactccttcagagtcacactcgtcgccatggaactccttctggcttctccgatgaggattccgttagacgctagccttcctcatatttcatatgtcttatctcacaggtatgtggatgaggcgtcctgtgcgttcattgttcaaatgagagcattgtaacagagcaaacttatattcgatgtttagaagttaatgcttgtttatttattaattcaggaagtaatgcgagagcctcgtgttgcagccgatggtttcacctatgaagcagatgagttcagaagatggctcaatcacgtaggtggaaaatcaccaatgacaaatcttaggctcgagaaatgcaatctcatcccgaatcttgttcttcgttccgccattaaagactgggtgcaacagcatccataattctgtgattattagtattaggataaatgtggtgttaatcgtgctgtcattcattgaatttgtttgtgtaaaaatctaataaaaagtccgttattcactggaaaaaagtgccgtttcttgtttagtagttttatgcacagacttgtaatttgaatgccccacattgactagattgtgacttcctcacgagacctcaagcggtcaacaagaagaacattgagggtcgccactaaccactgaaagtaactttctgttagattcgtctctgcatatcgggttacagttttcagggaagaaaaaaagatagaaaacgaag

SEQ ID NO: 32334 - DNA, 3380 bp, Arabidopsis thaliana landsberg
  unsure (1)..(3380): unsure at all n locations
gtacctgaaaacaaccaaatatgcaatgcacatgcaatcctaatgcaaaatcatcctaagtatgcaaaacacaccaaaacgactcctaatgagatgaaatgtggatgaaacaatgacaaagtggtgaagaatgaatgcctaaatcatgcaaaatattgacatatcagaagaggacgcttcgtttttgtcgtccacctcgggttcattcttgacgcgcttccaggggttgttgtccccctcttcgtcgtcatcctcgctgtcggatgggaccacctcgacctgagcatatacggggccaggaacttgaccacgagtacggagatacatccgaagcctagtcgggatcctggctacgcagtcgaagttcctccactcccattggaaggtatcactttccatggccctcaccttcatctccactcgagcgatacgggcctcgagagtctgccttttgaggcctagccgctgcctctcatcgcacaagtggtgatgcttatcaacaacctaaatatagaaactgacaagcgtaaagagaggaagaagaagaagcatagtagaggaaagaggaatggatttcgaccttgtccatgaagtcgtacgcctctttttttcctttcgaaagaaagtggaaagtggcgtggggaaagagaacactggtcggtnnnnnnnnnnnnnnnnnnnnnnacagtgggctaccggggtcgagaggacagacggtggaggcttcttcgttttccattcttgtaatgttaccaagtaaatttctgaaatcatactaggaaattttggtggcagattggactcttatttatagagggttaggttttatcttgaaaccaaaaactcagtaattatggcgtgtctgaatggtttaaaccatttttggaaatcgagaaaagacaattgttgcctcttagacgtgaagctttttcttgtttctcgaggaatggaaagggaaaggcaaccgacgcattaaacacgaaaggcccattaaatacaaagtaaaataatcgaggcctaagcccaatagttaagccgaattgattaaacacgagatgggaaattcacgttttaaacgagcttaattctcgcgttctaagagtaacgtctgatcagcctcaaaatcttgaaacttagccatatggtcaaaacatatttaaagacggactttgcaaatccgcgttctaccttagcaaaacccccttaggattataattttaaaaggtttaaaagcctcctcaagcaaacactctatttggaataaaaagcatccttaggcaacgacatacttatctaaatttaatttcaagtttttaaaatgtttgggacaatccccagttaaggtagacgcatccactaagaatctgtagccatctcgggttcaacaacagctgcctcggtttcggttggttcagcggcagggagttgctcagaaggggttcccgactcaagcctagcgtccttttcatcatccgggatgaccacattctcgttgttcacggccggtggagcttctggcaaaataggggctgactcaggaatctctaccggtgtggcaggcacctcgggtgcggtagtatcaaccggctcactagagcctgaagcgaacagttcaagtcaataaaaatcatttatagtagactatgaacaataaaatttcaggtaaaaaagttttccatcccaatctaaacccgattcactcaaagggggtgattcattgaaaaactcttcgaagtgttgaggattgaaggatgaagtaggaaggacagcaaggcgacctctttttcagctaaaacggcttccatttcggacctttcttgttcctcagagaagtcatcttcggtgtttggtccagcaaaagcaagttgcttttgtgctccttgatatctgattctagctttgatctggtcttctcagtttgaataaaaagaatagccccttgaataagttccatcccgcaaactttcacctcttttctggcttttaacgccgacttagccagttcagcatctcgaagcttggtgattgctttgtacttgcccttaagttcggtaaattgattattcgagtcataagcagctttggattcagagagtctgtctcgggtaaccgagagtttgtcctggagtttgtcgtgtctttgatactgatcttgcaactcgccgtttgattttctgagctcggaatagagatggtcaacgcggtcctccagcttttgcttagaatcagagagggagcgaaggtcagcttcgagggaagaaaatttgcccttccaggaggagggggacccatcgatcgagatggaggagatgatcggggagagcgatcagtccgagcctttgacttatctctcccgggagaagagctgccacgagctagtctctctctcttcttgcggatcaactcggcaattggtttgctgctcaacttatctcgggaggaaggccgaggagaatcatgacgaggggatcgatctcttcgaggtgaacgtccgcggcgaccttcacgatgaggagtaagtatgaaagctccagcagatctggccccttcgccactgccatcatcaaccaactgagtcctgctgtattctttcttatcaatgacagacgtgaggaataatttgtttgcttcgcaagcctcggccatcggcttggccaacgttttgcgccgggaagcaatagcccgggccaaagtcccatgaggtatgggaggaggaggtggaagatgatggagttgtccaggaggactcattctgaggttccggttagcttccataaaccaatcgagggtaaacgagttccaaagggtttcgccttcgataaccactttgaagaatgcaaagaattcttcagtcggaagggtcggagcaattcgagttaggcaataacgaatataaataaggcaccgaagtcttcttataaggttacagcaacacaagatttaccagaactggtaaatatttcaataataaattaacagcagcaagtagtaaatgtttgaagagtagattgagaacgaaatagacataccaagattcttgtcaagagtcttggtgaattggttaagagctggagggaccttcaacctctgcttcaggatcctcttttgcctttgaagacggatggatttgggccatttgatgtagcgagagagatccttcttaggaggtaaagctccaccaataccgaattgcttaggcctcctttcgaatagagggtttgaaactttctcctggagaaatcagaaatcaaaacacaaaacttcagcacgaaagaaaaaaacatcaacaaagaacacattgaatgttcgaaaacctaaaaaagaagaagagaattggaaatgaaacataccgcggccttcttcttagcagctaccttcac

SEQ ID NO: 32335 - DNA, 829 bp, Arabidopsis thaliana landsberg
agtttaaatattaacaaaatttaaaacttcaatttttttaattttttattgatatttaaagctttttatggtcttaaaaacttttaatatgcaatatgttaaaattttaagtttttagttatggataataaagaaccggagtagaccgaataacacttttaatattgggtgtctcatatatgaaggttcctgctcgttgatatggactattattgggggcttttttatagtatgagtctacacgatttcctaattttgagcaatgtgggattttatacacttatttttttcatcgtttgagtattatatgtctgttctaaaaaatttgaattacatcagatgcagaaaaattaaatattttattaactatatgtattttataaataaagtcaaaataaattagagataagaacaaatatagtgacataaaattatatgtttatatttaatgttgatattgagattttagaaaattagccttaatcgaatatatttcaattaagaaagatttaattaaggagaaaaatttaggaaagagttaattgaaatatttaatgaaaattaacaatttttaaatttttaggcatataatatttggttgagattaatttgtaaggactaatattgacaatagtaaaaaagtaagggatttttggccaaaaaccctatcaaaaatgtattttattgatagaaaacctatcattcatattggtgagaaaagcttttaataattatttaattataaattaggattttggcttttaaaaagcggattttttcaaacctcccattcccaatattatattaaatcgggggggcacttatagtt

SEQ ID NO: 32336 - DNA, 3900 bp, Arabidopsis thaliana landsberg
tagacattccctatgattatgaatataggcattttatagttagatgagtgtaatggtcaagtcgtggtacaaggggacccaacaaggttttgattctagttaaagcaaaattgggccaagcaatagacttttatttcgctaatttgctttttgcatgactttataaacaagaaaacagaccaaaagaagataaattgttataaaaagattagcttaaaaagcgaagctaaaaagatcgtaccgatattaacatgggggaggcaaaagccttcatcaaaagatgcagggagagaggagttgtagtgaaaccagccacatatctcaaaagcagttcccactacttttttcatatttataattcaaaaaaacaatactatataaacgttagtatcaatggatttaactatttatttcaattatttactttttatgggctgttttctaaataaaaacatgatgggtaagcggggccatgaacattcgtaggtatatgcatgtgtaatccatggcatacatcccaacattatatatgtctgaatggcccaaaagactggtcccttcatctctttgataaagcaaaatgtgaaagagccattattaaacaggcaacatatactactggtttatacttctcaagaacgacaactgaataagtataatgttgtgaaattaatcttcttgtataaaacattgtttttttgtctttgtttcttgtaacaaaggccggtaccaataagtgaatattgcaattagatagcatcgccaaattcaatcggttagttggctcatattagtgatccatgtttagcctaataatattgtactaaaacacagatgatgcatgcagttgagaaagtatttttgaggtctaatcgtatattccagtgttttgagtttgataatgtataaatgtaaaataagcctttcttgtgtgagagtctgttcacccctaatattaatcgctcactaggatcatatatatgtaaacataccttaataagatcgattatgaatgatcaaaagcatgacaatatacatttcagaagcgtgcaagccactagaggtgcattcacgagattccaactaagagattccctaaccaaagtagctgtcttaagattctatttatatatattcacgaaccgagaagaagtgaagtagtgaacatgcttttattagaaacatggaatattatatctaacaaaaaaaacatggaataattatagaacttaatcagtattagttgttgttgaatttgatatttattgctagtcttattcatttatactatattttttccaccattataattccagtagttcaatgatcctccaatgtaacagtaactaatttacatataaagctcacgtatctagaaagaaactcacttactagttttgagcttttcgtgtaacatagaaccatacattcattatagaggaaaataaaccctattatttcggataaacaaaagtaatcacaaatttcattccaaaatggatttttaaaattaataaataccaaagacaaaacaaaaaatcacgaattgtatgaaccttgatacccacctcaatgatcataattacttaattagtcctattccaaaatccaaattcatattatgaactgcattatcatcataatcgtaactctctcaatctcaaagcccatcatcaaccatcaccacacgtgtgaaaccatctcaagtaaaaatcgaacttgcgaattccttatgaaaaaataaaaacaaccctttacgttggccgccacgcactagcccaaaccaccggctgatctctccaacaaaggaatattccggcggcatcaggacactgtaccatcgaccaaacaccttctttatatctcctcaacaaagctctgacatcatccgccacctcatcactataccccaccgctccaaacccactattcctcatcctcctcgaccacttcctcgctgtctctcgcctctccgtggaatccgacggctcacaagccacaagatcaacgatcgcacgtcccgctgcacgctctagcatcaacctctcgttgctcgtccttggaaaactctcttcccatgactcgaagcaaaccctaaaccatcgtaaacattctccaaaccctctcaagaactcatcatcaaagccaccttcttcttctccgacaagatcagcttcttcttctacgaccgtcacaatcctcggtcttaaccgtcggaaactcgatatcacagcgtctctagggcttccacgtgaagcgatcccatgcatcgcgcctacgcagttaatggccaagacttcgtctggtttaacgtcgagttcgttgagatcaaactcagataaatctccaacgtgatgaataatgttaaatttgaaaggaactcccataagcctagcgaatttctccattcggtttccgatctctttcatcatccgatgcgacgccgtttgatcgttgacaaacttgttggccacgacaactgtggttagccttaggtgaggcgtgtcgtctgatcttgtggctaaagcttctagaagagtcggccattgagtgcaaaacgtggagcttatgtcaacgatgtggatctttgcctctccgtctactgcttccaagattgctccgtttgccgccacgtgtccaaacgtggcccaggggctaacttcttggaactttagtacagtttttcgcgttgactcgaaggagcaagtcttctctgtggctgcagctgttaccatggttcggtagcatcgttcgcctgaaccggtcatgcggttgaagagagcttggaggaagtaagaagccagtttttgctcggtgtctccgtacggagaagagagctcgttgagcgtccataggatttgttgcgcacgtgcagtgtctttgtcggagaaggcacgtgccgcttcaagaaggaccgagtctgcccacttggcattggctgagaagtcgaaggacggaggagtttgaggtatggagaacgcggaagggtcattatggtggccggaggaggagtaaggcgaggctaaagctgcggctgcggcggtggaggaaggggttgatgatgtggcgggatggtattgggtgggagtagtgaaaggagagtagtaagtattaggattgttgtggttgtgatggttgtggtgagaagaagaagaggaaaggtcttcttcatccatgaaaaagttgaagcattcttcgacgacgtcgttttgtggaaagttgtagtgataagcagtttgtggagagccagtagtggtggtggaagttctgcttaacgaagattgatttgtaatgatactatcggattgttgttgttgttggagactgactagtctaaagagagtatccattttttttttttaatgaataagaaaatgaatagaagaaagggagacccacaatatctaagatttaatactttgttgtgtatattgcatcagcatcatgtgttgtcttgtatatttatatatgtatattttttttcttgtgtttctcggtgggagtgggtaaatctagatgaaggtgagttgtagagaatgggtttggtggatttgtgagtttttattagtaatttaaaagactagagaataaaaaaagagcatgaaaagaggattttttgcatcgaattgttgtcccatgtttatcttttggactttgtagactgtttgaatctaattgggtttagtgaaaacataattagagagagaagagaccacttttgaacaatattcatctctctctttattttttggggcaaatcaagaatgtgttttgtttttactacaaccctatagctaactgagattatggacaacaataatgatcctactttttgcagtaatatagaaaactactttaaaatgttgatttaacttacgaaaaattacagagcaaatgggt

SEQ ID NO: 32337 - DNA, 1790 bp, Arabidopsis thaliana landsberg
aggtataatcctccatggacgttaccaccgtttaggaccaatgaggtcatgattcctgttgaatgaatttgattcaaagtttcctgcttttggtttcaaagaacttgtttttattttgtttcactgtgtttgtagttgtaagaagcataacaataatgtatacaaatctgagcttttgaagttaaatactataaaatgaattgctaaagaagttgcagaaatgcttggattgagtttattcaaaaacggggtttgatcattttaaccagagaaaagcttaaagacaatgacaattaagttaaagagcatgagaggaagcctcatgtaatgacaggcgtggatgagaccaatgatttggcctttgagagagtttcttttgcccgtttggtggagttctgcgagcgtccatcctttgggagctagaaaacggtcttcgtttaagatagccagtgcgtttgcaaatagtagcaatccttccattagtgtccagaaccccatgatttctctgtggaaactggagaggatagaaaacaatcaagacttatgcggcaagagtggtaacatatactcttggtaacatacagtgttaagtaaacatggaacatttgtggtactatatgcaagtgatcaagcttttgaatatttggtgttcttaaaaataaagaactcttagcttagctttgtacctaaacgttctcagaagaaagcaaagaaggtagcaaggccaaatcttgagtataacacattaatcaacaagaaccaattgcaatactactatgacgctatacagtgatctggacaggtcctagttatctatttggtgtattgaaagacaaaactgttttcctgtctttcagttgttgtcttgaaattgcattaaaactcagagcacctattaccatcaaaccgagtaacaatctcctcaggaatagaatcacacaagcaactccataatagcaagaaagctaagaagccttagacacatagttctctcataagatgggaaactcaaacacaaaatttggatgcttatgagagtttagttatcattctatgtgaagaagacagtagatcagccttggacgctattaaacaagaccatcatatctaattcttagtctaagagaatgtgaaatttgagagattatacaatatagagcaaatgcatacctagtaaaggaaacttgacgtttagctcaagtttgttagaatctcctgtcctcaatatctgcagaatcggataaaacagatttcgttgatcagtctatgtcctggattcactttcttaagacaaattgatactagattcagaaactgaagtcatccaactccttgtctaaatagataaatcaatttgattaccaacaatcgttaactttaatttcatcgaaagatcgaagattatagtaaaattcaagcaagctgatcgattgatctcactaaaagaaataaaacccaaatctcgtgaccagatttccagaagaagaggaaaaacaaaaggatcgattttttcatcaaaaaaattgatagctgaatcaaaagtaaaaagttcaattttttccgggaaagtgtcattcgccggaaatgtgcagttggagagagatacttacaggtgatgaaaatcggatttgagatcttgttgaagagacgaagccaacgatatctgtttttcacattctatacttttttaaccatcattgaagaataaattcataaccgggttgacccggttttgactttttccggtcaggacccgatcacatggctcagtgaaattgaaaacatacatt

SEQ ID NO: 32338 - DNA, 883 bp, Arabidopsis thaliana landsberg
tcaagacaaagacgacaaaagaaccttttagcacagagaaaggagatgtaaagagacatgtaagaagatgctatccataagactattgtgagaagaaatatagattcacgtcattttaaagttaattctaattgataactatgttttagacggtatacattcaaagttgaattcaaaaaagcagtatgaaaaataacatcaaggtggtatcattgaaagaacagttgatcatgttaatgacttgttttaatagtaaatatctgttttaaaatcaaactttaaaaatcagttttgacttcttatggtatatgaaaaataaccactaatagttaactctttcaaaaattgataaatgaatgatggcaaaccatgtttcagatatggtttctaacattaattttggttcgaatcatcaatttctgatccttacaattcgtgctcttctttttttaccatgtacaaacaattatttaaacgttttaaaacttcaaataatctcccaattctctatgtgtgcttaaaaccattgttgatcaaccattactatagtttaaaaacaacattattgtcatttacctatatttttggtcatatcgcctaaatacaataatcgtttttaatacttgataagaaacaagtggatataaacaaaaattaagcgctcgatattttcagctgtctatgttagctgtcatattagttgtcatgactttttacctttcaattgaaagagaagtttatcatgttaacgacttgtttaaaagcaaatatatgcttcaaataaaactttaaaaatcagaactcacttcttatgaagcttgaaaaataacaactattagttaactactcaaagaattgataaatgaaagaatggcaaacccat

SEQ ID NO: 32339 - DNA, 761 bp, Arabidopsis thaliana landsberg
agataggagaaagctaacttataaggacggttaaggcggtcatcatataatctaactattattacaagttatatctcaatatcaatatgttcttcaccatcgtttgatagtgcagttccgaaacagtaaactatcggctggcggactggtcaactgaagctgattactcccttttagtcaatatgaggggtaaataaacccaagaaccactttcactttgaatttacataataacttaataaaagaaaaaaaaaaaaactatgatagaaaaattagcatattcttccattagtttcgcaaatgcgccgacaacgtttttgacttcaaaaacaaaagtagaactcgtgtgtgaaaagcaagattctttcctttctggtataatgttctaatttgtaattaaaatatcgaatattgcttttgaaaggatcatatatataaatctgacccaaaaaaaaaagctatatgtcttagaacatgtttcattatctatttcaaaaagatatacacaaaaagtaaccaaaatttatgttgtaagaacttaacatgtttcatgcaataaaatatatgcacacgtatggaaattccataatatagaaaaccctattttcaaagttgtagcgtgcataaaaggttagtttgacttttttgttatcatatttagagaaattgaactggagacaaaaaggctttttcacattgtaatgaaccgagaaagatgaagaaaacttaaaatctgatgctaaataattaggaaaaaggtg

SEQ ID NO: 32340 - DNA, 1564 bp, Arabidopsis thaliana landsberg
aagggtcgcgagtataatataaagaactgtactcgtggaagttgaaactggccatgagctgtcttaaggcaaagaagacctaacgtgaccgctgcccgtaagaatatctcaaacgctgcccgaaatctgagagaggagagttccttaatccggaccagttagactttttttttgtttgttgtctaaagtacaacaaagcaatctcacagctgtctaatattgttttattcatctttatataattttgtgcttaattatataggatatacttttcaaatttaatgcaaccacaaatattttacaaaataacgtattaatgggatagtccatgttggtgtgttatggcattttttagagtgtatgaggtataagaattaagaaaattattggctatgaattattgaaatattttactgcacctatgattttcaatacatgtgtaccaaactggtcttttaaaaaattctattaatttaatttttgccgtatatatgtatcaatttatgatacttaattagtaatatgatttttaccaatcttaaattctccttatggacgaaaaaaattaaaaacatcctcttatggactccaccgacaagataattactatttgacacgtggcattcacaatttattaatgctaataagtaattagaatttgattattccggtattccccgttccatagagttttaattatttttttcgaaaataaatgatgttttccatctatatatacatttttgcaaccattttgtgaaataaatcctgtagttcggacttatttacaatggttgccactggattttaatgtttgtttttgataattaaaaagaaaatcttcgaattaaatatttgacatttaacaatcttcccaaaatctctccacattaactacatgattatttactaaaataatacatctaaaatatttaatatcatttaattactacaaaattattatttttgatattgtttttctacatgactataacaattcgattataatcatcaaaccgcacaaatatttgatagcatttaattactacaaaattacaaaatatttaaacaatgattcataaacatatcataaatgagatcaatgagttttttttacgggacaggttggcgggacgggtttgataggacgttacttaataacaattgtaaactataaaataaaaatattttatagatagatataatttgtaaacttttatatatattaacttaaaaaaataaattgtccccgcggtataccgcgggttaaaatctagtattattgaagatttcatcaaataagtacaaacttcaatatagtatataacattgtcttcatacacaagttaaatctcgcacaaaaccaggagatctagtcacttcctaaaaatgggtgaccttttcaaatctcagggttccttttaatatttcggatttttgataccgacgaatcacacacactgtgatgttctatagactaaaacaaaaaaaatagcccacaagacaagataatgaaagacacagaatttgtgataacccggtaccgggttttaggtggaaagaa

SEQ ID NO: 32341 - DNA, 476 bp, Arabidopsis thaliana landsberg
cctactgacagctgccacgacaacctctaaaaagaatacagtgttttaggtttcagttgccaaattagtggacgatacggataggggagtgctcgtttctttcaatagatttcttaggagatgccatgctttttgtggcggttctttgataccattaattttatattgcgttccataggaaaatgcaagtatctggggcacgtgatttatcatcaaaaggacaagtgagttcacataccagtaatctgaaagttaagggagagcctgaagaccccctccaaccagaaattaaagctcgatgtgtttgtggaaactcgctagaaacagactcaatgatacaggtaatctgggatgaactcactgcgtgtattcctgcttgagctgactgtagacaatttctttgtatgttatggtcgatggtgggatgtatttatcattgattacatctgtgaagttcgccgatactttctggctgt

SEQ ID NO: 32342 - DNA, 961 bp, Arabidopsis thaliana landsberg
  unsure (1)..(961): unsure at all n locations
aacaaaatatcaaacgagaagccatcttttgacctcatccatgtttaatttctattgacgttaaattccttcgaacctgaagctgataaaaaaaaattatcttcaataaacttaaatttatgatataacactgaccgaagaaaaaactaatttttctaaaaaaaacacatttaatgtttaattataattgcactaaattctcactctaaacatttttccatgactatgaaccaataataattcaaatatatgtacacgtgagtgtcttaatcagtggttgatcatattcatattgtcaatttgtgattaatattcattgggaagcagtgatcttgttttatagggactaggctttcacaatatctgcaatttccactcctattggcgatccatacatatttcattggcccactaaaaaaataaattccaaaacaattggcattactacaaatacttactctttcggtttcataaagaatgtttttctataattntatatttggtcataaagacttctaaaactaatcacttattaaatatggactcatgtatatatatatttttttttaatttgtataaaatgtgtcaaaatgatattttttcaagccgatgaagtcctaatcaatctctatttggtgcggtttggtttctgannnnnnnnnnnnnnnnnnnnnnnnnnnnnnnnnnnnnctcacagtttggactttggacatagtccgtgaccggcccatgagagacacgagttaaactttgaatttagaagaaaagagtattaaaaaaatgacctttgtggttacccctctgcaaaacgacctcactcagatgagggctaacaaattggaattggaggcagcaattatgccacttggctaagtagttgaggcactgacccggcgatattatccatgtatataatgtgagaagccaaaaacgattgtaacatttttctctgatgttaggt

SEQ ID NO: 32343 - DNA, 688 bp, Arabidopsis thaliana landsberg
aaccaacaaatacataaactacaagactaacatgacatactatatggttttatatatataattatatcctctaatactggaaacattaatagacttaaaaaccaaacctcgcttataagcctatcaaaaaaaggcatcgtctatatattatatgggccttaattgggaaaagacgaactatccaagcccatatcatctatagtttgtgccatgtgtctcctttctctgtaaaaccatccatcaatgaacaaaatcaactaaattctctatttagcctctctcagttttcgagaagactaaaagcgaatttagggtttagtcatctctccgacatggttggtgccgcgattttggaatctcccggcgaaggaattggatctaacagcattctctcgcaaaagagacaactttcttctagtgatgcagctaagagagacgctaagaaacgctcgacaatgctaatggatctggagattctcgattgtcccatttgctacgaagctttcacaattcccatcttccaggtttcgtaatttctcaaattgaatcatttcgtatttttcagaaagtttctgttttggttagaactctgaacatagttggaactgtggccatttacttgattctaagagtagccttagcttttgaggattctagtgaacttttgaaagttatgttaaagaaattg

SEQ ID NO: 32344 - DNA, 538 bp, Arabidopsis thaliana landsberg
taagctcttttttccattttaccttgtctcacctatcataggatccaccaactatcgttttagtgttatccatatattcctttagtcattaatgttgaaatatgcatggaaatttgttgcaacatgcaaagaaccatgtctcgtgtaaatttctattgtagcattgatgtatatcggttaggcaggtagctgttgtcaaacaattgatatagttttagaccttatctgaaattattggcaaattctagaacgatggataggtcatatctgtttcttccgtattgtcgcttgagtcgttttttactgacatttttgtatggctatgaagaaaaaagtgaacagtgccttataggtcctcaaggaaatgaaagaagctgatgttaaacctgattcggtgactgttagctatctaataaactattgtggcgaggaggcgactattgccaaggtaataatactgtatttcactgatattttacctggtccgagtcttttcttgttcttctaatcttgaagacgagtaccttatgacactgtc

SEQ ID NO: 32345 - DNA, 2076 bp, Arabidopsis thaliana landsberg
agtaagtatacattatcttttacattcaattcaagaaagcaaaagtatacaaaatcggtttttagtatgtgcaattgttgcatctgatactgtcatgtatacatatattttgataggttcaataattatcaatgtagcatgcataaacatatattatgtacgttgacgtatatatgcgtatgttgcaggttgtgggactgctgaaatgttgtatgggttgatatgttgtttgtttgcgataccgtgtgtgtatacatgcacattccggaccaagctccgaagcaagtacgggttaccggatgctccagctccagattggatcactcattgcttctgtgaatattgtgctctttgccaagaatatcgtgaactcaagaatcgtggccttgacccttccattggtaaaccaaccagctcttagatctctttaaaataaatattctaaataatgggttttagaaatgattaatttgacttattgcatatcttggtgtatttaggatggattgggaacgtgcaaaagcagcgaatgggtcagcaacaagagatgatggctcctccaatgggtcaacgaatgatgggttgactttgatgactatttttataccaacatgtttctcttaataaacttgctattcatttgtgttttctttctttcttaatttgtaccaaaacataaatgtcaatgaggcttcgtttttcgtgagtgggcatcaactactatgctacagttctaataattatcataatattagtgagaaccaattttctcaatcttttcttttgaaaacgaaatcatgatcttaagggtattgtgataaaaccaacttgatattctttttaaattccaaattattattatttatttatttatctttttcatatttattctgtatttgtagataaactcgtgaatgaaaaatctaataagttaaggagctctctctctctctcttttctgtctagagaaagaatgcttttatctttcatcgtcgttaacagggctattccgttgccgtgttcttgccgtcaacataattttttcattgccgtgttttatgtcgtagacatggctttccgttgccgtgtttttatgtcgtcgcttttgttaggtgttgtttgtttgcttctaataaaggggaattgtctttcgtctttgtctttacagagttttatgagagatgacacacctatcttatgagaatattacgtaattagacactttttgaaaacttaatgccgattaaggcacttaaaaagttttaatcactttgaataagttatttgaccaatttaccctttaactatctaattcttagctttttttatttttcctatctctttcccctctctctttcccctatcactttatcgacaaactgaaaatatcaaggggagaaaaaaaaaattgtccatcaattcattgcaattttacaacaacacaaaatatcatcgtttatcttgttctttattcatttcaaaagcaaattttcacagtacctttttttttgccaatctcacttcatcttcttctctcttatggcgagtcgacgatgaccacaccaaatcaaccgaaaacataccggagagaagcagaagaatgagattatcaaagtcgtttgataagatctgatggagatgcaagcgatgttggagaagatgaagatcgagaaggataatcttgtaactgtttcaatcttttcttttgttagctcctatgaggaattcaaatttgcagggtggttaatcaagctgtaacgagtggagtaaaagtagttatgtgcactatttaattcaattttgtctctaagtttgatgtcgaattctatggcttttagaaaagaatgtctagattttgccaaatagttaaaatggtgtaaattaagtttagtaatttggattttgggtttatggtttagccactcgtatgaaccattagcttattgtcaacaagattgtattatatttttaaaaaatgttttacgatggacctagtatacaaatataaaagtgaaccgtttggacaagtttaaatggacaatctatcctggataaaatatttgttgattttctttc

SEQ ID NO: 32346 - DNA, 267 bp, Arabidopsis thaliana landsberg
atccgccagagaatccaaaatggaaggtgtgcttgtagtgatttattcgtccctagcttgtgccattcgaatagggttatcatctttgtctccaaactgatgtgaggatccatgagatcatgaatcggaattgacgaggcccttcagatttgagtggcgtgagggcaggtaaagaagagatggtctgtggtttcagtctccgtgatgcagcggttacaaaatttatcttggtgtatgtgacgcctttcaagctcttcccctgtgcct

SEQ ID NO: 32347 - DNA, 875 bp, Arabidopsis thaliana landsberg
ggtgtggatatttgttatgcattttagctatggccttcttggtatagttcactacttttggtacactttagttcggtttatgtactggtacacactcttgagaatacagttaggcattttagtccactttcgagaatacctaactgagctgaacaactttcttatgctcttcttttcgtcttctctgctaagacgccgtcatcattttactcattaaaacccatctcacctaaggtgatcttttctttctcttgatcatcttttgcgggggggggggctcatttcctgaatccacggtggattcttgacttggaaagttactgacattatttatccggtttattggtatcagagctatctcgtcctcagctctgtgcagaaatggccgaagctactcgtctcacaaccttaaacaaatagatcaatgagcagaaactagctatggaggctataaccctccagatcgacaaactaatgcagtctcaaacacagatagacaagttgttccagtgtcaacaaaagcttgaggccatggtgacagcgttggtttctcaacagagtggcgaacaagtcaaccgagctccagactccaacttggtagcttccggtgagctcacctcatcatcatcgttaacaccgagacccctagatcctcctgatttaaacgaatatggtcagctttatatgggtatatgtccgatggattaagacaaagctacggtgcatccaaatgggttgattaccagactttcaaaggtagggttcccctcatttgatggtaacaggtttcgtggatggctttaccgatgtgagcagttcaaaagcattggagtggcatcataactacatacgtgatcgttttgtatgttcccatc

SEQ ID NO: 32348 - DNA, 813 bp, Arabidopsis thaliana landsberg
  unsure (1)..(813): unsure at all n locations
ttattcttttatgaaaactagatgaatttttgcggaaaaaaaacaaaactagatgaattcttttccttttagtgtgacttttatttattcctttaacttgtttaaccagtcacacacgacacacatatagtaatctatttaccactgttttttatacagcaaaagtattcagagaatgaaatcttacaatccacaacaaaataaatccgctatttttgcacagattttttttgttaaggatctaaatgttaggataaatcctaaggtgtggtatatatacttccctttttgttatgatatagtaatataaggattagttgtgattagagtatattctaagatatgtataaatatatgtttgtgtatacgtttaatggaaatacaactttctccaagtttttctctgctttatatttttcttttcaagacagtctgtaatcactaatcaattacaaccgagaattataaattacaataatcgaaattagataaagatctatgctgtgcagcgtggaaatattaaataaagcttttacaaatttaaattgttaagatatgaaaaattcttgcaaatcaagtttagtacaaaatatatagaattttttttctaaactattgaatgtaaaatatacagtaaataggttgcatatattttagtctatattgttttaaaagatagtgtgaaatctttaatataataaatttaaacttaacaataattttatttcacttaaatggttctttaatatagcaacaacgcattttcgatttatcatatatgaatgcttaaatattattnttcacataaaactc

SEQ ID NO: 32349 - DNA, 321 bp, Arabidopsis thaliana landsberg
aaaattgcgtagctagaatcttgtgtgcaaggactctctatatggttcgtttttagctcccataaggcctcttaccattgttcctgtagctgcatgctgaactaggtgctattttttgagctaattcgtcagctgcgaaaccccacactcacgcatttattatgaaaagttccacactaattaaagactcctagttttgacagttgttttttttattttgatattatgttcaacttcaaaaaaatttttatacttttatttgcggttaaataaagagttttattttgccgacaaaaaaataaaaataaaaataaagggttt

SEQ ID NO: 32350 - DNA, 929 bp, Arabidopsis thaliana landsberg
tggagggtttgtctgaagattctcatgacagtgatagttatgatgtggagagtggagatgaagattctgaggatcggccctggcggccaagccataccatcttcgggaaatcgagcatcaaacaaagttattttgacgccatgagagggagatatttctatgatatgtctattgtgagggttggaggagacaacactacccctgctcctgaggaaaatgaagttgttatcgaccgaagcttcctgaaagcaggccttcggttcccactgagcaaatttgtggttgaggtattaaagattttccagatttttcttcatcagattacacccaaagctataattaggatggggacgtttgtctgggctgtaagaagccaggggctagagccgagcgcgaagtgcttctgcaatatgcacgagctactgtacgagacgaaggctatcagcaaagaacaataccacaacaacttcggttgttatggattcattgctcgttctaatgcaagctacccggttccaacatgtcggaaaaggtggcccgggtcctggatggaggaatggttttatgttaagaataacctgattgaaagggaggatataaaaaggattatccaacgccccatctagtctcgcttcggccttcgaaggtcgaccgtggcgattgaaaatgatgccgaagcattgtaacaccctaaatttgggggtataaattttttttcttcgatatccatcaaattcaggtgttacctttatcctcctcttcctttttgctcttttcttttcatttcaatgtagtaggagctatttggatgtcgtgtattaataaaaaccctaagggtatgatggttgttgcatcatactggaatgcatttatttttctatttggcgtattgtcgcgatatgtattcatttaatttgtagctctttctg

SEQ ID NO: 32351 - DNA, 1034 bp, Arabidopsis thaliana landsberg
ccatcatgaaaaatacttatgtatatatatatattgaactgagatttttttattttcacccatgtgacctgatggactgttcggagacaaatgtgggggcaattttgtcggatcaaccaaacccaacatttattttatatctgatttgaagattacgttagtgaatagacaatggttagagccaagtttatacaaatatatggtacccaactaataagaaaaaaacattattgaccgacagatatatactacataaagtatataacaaaggaccctcagagcatgtaatctaatatatatatttcaataaatatcaaactattaattttctaatgtatttaatgataggacttctaactagtaattaattgatgatttgacaaataaaactttgcctaacattattcctatataaaaacgtacatgattcgtagcaaaaatacaaaactgtgtatataatatactttataaatagtttctatgtattggatccaagtaggatttcgaagactttgaagggcacatctttttcaaagtttacttatacatatttaatgtaagataaagtcattgtttatatgtttttttctagaacacttaaatttccacaatatgataatttaaattaattgaattttgttttactttggttggtttgtggataaaatccaaatattacagtcactatctttcgacgtgtctcacttgcaacctaatccttttctggaatgtagctttttttttgtttgtcaattttatttctttctctcttaatccataaaaattttaggcatttttgtattactgtcaaagaactgattagctatgtcttctatatatctaaaataaaccataagaatcatagttcatactcattatggtattcttaattttctgaaactatcgataaaatgttaaaacgttatatacaaaaaaggactatctacgtagcaataaaatgaatttagacttatatgaaagctaatggtgacgaagaagttgacggtgatcccggtcattttgggtcggtggtg

SEQ ID NO: 32352 - DNA, 428 bp, Arabidopsis thaliana landsberg
ggggcatcgctggattccacgtgtaaggccatggaacacctgggatgcaagcataaccattcatgttgttattgttgttcatttgtggttcaacaattctgccgctttgtgctcttgattcatccactgagtgattgttagaggtggtcacagaggatccgcttgagcagtcatctccattttctacccgagctacaagccgttgatccgctaacccatgaaacccgttcctagctccgtttgagaccttttgatctccttgtagcttcatcacaggtgccataggagcaacatgctgctgatgagcttcgagaccaaaactcaagacccttgtgtttgcctgcaaacccggatcaagcctcgcagccctcaagagcatcggaaatagtgatgtgacggtaattgagagatgagcttttgttcttacg

SEQ ID NO: 32353 - DNA, 1020 bp, Arabidopsis thaliana landsberg
actgtacttgtactatatatgtatatatagatatatatatttatattattgtacttgtacgattactttaaaaaaatggaagggacattacagaataaaataaattaattgatgaatcaagtagagtctaattaattatattcaatttatattgaagtacactaaattaaatttattttaatgcctcaaaaacagagagtagatagggaaccaacccccatgttcgaattatgcatgtctttaattaatacttttttatatatttctaattaattttttagaaaaaaaaattattttggatgcttgacaaatttatttaaaataaagaatcaaaataaaccagataacacttttaattttggatgcttgataaataaaacttccggctcattcatatttaaaatcagttttatcatagtaagactttgaaccattgctcaaccatagttacatcatatatagaaaaaatctaatgtttattaattatatgtatttatatacaatcaaataaattaaatataagaacaaataaaaatgaaagaaattttttatatttatatttaatgtagatagggagattttaagaaattagtaattaattgaatgtagctcaataaagataagatttaattaatgatataaatttaaacaattatatttttagatatattttgtagagactaaatatgtaataaaaaaaatagttaattcaagtatttcatgcaaactatagaattataagttcttagcaatatattatttggttgaaatataatttgtaaaggtttgaatgttagtagtaaatagtaaatggatttttggccaaaacatttacgaaaaatgtatatattgatgtataaaatcaacttaaacatgaaatatattattcaataatgtagatcatgagtcatgtaaacacaataaaagtactagttggatgtacttgaagattcacactttaatatgtactaattatggaatgaacattaatgtttgagtaatttgtgttatgttgaatag

SEQ ID NO: 32354 - DNA, 655 bp, Arabidopsis thaliana landsberg
  unsure (1)..(655): unsure at all n locations
tcaaatgagtattctcaattagggttcagataaagtgaaaaactggagcgatagaccatggaagagaagacgggaaagatctagagaagaacataatcttcttcgacaatgtcctcacgtgaaaatgatacatctcaatcagaccatgttcctctcgacataaccattgatatactctcaagacttcctgcgaaatcagttgggagatctcgctccgtctctaagctctggtcgtccattaccaccacaccagagttcatcaagcatcggtccaagaagacatcaccaccttgtgttctactaatcttccgaaaacacgacaagctgatcgttttctcgtctccccaacaccagaatacttattctcatgtgcaagattatcacattgaaatnnnnnnnnnnnnnnnnnnnnnnnnnnnnnattccgtccacggtttgatctgcttagaaggttctaaacagctcgtgatttgtaaccctactttgaaacgattcttccctttacctgagcctcaaggcaccggtgacgaatacaacgtaggagggtttctgggatatgaaccgatagagggtaaatacaaagcattgtgcattgtcagaggatgaaaaactcaagttcttacattggaaattcaagaatcatggagagtaacca

SEQ ID NO: 32355 - DNA, 740 bp, Arabidopsis thaliana landsberg
tatttgaaaaaggaatacaaatatttgaggagaatggaccaaaacatgtgacaatgtgcatatcttatttcactttccatgattacatgaccaaacgggggaccacaattttgaatctaattatctgtttaattatgtatgtcatgtatttgtgtaagtattttttcgtttcacagaatgaatgagatcttaagattttaccttagtcatgtacattatctttttaagttttagaaatttactttcacacactttcaactacgaattatgtcgtcatcttctatgatgcactcgttgattctcaacatgtactttcttttcaccttctattgactcacatataatgtatgttggactgttaattgattttcaagatatatcataacagttttctccttaattgttatctctaatactccaaattttgggtaattaaaagcatttgattcaattgaaaaaatctcaaacgtgtttttcttttatcatgtaataaagttgtagttccacttgagaatatgttttttttttcctgatatatgcttcgcagattacatatatatcatttttaaaaaatgttacatatcacttattaatttttttaaaacaattaacgatttattaatttatcgatttatgttattttttacattgttttaatttgaaatcgattttttttattaaattataaaactgattaattaatggagtattaatttataaaattttatttttttttacct

SEQ ID NO: 32356 - DNA, 1245 bp, Arabidopsis thaliana landsberg
atgtgtttttgacgggaaatttggtggattgatttgggtaattgggttaaccccttttgacaccccttagttccactaatagttttattatcctacacataaatatctataaacttttgtaatcagatatagtcacatacatattgtagtaagaattaactaataggctatatctgaaaatggaaaatggaaaccgtctttttaataatacaaaattgagctcaacaagaggattttctagatgcttgatataatcgaaatattgaatacatctaatggcttcagaaaatataatattgtttctagttctcataatgtatgttcttggaagcccaaaaagaatattaaaaaagatcttctccatgatctcctctttaattattgtaaatggggtattatacgagcaatgtcattcacgacgcacgcataaccatttgactctttgattgcgttatacttaacattaagctatagttaaatgtttagtttcgagtgttttgattggataattttaatttgcttggttcctgttcggattagtttgtgtgtttttaacctttatagattgtgttatatatcttttaatctcttaaataaagcaaacaaaaaacagtaataatacataatggttagttattcgggtaataaacaaaaatatgtgacatttgagtcaataagaaccagccactgcccacagaccacagcaagtcttttgtttttgtttttttttgggtcaaaaatattagttaagtctattcacgttttatttaagttataaataactaataattggaaaaaggtagtgtttcacgagaacaaatattctcatgtattttgtgcaagtctgtcatcagactaacattcattaatttcatcgtatgttcttacagtattacaatattgatcgtagcatgtggaaagtgttgattagtattcttattttaaggtcttcattttgtgtagtcttacgacgacccttaactttaaatcctttagaaaggcctcgactataatgagatgtaccatcaacacaaaacttgtactcacaactaaaagaagaactcatacgcaaggcagaaagatcaatggcgagcaacggagttaccaactgtaacgcaaacgccaatgtttggcggttcaaaggaaacggtgcaacgagttatgctacggcggtcacgttgagaaagcgtgcttttgggttgtttaaaaaacacaccacaaacagtggaaaggccattttgttcc

SEQ ID NO: 32357 - DNA, 766 bp, Arabidopsis thaliana landsberg
ttttttgaacactcgagctgtagacataagactcctattatcaaagataagaatgtatgggaagatcaaatatcaatatatcatacttcatcaaaaacatcacatttcatacactactttcaagtatacgaatgtttcataaaaaaaaaaaggttatgcatacgaaaagtctactgcacgttatatatatattaaaaaaaaaacgttacatcaaatttgtcgtccatcttaaaatgttgggaaaatcgtagtatacagtatttacagaaatacaaaacgtaaactattgaaatttgaattcaacgagtgagaaattgaaaaataagagataggaaaattattgtattctagaaatattttatgcataaaaatcaacaatattgaatcctaattacttcaatgaaaagataggtttcttgatccttacgtttccacttacaaagcctcgtttgcgtttatcaaatctctatattcaactacctaaaacaatcccaaaacatgtaaaacaaagaaattcaatagttacgacttaatccctcgcctcaatcatgaaaacgaatcctctgtagtagtgtaatatacgttgtaatttccataagcaaattcaatataatcctacattttgccggatttttgaatatcattttccaactattcctatatgacaaaagtcatgcctggtcttgcggactcactacatggtcatttttttgtaaagcctagaaaaggggttatacgtcttgcataccaaaaacactctcattga

SEQ ID NO: 32358 - DNA, 832 bp, Arabidopsis thaliana landsberg
gctgcttctttcaactgagcaaaattagggaagattagatagaatcaacgtcttgttatcttcaatagacatatcttgaatagctttatccagatccatactcttgatacgtccaaacttttgagaaagatatcgaaaacccaacaaaacagaacagagcagaaaaaacagaactcataaacagaacacgatgtaaagattttcagaatcggaccaagtacgttgaaatctccggtaggagctccgaacggttgaaacaacctgagagaaaagtccttaagcccaaaagaaacctgggacagcgatttgattaacgacgacgatggaatttgttggagattatcttctgtatgaagattaaattattaaaaagatggcacaaaagagaaatatgaacatatacaaatactaatccgttctggagaccaaaaattagatctttcgctctgttctctctcctagctggtgattttctacgattgagttcttaccgactataaccaaagccgtcccaattctttgggattcagaacttatctctcaggtatcttctatctgagcagatctttgaccggagatatcatcgttttcagtccggaattgggtttcactttttcagaaaattgtcagcaatcttctacttgagttctgttgtgtctcttttggatttagttggatttccttctcgtcagtttcggtgtgtttcattttctgtatctgctctgcttttggagttatcatggaatttcaaattgaccagtatcttcagaagatgtcaattccgtaggaagaagatcaaccaataatactttctaatcaacctcaatttact

SEQ ID NO: 32359 - DNA, 3683 bp, Arabidopsis thaliana landsberg
  unsure (1)..(3683): unsure at all n locations
ttctgcaattctacttgcaaaacatttggctatatgactataattcgacttctgtccctttgtgcagaaccaaataactaccatgcggagatgaggctaggattaggtaagaaacagatgtcctgttttcctccttaagtttcatctttttccatgaaatactcaatttgaatcagttacctctctaatnnnnnnnnnnnnnnnnnnnnnnnnnnnnnnnnnnnatcatcttggtggcactctttgctgtcatccataggaattacagaaggaaagatggttcagagctctccagagacaactcaaaatctgacgttgagtttagtcaagtcttctttaagataccaatcttctcctataaggaacttcaagcagcaacagacaactttagtaaagacagattactaggagatggaggctttggcactgtgtactatggtaagattgatcagagcacgaacacttttagaaaagtgtgaaatctctgttaagctaatcttttcttcctttttgatctcaggaaaagtgcgtgatgggcgagaagttgcagtgaagcgtctctatgagcacaattacagaagacttgagcaattcatgaacgagatagaaatcctcacacgtctccatcacaagaatctagtctccctctatggatgcacttcacgccgcagccgagagcttctccttgtctatgagtttattccaaatggcacagttgcagatcatctctatggcgaaaacacgccacaccaaggctttttaacatggtcaatgcgcctgagcatcgccatagaaacagcgagtgcattggcttaccttcatgcttcggatatcatacaccgggatgtcaagactacaaacattctcctcgacaggaatttcggagtaaaagtcgcggattttgggctatccaggttgctcccgagtgatgtaactcatgtttcaactgctcctcagggtactccgggatacgtggatccagaatatcatcgctgctatcatctaacagataagagtgacgtgtatagctttggggtggagcttgtcgagctgatatcatcgaagcctgctgttgatataagtagatgcaagagtgagatcaatctatcaagcttagcaataaacaagatacaaaaccatgcgacccacgagctgattgatcagaatcttggatatgcaacgaatgaaggagttagaaaaatgactacaatggtggcagagttggcttttcagtgcttgcagcaagacaatacaatgagacccacaatggaacaagttgtgcacgagctaaaaggaatccagaatgaggagcaaaaatgtccaacctacgactacagagaggagacaataattccacacccttcgccaccagattggggtgaggctgcactattaaaaaaatatgaaattcccacgttcaccagtctctgtgactgaccaatggacaagtaaatcaaccacaccgaataccagcgcctacgaattctaggatccaccaggtattggtttcttctcatttgtttcaatggaacgatataagatgaggcacagggttgtgaagcagtaggtaccgagagaatgtacatagtgacataacttgaactaccaatcaccaattttctatgtctaattttgtctactgtatgtaagattgaatcaaaaggtatttataaaaagaaaaaaaaaattgacagtaagaggtaacttgactcacattcacagctccgttataatctcagtggtatctatctactgattccaggcctatctatcttgttaatcaccagatctgataccagaaactaatttggatacattatcggtataaaaggcaagattcccaaggcatccaagaaaaatctctcaaaccagaaacacgtctttcctcggtgatagttgttccttcaaagtgctaaaagcttatataacccgaggaagaagatcccattacctggtggtaattgaagcggcagtttcaagaaagaagaaggaaagaaatctgtagtgcccacaaaattccatccaaagcatctacttttctatgaaccccacaacctgcaaatttgcacatagagtgtgaaacagagagggatctcaactataactcttagaataccacaacgaatacgatcttcaaatactcactgatcatcaaaagggccaaaaagtagtttattgatagtttacacatttgttagaaccacgagaaaaggttacaactcaatcaccgcatggggaaaaattacgtagttggaacatggcatcgaaaaaaagaaaacctatgaagcatggcttgagtctgaaaaagttttatttgcttccaagagggatatggggagtgctgatcttattagattgagtttgtgattctctcaaacccaaatctttatcttcttcttctcctcgtcggctaactaaattctttctttcttcttctcttctgcgatcatccgacctattagtctctggtggcacaacttgtcggaaaaacctaagcatcatctcataggttgtaaatgtaataactgctgatggagttgtcctcagtagattagtggcacatccacggtacaacccaggaatcccttcgcttctgaacacctttgtgatgcaatcaatgactcctgaatacttagtctcagcatttctaatctgcccttgttcttgaagcttcgccctaattacctgtggatgtaacataaaacagtttatagttagttatgagcttaagagtgaggtaaagagagcacaaaagagaagaagaagagagacctcgtgtgggtaagtcaaaatagaggcgatcactttcgcgatggaggaggcaatagcaacattcccaggactcagattctccacggatgtattatctgagaacttttatagctctgatcagaaactagttgggaacagcacatgattatgtaacaatattttactggaggaatcatgttttacccatctttgccatgtattgcttaattttttcataagctggaaactggatcgcgacatggcttactcccgccaaagaaggcaatatgccactgttccaatacaggaaatataagcaatataactaaaacgtttaacataagcacgaaatatcacaagaaaaaggtgttcaaatttacggaactttcagtttcatatgagacactaacctgtacaaccctcgcactccttcttcatgacaaatcctactaaatgcagacattacacttttgtaaggtaccacaccaggcctaattccttgcgtctgaaaaaacggtaagaggttaggtcaagtatcttatgataaaacaaattcaacatgtctagtaaagctgaaaccaaagaaagaagacaaaagttaccattaatcttgtcttgacaacccaaagcggattagttgcaatagatgtggcagctccagcaccagctgcagctatcatgtttgacccaatactaagcttgccatctatcagtcaaacatgaacagttgataaaaaagacttggtatacgttatttgagcatatatatatgatactcttccggttaagcataagctacaacgcacaaaagatttgttacaaaggaaaaccaaccacttgactgcagcacatccttaagcttcccataaactgagaagtagacctgagcgtgataccagaataacgattaaggaaggaactaaaggtattca

SEQ ID NO: 32360 - DNA, 372 bp, Arabidopsis thaliana landsberg
gatctttgtaattagctcacaatcttctcggtttttgcctatttttttttagaacaaaagaacaggaacaaagtacatgtttatacttgcaataatttattcattaaagataatttcgtgttgtttggtgaatcttttagttgccgagttatgacgaagacgtcaaagaaatggaaggccaatccaaggaagagtatattggatcattgagaaggtaaaaattaactaattaagcaatcaattataccaaattgattaatcatagttttataattaacttgcaatatatcggtgtagaaaaagtagtggattttctcgcggtgtatcaaaatacagaggcgttgcaaggtagatagaatttcaatatgatac

SEQ ID NO: 32361 - DNA, 538 bp, Arabidopsis thaliana landsberg
  unsure (1)..(538): unsure at all n locations
caaaaagctctttgatttgcttgacaagaacactatccttatgttctatgaatcatgaagtctcatatgttttagggttcgggaactgctctgtttttctcaatcagcatccaatctaaacagaacttatttgagtaaggtcataagatcaccaccaatcaatttcaaaagcaaagaagaggannnnnnnnnnnnnnnnnnnnnnnaagaaacatgaccacaaggaaaagcaaaaagaaactaaggtgatccattagacttacctcctttgctctcaatttctttttgcctttgggagtgtctttctgaatgtgaaccaaatttggagcataactgacgagttattcttgacgaatatcggatctatgcgtgcaactatgcgttcaatgtctactctctcttgtccaggtttcttgctaatcaagtttagggccgtttggtttctcaaattgcatttgattcttgatttgcgtttgttgaattctctttcagtttctcgtcgttacggagttttcattgcatgacttcactgggattg

SEQ ID NO: 32362 - DNA, 1256 bp, Arabidopsis thaliana landsberg
  unsure (1)..(1256): unsure at all n locations
cacgctgctgactatctcatcgtcataggtctcaagaatctcattgcccaggccattgcagattacactgcagataagacggtaaatgagattcgagaactctttaacatcgagaacgattacacacctgaggaagaagaagagcttcgcaagaagaacgaatgggctttcaattaataaccctaaagttccgttgtctaagtgttgatctcgatgttctttaatctttgttgaccacatttgtctctttcgtttagtgtgtgattgccttcgtctctttgatttcatatggtgttataatgtttaataatcttttcttataaattagatcttataagccaatattttttgctaatttatttccaaccaaaaatcctccggcgattctgaattcttcgccaccatttgggcactgaaaagttatcataatacatgtgttatctagggttaatttctccattcccaattgttattaaatgctttcatattttctattccctcatataacgttatttgtgagaaaaatataaaaccatctaactaaatttaatctaagataatacatatatgggatatgtgtctatatatgaattgaaatatgattttcattatctaggttgatattttagtattctattatgtagtaattcatatgaaaaagtttatcattattattttagaaattcttgtaaagatactgtagaataaataaatattatattctctaaaagttcttattatgattatccttaaaaagatggtattctcggtccatccgtggttgtgatcactagctttcaaagtatttactctatacggttgcaccatgacaccaagtcttcacaaaacatgggtggcttggttcaaacttcatttcttgcatggctctctcaacaacttctggattatgaaacagcagccaacctatacttggctggcaaacaagctgctaaaaatcagagaggatgcttttcattggataaaattgcgagtgggtaatggtcaaacctgcagattttgtcagataattggtctccttttgacaggctatcgaatttactaagggactagagactgngaataaggaaagatgccactctatttcaactccatgagtagggactttgggcaatacctcatccgagaaccgatcagcaggtctccctacacatctttctaactactttatctttctcagataatgctgactattttggatgggaagtgcaaggcaaaaaccacaatcgttactctac

SEQ ID NO: 32363 - DNA, 4602 bp, Arabidopsis thaliana landsberg
tgttagataaagtagctgaagagaaggcaactgcagtggctggttgggtgcttgtggtggttggaatggtgcctggagctatggtggttggtaagatgactggttcaggtttgtagaagcagaagacaaaaagcagccaactcaagatcttttgctttcatgaaatgaactagcttctccaagctggatatccgagattgagattgttggtgctcctcatcacgtcttgcgttttgctcatcgtgttcagatatcttgaagatccgcaatagttgatggagacgagctcgcataactctcctttctttttctgttgtttaatgtctccacaagcgaaccaaggccaaaagggttgcctttgctatttctatgagtacactaaaacaagaagacaaggaataaagttagactaatgcaaaaacaggcagattctaattaagcaaacaatcaggttctaagcataaaagaaatggattaccttaagaaatatttcattcttttcttcaaggctgacagtacgatgagttgaatgttgagaagaataatcagaagtttgaggaccatccacgtccatttcagacatcctctcttcaaggctcttcacatatgcctcaccaactttttgagacttttgatccacaatagatccatcaggtcttgtatgtgctttcataaacacttcaccatatgttataggtcgctgcaaaagttcctcctacaatgcaagtgaaacagttaaaatcacaaaagcaatattagaaaatcggttaagtgaatggactctaaccagttcttgatgaacttgcacaaaagatttctgaccagctaagtgtttgtgcactccaagacctccacgatcagagtttctagactgtgaagtagtctcactcttcacaatagcttcttcagttctccaatgctcccacatgcgattccaaatggtagtacgaatccaatctggttggtttccactcctctttgcttgactgacaatccctttcatccgtttcttggcaataaccaagaacccttctttaacaagctcagtaatagcatgatcccaattatacttacgctacataacaagcagctaagtcacatatagtaggctgtaatagagtaatgcataaatgaaattaccgcaaaagtcctgaaatatctctcttgaacgtgtattggagtaaccttccagctgaagtaaggcccatcaaacttcctccgaaatattcccgaaatcactctagacagctttcctttatgcctgttaaacctgtaagaaaagactaagtattaagacatgaggctttaagaacaaacttcaagacatgaggctttaagaacaaactttaagatatgaggctttaagaacaagctttaagaccaaacaaaaacaaagcttgaagaccaaatcaaaaacaaaactttaagaccaaaacaaaaacaaagcttgaagaccaaatcaaaaacaaaactttaagaccaaatcaaaaacaaagcttgaagaccaaatcaaaaacaaaactttaagaccaaatcaaaaacaaagcttgaagaccaaatcaaaaataaagcttgaagaccaaatcatcacttgacccgacacatgatctataattaaacacggacaatcaaacacgaagttcctcatactaaaggatatgactaatcgatttgcaagtgtcattcaaaaactaaactaaatcacaaacacaaagttcctcatactaaaggatatgactaatcgatttgcaagtgtcattcaaaactaagctaaatcacaatcacaatatgattttgatatctaaaagaacaatcaaacactatactaaactaaactaaactaagctaaatttagatttctactaaggatatctaaaagaacaatcaaactatgctcaactaaactaaacaaagctcacgcaattactagagagtcttcattccagggataggtttctcagacaggagtggaagtcgttcccatcctggcagggctagtaagcgatccaagcgatcttggtagtcgacattagggttttgttcttctttcccattttcctccccattttccactccatcttcttccccatcttcttccccatcttcttcctccccttcttcccctctatctttctcttcatgattaagggtttgttgaataggaggctgacgcggatgagtaaaaggttgttgatgaagaggagactgacgctgacgaatagtaagctgacgctgacgaacaggaggcggttgttgagaaccagaacgcgaaggttgaagagcaggagacaaggtttgttgaataggaggtgtcgttttgggtgttattgtctaggcttgttttgctggtggatactgtgaaggacgacttctatcagactgggtaacaaactgtgttgtcgaattagggttcgacgactgagaagaagctccgacgactccactcccacgtcctcttggattttgaccacgggagactcgagcaacaggggaagatcccttacctcgaacactaggggaagatcccctacctcgacctctagaagatttgcccttaccactagcatccataacaagagaaatcgattgtgaaattaccaagaaatcgaatcgaaagatgagagaaatcgattgtgaaagatgagagaagatagaaatcgataaaccctagatcgaagaagaacaaaccctagatcgaagagatttagaagaggagagagatgagagcttgatagaagaaaccctagatcgaagaagaagaaaatgataaagtcgagttttaatctttacccttcaaagatttagaggagtcgttgttcggtcgcaaaacaattatactcaaaataattttgggggaaatctaagcgcctaaatggttgggcaaaaaaataaaattttcaaagcgtcgcaaattggtaacaacttaggtcggcaataagtcacaaactagtcacaaattagtggcacaagtcacttaacagttacaaaaacgttgcaacttgtgccacctttgtgactgttattaaaacgtcagaagacaaaatttagaattctacatattttgaacctgtctattgatagaaatcattgagaagcacccatcttagtgctatagggtacatagaagtgttagtttttataaatctttactctcataacctttcttagaattatttgagaaatgtctatgatctcttgaaataacatgtaacctttcaattggtttgttaaattttgaatgttcagtttgtaaaagtcggaattgaagagtttggttatgtttttataactaatatcaatcaaatcaagctattaacgtatatggaaacatataaacaagagcttagattaaaaatttcaaaatacataatccgcgcgttgctaatatgtaggtaaacactacttagattaaagatttcaaagtccgtatgagtctttggctttgtatcttctaacaaggaaacactactcaagcttttaagatccggttgcagtttaagttcttatactcaatcatacacatgacatcaagtcatattcgactccaaaacgctaaccaagcttcttcttgcttctcaaatctttgatggtgtaaccgaagtccatatgaatcgggtgcttcgtatattctaacaaggaaacgctacttaggcttttaagatccggttgcggtttaagtacttatactcaatcatacacatgacatcaagtcatattcaaatccaaaacactaaccaagcttcttcttgcttctcaaagctttgataggtagctgataagtttgtattttgcatgttttaagcatccatttgtcatcactttagcatcatatcatcactgttttataccatttctcatcatttgtcatcactttacatgtttaggatagatttgcatgcatgttgaatatttgtgttgatttaggtgatttggagctattgacgagctaactggcagaagcggacctgatcatgtcaaaccactcgaccccgtggtcgagtaggagcttcaagatctcaagaggccactcgacccccaggtcgagcaaaggacatcaccacttcacttcaccactcgaccacgaggtcgagtgccctcatctccatcacttaaccatcactcgatcacatcactcgaccctgaggtcgagtgtcttcaccaccattacctgatcatcactcgaccatatcactctacctggaagtcgagtatcaccttcaccaccactcgactacaccctcgatggcaagcttcagagtcttcttcattccgcactcaaccagacactcgagcacaaggaagaaaagaagactccagctattcactcgacctcccactcgaccacctgggtcgagtacagttcttaatccgtcccaataaagtattagggtttcagaatatttggctataagtagcatgtacttcatattttcgcaaacaagtttttatctagttttattccgcagaccttgtgttctagaccttttgtaatccggatttctctttatctattcagtattcagtattcagtttctgttcttgatttcgtttactgttgttcattctgttatcatcatgctggtacactgccgttatcatgtt

SEQ ID NO: 32364 - DNA, 2185 bp, Arabidopsis thaliana landsberg
cttcctatctaaacattacgcaggtttaccccatgtcatctcatgctgcttgcgtcgtaaacctgaaaaggaacattgaggcgtactttaaatacgatcagctagtttccttgatatcgagtgcagctagagcttatcgactaactgacttcaataggatatttgctgaagttcgagctaaacatggaccgtacgtagactacttggaaggtatcgggttcgagcattggacaaagtcccattttgttgggaataggtataacgtcatgacaagtaatattgtggagtcgctaaataatgtgttaactatggctcgagattatccggtaatttccatattatagtcaatttgcacaccactcgtaacatggtttgcgcttaggaggcaagctgccaaaagtgaggataatatcctcctgcctaaagtgcacgatatgctaatcgaaaattacgagaaaggagcaggatgtgccgtgctaaagattggggatgggctatatgaggttagagaaaagagaggctcagcatttgcagttaacctatgggagagaacgtgtacgtgcagggagttccagctcctaactatcccctgctcacatgccatatcggcggctatagaagaagggctccgcgtggacacgatggttggagtccatcacacgaccccccagcttagattgtcataccaagcactcataataccggtacccgacacggaaacgctgactccttcaccaaatgatgtaggaggtggaaaattggctccaccgtatgtgcgtcgaccgcctgggcgaccaaggaaacggagattattcttaaaaggagaattcaaggtaacatatttgacatcaaagctaataaaatatttatatggtaatactattaggatgtaaccatcgcttccatttgtagcgagcatcaagaaaaagatgctcacaatgcaagtcattgggacataacaggccaacctgcaatggaccaatatcggtatgtcaaatattatctgttaatgactatattatggaatatttatattatctgttttgagtgcagggaccgtagaaaatatggttcaaggacgttttttggcgctgaaagtgatggatgctgccatgattaacaagaaatgccctggagatgtgtataaataaggaaccttaagcgatcagaaattttaaatgtgtatacgtatggctactgatcgctaaatgtaatattatcgaacccatccacttttcaagtagaaatgttaaattataatatcatattttatcgatccaaacagatattctgataaacaaagtagtagcccctaattcctagatattcgatgactcaatgctaaatagttatgatatgcggttaaacactaagttattaggaaaagaaattgacattggggttaaacataaggataacctaatcttcaaatacatagtaagataaaacaataatagcatagttatctgctattggtgtttacaggaaaatctaatatttaaatacaattcagaacacccgaatatatgatcaacataatagactagttatccgctaatattattaggaacgtacgaattgcaaaaagataaattttataaaataggaacataaacagataatttgatagatcctgttaacctggttaatctctatattttctaacaagataaacagtataagcgatcaagatgctaatatagttacctcaatatgatgtttatgatgccaactaaataaatagttaggatatacctaacaagctgaacagttatccatattagtcgtgaaagcagaatggcttgtcagcgacgatccattacaaacgatatatatgctaatattgttaatttgataagattgttacgttgacagctaaattaatagttagcctaagcatggcccagctgccgttagttttaggatattcttttatccgctacgatcgttaccagataaactcatgccaactccatcttttcgtacacgcctaataaaatagagcaaattggcgtctcagcgacaatccattacaaatgaaatatatgctaatattgttaatttgctaagattcttaggatgaccagctaaattaataggtatcccagtttagtcgtgaaaacagaatgggttggttggggaccattcctttccaaacagatttatatagctattattggttaat

SEQ ID NO: 32365 - DNA, 495 bp, Arabidopsis thaliana landsberg
  unsure (1)..(495): unsure at all n locations
tccttgctagcccaagcagcaatgttaaatttaccaagttgagtacccaacaccattatctctctcctagttttcatttgaagctctttctctgacagttccttgttactcataggagaagctgatgcttgtctgccgggacttgaaggttcagaagatataggacttcgtattggcgttgttgccctaatcggtgtcccgtttctnnnnnnnnnnnnnnnnnntataggagtcatttcagttcccatgtctctcattgacacagaccttgctgttgaaggcggttgagcaaacgcagttgcgactgacgagtcatgacggctgagattaactgcaagaaagcaagtaaaatttggctttagaagataaatagagcatacaaactgaataactcaaagagctagctaacaccaccttcagttgctgattctacaatagagttctcaaccataagaaccggtttgacatatgaatcacggtagtgtacgaatcaac

SEQ ID NO: 32366 - DNA, 588 bp, Arabidopsis thaliana landsberg
  unsure (1)..(588): unsure at all n locations
tttccccctctaataagattattactctgttttttattttgtttctctttgatataagagtcggaatccaccgatccaattgacagacggttccaaaatatacatgtaggagacaccaaaacaagaaagatttatgttcaaatgagctaattaacatagaaatatattttaaactgaaaaagatagctcattggagttttattaagtgctagaaagtaaagaaaaaggaaatttattttagagaatagccaagctatgatagattcctagattgagatataaaatgatgaaaaagagagttgttccaaatggcaactcccaaagttataaaatccatttggaacaattggtttatgcatatgccttatgggtaaaatgatgaacaagagagttgttccaagtacccaacccaaattgacccataaggcataaaccaaacttcaagacctagtttatagttagtgcaagtacttcaacgaagtccatgatacgacttttcacacgcggtactttattacttttaaataatttcgattgaataatcatgtgtagcatatgcaganatatatttagacaaaatactcctag

SEQ ID NO: 32367 - DNA, 599 bp, Arabidopsis thaliana landsberg
  unsure (1)..(599): unsure at all n locations
accataatcatttaattattatttagtagtatatctaaaggagaaacattcaaacagaccaattatttttttgaaccatgtcatgatttactaccaccaagtcaccaaccaatggcattcgataatatttgaagacaaagcaaaccaaatcaaagtaacaatactaaaagatatttgagaattactcattgtggatcaagattcaagagcattgaggatcggtttactcattaaggatccagagcattgaatgtatgtatattttgtcaaatattcataattatatctttgaattatggaaaattggtgcaactcatcatcttttaagctttttacttaccaacttcagcttggaccatacctaatcacatgcacttcctccttcgaacacaatttatcgtctggcctagtagatactgtatttaatacgttgtcactaaaacagttctccattatatacggtaaaatgggccattaatggtaacccgtaagccccaatgggctttctaacccatattatagttgtttcagaagctcttccatggacagagacagcgaatgaccgacanacaaagagaccaaaagaagaatctgtgttc

SEQ ID NO: 32368 - DNA, 3177 bp, Arabidopsis thaliana landsberg
cactaaccacgtttttttttgtttcccaaagctttgatggtgtagttaaagtcgatttgagtcttaggctttgtatcttctaacaacgaaacactactttagattctaggattcgattgcggttctaatacttatactcaatcatatacacgacatctaatcatatttgactccaaaatactaacaaggtttttcttccttctcaatgctttgatggtgtagccaaagtttgtatgagtttttggttttggatcttctaactaggaaacactaatatagcttcgggaaaaatgtcagaaaaagcaccaactttcaaatttgggatgaataaaccctcaactttcaatgcgtcattttaatcacgaagtttctattgacttatacagaaaacaccaaagttttgtttaccaggacgaattaagcacatcgttaagtctccgtttaattgacgcaaatggggttaatttcgctgttaacaggcatcgttagataaaacgacagcgtcttcgttcctgtaacaatataaacgtaaacgacgagttcttcaaatccctaaattcccaaatcaaactttcaatccccaaatttctcaagtttctcaacaaatttctcaagtatctctctttgtaacgatgagttctagctctgtcacatctggtgtcgttagagagcgtggtgtgccgtcaaagtgtgtgtgtggattaggagtcacgatctttacatccaagatgcaagaaacccaggacgaccattcttccgctgcgttagcaaacgagatccgagcgtgtggactagcaaaaaagaggtgagtatgttataccaatttcttagccaagcatttgttctacaagctaacaaagtgtcaatgggtagaggatgcattagggtcacttgttcaaatgggtagaggatgctgtgtttgaagaaatgaagatgctctaccaagaattgtcatcattgcaaatgaggttagcaagggaaaatcagagacaaatgtggtaaaagaacaaatacaagaattgaaggaagaagcacttctcaggaaaaaggaactccacaagtgtatttggtgcttgaaagtttgttttgtgtggctttttgttatcacaattgtagttgtttatggaatgtttggtcaagggaaccaaaagaaactcgctattggttattaagtgtatgaattgtatgcatcttttgaactatgatatgaagcaagaatgtatcgattgtatcatcttttgaaatcaaatgaatggaagtgcaacatttaatcatgttttaagacattccaaaagaaaagaagcatgtcttaataaccaaatcaatccatacatgaactcaatatccgaccaaattccaaacaaaacaaacaaatatgtttttagttgaaacactcaaaccatctcaaagacaaaagacaaaagacaaaagacagaatcaagacaagtttttagttcgaacactgaaaccatgataagcatcttccctgtgaatctccccttcctctctgtgaatctacagtcttcgccttcgaacattgatcttcagtcactataaggttatactctctctggatctcagcaaccatctcttgctttgtaatttttggattcttcctcaacctgtctctatataaccaagcaattgtgccttgcttcaacatcttggagtaaccggacctcacacaaacatgttcattatcatatatcttcacttgcatcttatgtttcttcctatcatacgagcagtagcatctccatggacatttgacatcagtagaagagcactttgcaccaattctcaagcattgtgacctgtatagtttgatgtcgtatctggttttgagagagtaccttagcacagctatcttgaattcttcagggccattgaaagttttccccagccgcagcggctcttcaggcaaatcagattcggcttctctcgcagcattgtcttcaggacttccttcatcatcactatgtgatacaggatctggaatcttctcatcatcccatatttcatctccactatctgcatcactatcacttctattgtcatcttctctcgcagcctctccaaattcggctgcaaagtcgtcacattgttcttcctctaagcctacatcaccatagtcttcatctactcctccatcgcctacacctctatttccattttcttcctcattaccttcctctaaccctacagctggatcacattgttctgcctctaaacctacacctccatttccattttcttcctcattacattcttctaaccctacaggtggatcacaataccgttctggaaaagcttcaatcgacccttgttcctcattattttcctctaaaccagtcgctgcacactcaacctcttcacagtcttcatcttctacaaccgcacaatcatcatcgctaaaaaccacctgctcttcttccatatcttcagaagctctcccctttctctttttataagctcgcttctttatgggttctgtacattctctgatggtggttcctcaacattctctgatggtggttcctcaacaatctccgggattttaaccctttcctctgttatttccattgaatcagtcgtcgatggtgagctctcaacaatctctcggatttgaaccgtcgatggttcgggatcgtttcttccagcaaatgcgtttcccgcagccagtctcgccgactgacgagtcctctgtcgtcctccacgcgtcctagccatcagattcaatcaattgtagagtttggggttgagagagagttagggttttcgatttgggaatgtgaaatcgatttgggatttttagtttctttctattacaaaacgacaacgtttaatggttacgaagacgctgtcgttttatctaacgatgcctgttaacagcgaaattaaccccgtcccggtcaacaaaactttggtgttttctgtaaaagtcaacagaaacttcgtgattaaaatgacgcattgaaagttgagggttttttcatcccaaatttgaaagttggtgctttttctgacatttttcccaatatagcttccgggatctagttacggttctagttcttatactcaatcatacacatgacatctcgttatatttgactccaaaaccgctaacaaagctttttcttgcttttaaaagacttgatggtttagccgaagtctata

SEQ ID NO: 32369 - DNA, 469 bp, Arabidopsis thaliana landsberg
tgtgatgtttccgctgctgctcctcgtcgcgatgaacagaccaagttaggctaacgcaatcctagtcagaagacaaaaacttctctttttattcctatacttggacaaataaggcgagtagaagaatagactgagatgcttcttcaaaacaaagaagtcacatcaataatgggactaaccataagggagttggtagtatccccattggggggaagcagtagaatggcaatcgcaaggtttgacctctttgtagctagcctcccttctatgtgttagtgagcgcccatttagtggaaaagcgagggatcaggtggagttatcccttgtagtcaaaacacagtccgaaatccgcctcattgttttcgtcatcagcattgtcttcggaataacttgagccgctaggcctccatcttgattccggaatttggtgcagacttggagtgactttgcaccgggaagggtttgcggc

SEQ ID NO: 32370 - DNA, 1185 bp, Arabidopsis thaliana landsberg
ctccattcaccaaaaacaaataaaaataaaaataaaatctcccttgtcttgctaattttaaattttgtttacttgcattgtcgaattaatcttgttattattttattggtaaacgaattaatcttgttttaaacaaagatagatatgatattgacttttcaatagtagtaacgtctagttgtagaacaccaataagcatttcagtttcattaggaagaaagaaaatgaagaagaataaacgtcaaagttatcaaaaagaaaatgttgatgaatacaactcgattttgtacagtatcaaatatacaagcaaaaacatatatacaaatataattttttttttaacattattagaaatatctgaatttgacaaaaaaaaagtccaattaaacttgtgataattaaataatttttggctagtccaccataaataaaatacatgtaccatgcgcaaaaccaaaccccctaattccaaagccaaaaataacaaagaatagtccatagtttgttttgttggtaccttatcttttattgtctctaatatttagcggtgtttacgttgtttaagcagagaatcttgctaaattcatgtctcaagattccaattgagtaaagtcaaagattctcacaagttcaggtatgaatgttgcatccgattcaccatccaccgactaacgaagacaaatcttcatcagaaatcttactttatttctttctattaaataatcatatccatttaataattcgatctatccaatgacatctcgtatggtcacacaggtcacgtccttggtgtctctgactcgactttcttaatagatttttgtttttccgaaacaaatatgttctgtcagaaaattacggcgaaattcttctcttactctttactccaaattaattagttttatttcattttagatttttgattccatttcattgataaatcattatctgcaaatataattatcacatttagtaactcttgggatttactatgcttcaatccgaatcttatttatcgcattaactttcattacggtttctttgatataacgaatgcggaatttacctatcaagaactatatatggattattattatgatctcctattaatgataccataaattgcaattagaattagaaaaccacgtagtattgacgtcaagtcaacagcaaaaagccacgtga

SEQ ID NO: 32371 - DNA, 628 bp, Arabidopsis thaliana landsberg
  unsure (1)..(628): unsure at all n locations
tatttgactcgaacatcaactcgggagaaatcgtcaggttaaacatctatcagatctttctgttggctgtaatgaagtttcactgttatgtctacgaggtgtcccggttttggaagcttcatcctcaaactttgttcaaattcatcacaatatctgtcaggtatggaatcaaaactacatcatatgtctgtgagcatttcggtttttggatcattctgatttgagttattcggtctttttttgcttattcggttcttgatttctttccaactgataggtacatgttcagactcataaatagaagggtgcgcagaatcaacactggttctagtttcagaccagttcttaaactatacaaagaagaagtgatatggcttggcttagacgcttatattcaagttctgaagaagaaaaactcgagatatcgaatgctcttgatctatttaaaatctgcactttctaaacactctctttctcagcagctatcgtcggaattgaggtatgcaacagaccggtcaaactcttcttcgctgtggaagttgaattattgaaactgatcttaactagattttatcatcgaaacttaggtagatcctttaaanttctatttcagtcattttgataatct

SEQ ID NO: 32372 - DNA, 334 bp, Arabidopsis thaliana landsberg
ttattaacaacgttctacttggcaacaacaggggatgatattttatcaaccacaacaacaaaaataccaccattctttttttgcagcttcttttctgctttggtggaagaaataaactcaacaaagccacagacaagatgatcaatgatgtggacaacaattataagaatatcaacaatttctacatcactactgaaaaaaatgatggttggtgctactatacgacaacagttagggagattgtcgacataaactgctttttttcttccatcaacttcctcatgaaaataatgaggagcatcatgaacttccactccctcatctactttaatga

SEQ ID NO: 32373 - DNA, 624 bp, Arabidopsis thaliana landsberg
tgttctaatcacaggtaaaaccgagaaacccgaaccagagtttctttgtcatctcttaaacatttcttgttgttacagatgagagtgttgtggctttggcgaatcggtgcattcacttgaggtcattgggcttatactactgcagaaacattacagacagagcaatgtactctttagctcagagcggagtcaagaacaaacacgagatgtggcgagcggtaaagaaaggaaaattcgatgaagaaggactaagaagccttaacattagtcaatgcacttacctaacaccttcagctgttcaagctgtctgtgatacattccctgctctccacacttgttcaggcagacattcacttgtcatgagcggttgtttgaatctacaatctgttcattgtgcttgtatccttcaagctcaccgcactcacaccgtttaccctcacccggcgcattgaaacggtgtgtgagccagagggtctactactctctagtatgtgtgtacatacatataaccatatggtgttaataaagcttctttgagttccttctttgtctttgatgcaatcttaagattttaacattacctagtcttgaaaatcttgtaggggatcctctagagtcgacctg

SEQ ID NO: 32374 - DNA, 705 bp, Arabidopsis thaliana landsberg
taagatgatcgtcttgcaattttttccgatctgtgcattatttttgaaattttaagatgtaacatgacaactggaaatcttaatctctaattaaccaaatcactcactgctacagaacttgttaagattcaatccatgaaacagtttacaaaactagcttcatttgtctttcttctagcttaattcacgtgaacaagaactgatctttgaacaaaactcatcagagctcaagaagatgaaaaaaagattctagattttttatttagaatcatgagtgttccaaatgtatatgttacaaagatgggggttgtttgatctatctcaagaaaaaaacgaaacccagatctgcgtttttcttacagtaaaacaaacagacacaacagatcatcgcgttcggtcttcttcttcttggctttgaagatttagtgataatagtaaaataataatactcttacaatatcatcacagaagaaacacagaaccagctcaagctctctcaagctcatcaccatcttcttcttcttcttcgtttctttgtctttctatttctcccgcatagtaaaaattatatgagatcaacgaaacagaaaattaaaaaaaaaaaaaaaaaaaggattttgttgtgtgttttcgattaaaatcaaatcgatcacggatctgtgattttgaattttgattttaccaattcattagagacgtagatcg

SEQ ID NO: 32375 - DNA, 728 bp, Arabidopsis thaliana landsberg
  unsure (1)..(728): unsure at all n locations
ttctcggcatgtaagaatcattagggtgcttgaaactcttccaaagaatctcaccattgggtctgttgtcttgtaacataagattcgcagacttcataggctgcacccacggggcctttgccgctgctggtactgacacattggtagaccatacaaggcgannnnnnnnnnnnnnnnnnnnnnnnattacatgtagtggatcggaaacaccggaagcgacgatggtgggagagtcttagcttgcaacctaaaccacagaatggattggaatcttttcgtaccaaatcccaacataacgtaaccgagtagtgggaattaacaggagtgaagaaaccaaacctgaaaataccacttttgcagagaagggtctctgactctgagtctttgataggagttgagaaagtgattctgtcctcaccaaaacagagtctcagagacaacaagcaagtgcatgcaagtagaagaagaccaaaacgacgacgtatgttcactgaaaccaccataactctttgaaacagagaatgactccagttttgctttgttttcctacacgagaggtaaattagtagtctttttctgtctctatgagaagacttgacttagaaaatgatgtaaaagttttatgtttcaacgaagatttgtttttggtgtgagtaataatgttattaggtggattcattgaatagcccaccaattagcagtgaccgtggaacaaaccaccaatcttg

SEQ ID NO: 32376 - DNA, 1414 bp, Arabidopsis thaliana landsberg
ccatgtcccaaagctatgcacaggcagaacactaaatatctggtactttcattccaagcagccggttttggttcccttttaatcactcgaataaaaataaatatatcaaaatcactcatcaacgaaacaatgcacaaaattaaaccaaggttgaataaatgaaacttgccatgaatcccaattgtctctgttttgcagcagcgtcagtgtgttttctccctctccccattggaatgcgacgatccccatatttgtttttgaaagaatgtaagttttgcataatacaagcttgtgttgcattttatacaagcttcagctatctcgccaaaactggtttctagtagcacaatgtgctatagtaaagtcaaatggaagacgtagcgtttcaacgtttataaattgttccacttttggtctagctttattttttgctcactgagtgatggatcggaggagtcatatgtatgtggaacaatttttacaagtcggagagaaactgaaatgaacgggagggttttgagttgtgtgattgaatatatatgttaagagaatttttcaaatcgtgaaatcagatatagtgggggttaaattcatactcgtatagcaaaaaaaacattttttgtattattttttcaaagcattcggacttacaaagtttgttccttgccaaacaagtaaccgaacacaccaattaatgttaagaacattagaacaaagagaagatatcggaaaacatgtcatcacaaaaatacgaagtactctcagtgcttttggacaaagtaactaacacggtccacaaaaagactataacctaagccattcgaggaataaatgaattaaggtgaaacaatgaaaaacgtaactcactgttacttggttgtattaacgagtctcataatagaaattagatagaagacgcgatgttcattacaatctactatcgctttataattttgctcaccctcctcaacaggacaccaggacggcgtaaacttatagaagtcccagactgcaccggccgtatatatgatcgaccctaaaactccccaactgttagtttccatgtcgtacacatgaactacaccatttaaacgattctttttcttctccctcaccagaagacgcttgccatcgtacacaaccatgttccagcattcaactcattttctttcagagatacgttcttgatccgcctagcgagaccccatttgagattcccgagtaatgtgtaaactgagattgtttcttttgtccctgatattaaggtcaagcgattgatcttatcatctgccgcaagtaacagtttcatatccggtacttcctgatgaaaaccggaaggaatcaagcgtgcttgctctgtctcgggattgaaagttatgatgctcccgtcgtttctcaaccaatgaaagagtgc

SEQ ID NO: 32377 - DNA, 992 bp, Arabidopsis thaliana landsberg
  unsure (1)..(992): unsure at all n locations
tgagttataactataaatattgacaaaataaaatttataaacactatctttaaactggtaattgatttgaaatatgggtgggaaaaaaaacaaatgttggacttcgtcttcagtttttggaccaaacctatctttgataatattaatagctaagtttttctgtataaagtccaagtgtcttacccaagaattagcttcgtcgtggaagtaaggacattagatattctgattgattttttacaaagtctaaagtcgaatggtctagaggtggttaagggatcattaaaacgcggtaaaagataaataataatgcatatagatgatcatgaaccgatctatctttctttcttttctttttttttggtaaacgaaaccgatctatctttgtcaataaagatgattctcgaataagaaagaagaaacatcaaaacaagctgcatttatagcttgcgttcttggctgcgtttatgttccactttctagtaacacatgagtagttcattctcaatcggcaatcctttattcaccatatcattttcatctttcataatcaaagctctatttttcttacacaaatcacaaacttaataaagtattgaaagagtaacttgtatgagtttaagataaagaagacaaacaatttgttggcacaaaattaaatctgtttgtagcaacatttgatggaaacggaattgaaacaaaatgtttttgattttgtgtataagagatattattggaagataaaacataatgaacaatagatattgaaaaaatatattttatattatctaatgagatatgaaaatagtggcttgataaactattaatttatcaaaatatgatagaattttaagaactatttatctgatgccgttaataactttttttttgttttccaaagagaagagtggaacacnaaaacttcattataagaagaatttgattgttttttaagaaccttaaaaaaaaaacaagaccttttaagaaacatg

SEQ ID NO: 32378 - DNA, 827 bp, Arabidopsis thaliana landsberg
  unsure (1)..(827): unsure at all n locations
tacccggtcaccaagcacaagttgaaagtgcatagatcaataaatcatgaaactcatcaatcgatcaaaaacttttgttttgttgtttttgtggcagaacaaggaaactaagatcnagctacnacttgaatttacatgctttgaaagatgttttataaagctgttactacctttgaagaagaacaacaagaaagatagccaccttacgaaataaaaaccaaactcagaaaccgaatcttataaaaagcaaagacaaaacacacatagagagatatgcctacgttaacactgaacaaagactgattctcaaagctaaggttgtgaataaaaagagaaaagaagttggaatgaagatgatgggtttggttagtctttgagcttatgttatatttatatgtgtttgtgttttatatagaaaagagattattatgcattgaacccaaaaaaatgaattataagaaaaaaaagtcaactccaatatcttattgcttttatataacagtttcattcatctactgactctctttttgagattttgttgaactgctaaagtcaccggggtttttgtcacaggcatattcgttaccgtcggatctaagtaattctctccgtgtgtgacggttaggaattgcacatgcgcggtgagggcataactcattcgccaccccacgagtccacgacccttcaaataattgaatataaaattttctctaaagtttaagggaagaggggtttggattttcgtggtaaacaaacaattttttaaagtaagaaacccctaatttttcaagggtctattaattatatattaattaattaattattta

SEQ ID NO: 32379 - DNA, 728 bp, Arabidopsis thaliana landsberg
ttgcggccgtagccgttcgtagttcgcgcagccgctcggggcgcgccgcggtggcggccaggcgcagccggccgtcgcgcgactgcaccaccagcttgtccttgcgcagcaggcccagcgccacctggatcttcgcgcgcggccgcgccagtcgcgcctgcagcagcggcagcgtccaggcgtcggcctccgccggctccgtcgcgagcgcttgcacgatcgcggcggcgtcgtcctcgcccggatagcggccggccaggaagaactgctggatcgccttgtcgccgcgcaggaacagcagcgtgcagcgcgccgtctcgccgtcgcgcccggtccgtcccgcctcctggtagtaggcctccagcgtcgccggcaactggtagtgcagcacgaaacggacatcgggcttgtcgatgccgagcccgaaggcgatcgtggccaccatcaccacatcggcgcgcgcctggaacacctcctgattggcccgtcgctccatatgcgcgagaccggcatggtaaggcagcgcatgatggccttcgcgcttcagcagcgccgcataatgctcgacccgccggcgcgagccggcatagacgatgccgcattgtccgcgccgtgccgcgacgaaatgcgcgatctgtcgatccggcgcgccgctgcgctgcaacgacaggcgcaggttcgcgcggccgtacccgcgccgcgagaccagtggctcgcgccctgcaaca

SEQ ID NO: 32380 - DNA, 797 bp, Arabidopsis thaliana landsberg
agagatcaatgaaaccaggctcctctcccccggtgaagtagctactctctttcatcgacattacccttctcgtaaaattcatcgccgccgaatcgcttttcctcgctgcttcgtaattactactcctccgtggatgattctccgccgtcgccggattgtttcctcttcgagtattatactctgtttcactaaaattactcctcctagtaggatactctgtttcactgaaattactcttcctagcctcgaaaccgcttcttctcggcggctccgattcactgaaattactcttccgattctccgtcgtcgtctcactgaaattactcttccttcctccttcgaaattactcttccaatgctccgtcgtctcgctgaagttgctcttccttccttcgaagttactcttccgagaatactctgtttcgcataaccctaatccgccattaacacttgagctcctcgcggcggaaaaagcaccggaatacgaagaaccgtcttcttctgatccgatacaatacaaatcttttccacgaaaactacacagctatgtgcatgtcaaaactactaatttctgaacatgattggcataatccaaaacctatgaatgattgataattaaagccttctgctttataagattaatctgactaaagaacctaccgattctggagaatcgatgattcatgggcctcgtattaatatcaacacaactgatactactgctggtgaacacgaccacttacgctgcgttcctatgggtagtgattttcatcagcatcgccctctcttcatcgatg

SEQ ID NO: 32381 - DNA, 393 bp, Arabidopsis thaliana landsberg
  unsure (1)..(393): unsure at all n locations
attccacttgaaaggggaccatgtctgttaataagtgaataacgttaaagccgataatacacattgaaccgaagacttacgccatagcatggcgtgactnnnnnnnnnnnnnnnnnnnnccggactgatatcagtcctgcctgatccatgggctaaatagatctgcatatatatctatcttaagattatatacaatagtcgcttggtgctatgtttctcatacgggctctataaatgagcatctgtgttgcctccaggcatacacacctgggattatcaggctttttcaacatcggataagataccactacacgccaagaactatactattagagcctggcccaatgacagagatttaaacgactaatacatggaccaaggatggaaacatac

SEQ ID NO: 32382 - DNA, 11795 bp, Arabidopsis thaliana landsberg
gcaaacctcatccagatggtgtagtgtatactactctttggccacagcagtacgaggtaccagatcagactcttgaacctcagcagtacgaggttgatgatcagttacgagtatcatcaataccagtgtgcaggaccaggctaatgaagatgtccaagatcattcgcaagatgacctacaatatcagccacaaaatcaggagcagtttcagttacaagacgaggctcatgatcaggctcagtatcaggcgcaaggtgatgtacaagatcacaatggtgatgaagtgcaagataaagtagaagatgaggaaggaattcctgagcatcttgagtctctacagaaatcagagcctgaagaagatgcgacagttggaggtgaggagaagaggtggccgggatggcccggagagacggtattccgtatgctggttcctgcacagaaagtgggtagcatcattggtcgcaaaggtgatgtcattaagaaaatagttgaggagacaagggctcgaataaagattctcgatggtcctccaggcacaacagaaagagctgtgagtctctaaatccttttttccctttcatgttatatgagttgcagctattagtcatataatgctcttgaactaaaactaaaatcctagtgataagaaaactaatatagtagaatacatacactttttggctgtgtaagtcactgatctaaagttttcagacactagcttttgttaaaaatgttaaaaagccatgaaattttataaaaggcaacccttttcatattctccccttgacgttaagaaatatataagtaaacagataggaggaaactgaacatcccttcaactcaaaaaagttatgaacaattcttgtcagaaaaagcgttttaatggggcttagtgatatgatcctgagctgctaaaaacgtgttgacgaatgtactgcatcaagcgaaaccatcttagttagtaattaagcctatatggaatatagtaaccagcaggcctgcttatcatttccttccaagtgaaaggaggaagttaatcgacgaagttgataagatgtgagtagggtttccctttattgctgtgaccaccatgaatctgtgcaggttttatcttgcaagttttatggcaacaaatcaatcatcggtaaggtctcaaatatgaagaaccaaagccagatggcaaggattcagccttgagcactacacagtgctgataagtttatcgaataggcaagattcttcttgtataacctcagtgccatgaagctctgcattctttctggtaacttcagtatctggatgattgatgtcttgctgcagactttctgcagcatgcaaggacctgcttaaccggatgtaacaatatgtggacgatgagattatggtttaggcaacaattaagtaaagagaaattttatgattgcatgaaaaagtgtctatgaagaggttttttaagtctagaaggttggtaatggctgctatggcatcttaaaaggcgataacctaattaccatttggtaaaaactttaaatgaagatcataacaggaaataaacatctaactggtcaaagtgcatttaagtctgtacctctttggaattttctttatgatttgagaaatatggcaccaaaataattattggtagagatcctaagatcgctgtttgtgaaatgttttagtcatttggtaatgttctctacttgtttcctctttcttgcaggttatggtttctggtaaagaagagcccgaatcatctctaccaccttctatggatggccttcttagagtccacatgcggatagttgatggtttggatggtgaagcttctcaagcccctccgccttcaaaggtgtcaacaagattactagtcccagcatctcaggctggaagtttgattggaaaacagggaggaacagttaaagctattcaagaagcatccgcttgtatagtcagagttcttggatcaggttccttctcttcacaatttacatgctgaaaaaattctttcttgctttgtttttttggtttcagttgtgctatggactattccctattttccccatatttgtagagataaaggccactataagtttctatgttatcttcatgtgcaaaatttgctgaaccattcaacatcaaattttcagattgacttagattctgaatagtttcaactatgttttggtgtttgtttcgtttattccttatctattactagttctaactgaaatttgttatggtggagttttgcagaggatttgcctgtttttgctcttcaagacgatagggttgttgaagttgtgggggaaccaacaagtgttcatagagccttggagcttattgcatcacatctcagaaagttcttggttgatcgtagtatcatcccattctttgaaaatcaggttatcttttgttccgttgtatctttgaaaatgtttctcagttgtctctatcaacgtttttctttactctgcgttataaacagatgcaaaagccaactcgccaaatggatcatatgccaccaccgcaccagtcatggggtcctcctcaaggtcatgccccaagtgttggtggaggaggctatggtcacaacccacctccatatatgcaaccacctcctagacatgatagttactatcctcctcctgagatgcgtcaacctccaatggagaaacagcctcatcaaggtatatctgcatatggtagagagcctcctatgaatgtgcacgtatcatcagccccaccaatggtcgctcaggtattccgccaatctctgcaacatgttgtgaagttgactgttcaatctactgcaatttatgtacgtaaagtaaatcacatgaaaatctgagtggtgtggggatttgtttgtttttgcagcaagttacgcagcaaatgcagattccactgtcttatgctgatgctgtaattgggacatcgggttcaaacataagctacactagacgtcttagtggagcaacagtaactattcaggagaccaggggagtacctggtgaaatgactgttgaggttagcggaactggctcacaagtccaaactgctgtgcagcttattcaggtacccatatattctcacaccagatttcttaaccattgtaacctttaaagccgcaaaaccgaggcagaagctagtgctttttgatgatgaaatcggactgtttattgtgttttatgacagaacttcatggctgaagctggagcgccggcaccagcacagcctcaaactgtagcaccagagcagcaaggctataacccatacgcaacacacggctcagtctacgcagcggctccaacaaacccgcctggaggatatgctacggattacagctcaggctacggttactgataaaaacttttaagtctctttagaatgttttactagtagttgcaagcaagagtgaaaaacgctatagatgccgaatcgagtatatgttgttattagcgagcaccctgtttactgagaatcaattattatatcacttttccagttgttttgagacttcttcatttgtgtactgttcaaaacgttagtctaccgggaaattttctttatagcagaaaaatgataaatcatcatgtgatcatgtccttcgtgattttacttccctatttaggaaaaaacaatttgctctcttagaaagaggtctatcatcttgattcattttcatatgatgttagagaggtaatctcattaacatggtagtaaaattaagagagcagaaaaagagaataaagaactgagttacacaaaggttgacgacttgacgtaggatgaagtcaacgaatcaaacaattttagaagactaaaatatctaactggtctcagatatggtagaagcctgaatctgcttctcccttctctcctagaaatccacttcacttgtagatttggtaagtttacttgatcctgattcttcataactcgtgtcacactctacattagatcttcagattcattttgagtcttgatactgtgtttggttgcagacttgcagaagcatggactggagattgcttaatgctgcagctacaggggacattagtatccttgatcttcaccaatcagaattcgaacagagaacaccacaaaacaacaatgttcttcatattgcagctaagcatcagaggttggatttcgccacagccatacttaatctctgcccatcactcctccttggagaaaacaacaatggagatacacctctacacgtcgcagctagtgtcggttcctttgaagtttcaaaactttttgtcaattcagcaaatcaagtaacttcagatgtcgaaaaccggggattatccgtcacacggaagcagctattgaggagtactaacaagcaaaacgatacagccttaaatgtagcattaaagaatagacatgttgatgtagctaagttctttgttgaagaagacacaggattgctgatgctagatatggccaatagcaacttcgtatctcctttgtacttagctattgaaagagggcttttcaacattgctaataacattctggaaatatctcctttggtttcctgcaaagggcctaaaggtatgaatgctctgcatgccgctgtggattccgacattgtcagcaccggtaaccgtttacacatctctttttatattgatttcagtcaatcttttgcactttagtgttaagttttatggattttcaagtcaaaactaattggtaatgagtggattggtctagtactattaagtcgcatctcactttctgatgttggattcctaaatcctaacatgtagttatttcttgttttggttaggtttcttaagaaaattaatggagaaaagaccggaaatgatcgcagaaattgatgttattggatggacacctcttcattattcggtatggctagggaaaaccgagataactcgactcttgcttcaacaagatagctcggctgcttatatatctgataaggaaggacaatgcccgcttcatcttgcagcgtctactggtcaaattgatgcatatagagagcttgttcgtagctgtccttatgtttgggaactagttgatggtaaagacagaacatctcttcactctgcagtcatatcaggacaaagagtaatcattcactgtattctagagatgcctgagatttctctttatctattgaacgcatgtgatgcagatggaaacacacctctccatctatcggttagtcacaaatgttactcgatattgctgcttcttttacgcaacaagcgggtggataaacatgttatgaaccgtaatcacttcacagctgcagaactcttttacagtcagaagcaagaggtacaaaaactagcttagtcaagtgatgatgcttttgaattaagctttgtttttttcacagctgcagaactcttttgcacacaacaagctgaagtagtactcaccagtcaccacaacattagcttaataattaaatgaagatacgatgctcatagatttaaagaattgtttttttctactattaactgatgtgtcttatattggtccagattagtttcaaggttgcgatgatatactatgcactgcaaagatactacaaacaaccgtctcagcaacataacatagagacaaagacgaagcaagaaaaggcagatcttgaggtaagcaatgcaagaaatgatggtgcaatgtatgaagttcatcttctagtcgcgggtcttgtcgcaaccgtagcttttgctggagcatttcagttacctggtggttacaaacctgacggaacacctgcgttgatgacgaaaccagctttcaaatgtttcttggtgttcgacacaatcgctttctgcttctctgtaaccacagtctatttcttgttctacgcttccagagacgggtatcgcgcccgctctgctttcctctacatgtctgctctgttaatggttgtgtcgctgattgcaatggcgtctgcgtttgtatcagggatgtatttgatttcgtccaagtcgagaggattagccatcataccgttcttaatggctggtttcttcgtcttgcatggtttcatctactggttcatcgacccacgaggcagctatgtccttggcctcgaacgacctcgtaggattttaaggaaattagtctatggtaactcattgtttcataatttggtacatgaatgagtttctatgtgggaattgttttatgaatcatgaatcaaattatatgtaaaaactacaatcacataaatacatatgcaaattcctttttggaacaaacctaaataaaatacattccaaatgggaaataaaatctgatttcaggaataaatagagaaagagtttatgcgtaactgctcgagctgagcatattaaataagtaaggaaaggattcaacaaacaggcaatgtaaaattgttctctaggtatttgcctgaaatctagcaattgatcaagaaagatcaaagttttatagtacactgagcagagttttttggcttcttttccgataactcagttgagtccgcagtattgttcctgtcagagaagtccacacacaaatcagatctgtgaatacaatgaagtactactaacattatcctaaaacagccaagacacttactggtgaaacataaagagagcatgctgtcgttgcaaatcaaataggtgcagcacaagtggttctgaaatgtccagtctggttacaccggctacaatgcacaacccgcttcactcgtcctctatcttcagctctaacccgtcttttcctcggcctaccaggaggtctcagagactttggagggtttataatagcatcaagagcagctttattcacgtttggatctccttcagaaagctctctccaatgacttttatctggaatcggatgaatcgtctgagagtatgtcttcctataagtagccacagtaaaacagctctcagtgaatctatgaacattctgtctacaagaaagaagagctgccacggcgtgtgcacaaggtaaaccatataactgccaaccccgacagagacaacaccggttcctgatatccacaatgttgtttccttcatgagaaataacttcaaactccgcttcattggctcgaagcacctgataggttcttgcaagctcaagagcctcggctacacgccgttcagcagttgggacgagtatcgaagtccactgcatactggtttcacgccgttcattgaaccaagtcattagttgtctcctaatgcattccatcatctgaatgattggaagtccagatgcttcagcgatccatgaattcagggattcgactatgtttgcggttaaatgtccaaaccgttgtccttcaaaatatgcggtagcccataaccgaggagggattcgccggatccagtaagctgcatcttgagaaatctcttcaatttcaagtattttggcttcaaactcaattactgttagagcttgcgcagcttcccacagataattgactaacagtgtgttgttaaactccttgcggaagctttcgctcaaatgtcgcatacaaaagccgtgaaacgcagttgggaaattctgttccacaccttccactattcccttttgtctatctgacaaaatcgtgagtctcggcatattctcagtattggtttcaagaagattatgaagctcgcacaaaaaccacatccaattctcgtcattctcttcatctacaatcccaaacgccaacggaaacaaagcaccatctccatcaaatccagtagcgagaagcaaagtacctaaatacttgcttttcaaatatgtcctgtccaatccaagaagcggtcgacaagcatttagaaacccataaattgaagcttgaaacgatatgaagagacgctggaagcaattatcagctggacttccataaaccgaagcaatgcttcccggatttgtccttttaacctgctcacaatattgcggaagtaaccgatacccttcttcaaaagatccgcgcatagtcgccatgattctttctttaccacgccaagcttgtttgtacgataaggtgattccgtgaacccggtgtatctcttcaagaatctctttaggtttacagttcggattctcgcgaagccgctgctcaaccgagctagcaacccattgaactgaagcttgttgatgacccaagtgatttattcctccacagctatggctttcatggatcgttctgattgtgaaagttggaaccccggggagctttgcagcgtgaactctccatggacatccgtcactcgaacacttagctgtgaaacgagttttgtcagattttatagtctgcatttcgaaatgaagagcaatcgccatatctctcagtgctctacggcaactcttcacatctggaaactcttgtccaacggtaagttggtaagtcatgtcagcagtgagagctcgagcttgaaccggagtgctaaccataaccatttcaccatgctgatcaatttcaagttcatgacttgagtcaacggctaattccagattgtcatctagttcatggttttccccaacaaccaactgatgattattatctgacaatgagaactcatggttttgcgatgaaagaaccagatcaggatcaacatcgtcgtgtccaggcttctgatcaaccgagatttcattctcgttcatataatcatgatgatgatgatgatgatgatgattatgatcctctccatcctgatcttcactatttcctaagtctagctcatgatcatcatgaggatttcctaaatcaatttcatgatgatcatgatcatgatgagcaagtcctaaatccatattgtgaccttggcctagctccacatcaacatggttttgaccaagccctagactgtggctgtggccaagcaccaaagattgaccctgcccaataccgatattacgattttgtccaagcatcaaatcgcgattggccattgctgaaacaatcttcttaattcaaacaacatcaacaacaacaacccggtttttcaaaaacaaccaacttggccaaggaaactaaatttcttttactttataagtacctgcattaaccaaacgcgatattaagatggaatagttcaacactaaaacactaacaagagtgatacaaatgaaggtaccaagatcccgaaataacgaaagatattgacaactgaaagtgtcacgtgagctttagttatcattaagatttcaaatattgagactccacgattgagaccaaagcatcagcgacataacagtacgaactgtaagaaagtaagaattttccgagatacgattaagacttagagaaacagaaaacgcacggtcgtctagcttaatcttgtgcatcgtcaatttcactggacagtgaattcctcagcgaaaaacagtaacttactctttgagaaaaaacggagaatttggagctacaaaagcagagtaagaaaaataaagtgagtgaacaaaatctgatagagacgagaaaattaaggaaatgacgactttttcgcgttgtccgaatctcatatcgacactatcagatttaacactaaaaaccaaattcgaaattcaaaaaaaagttgtgagttaaaaacgaaatccttatcaggataataaagtttactcgaagatctgagctgaacaaaaaacaactaagtacaaatgaagaattcgtaacaagaggaaggaaaagaaatccaaataaaaatcgaaactttaacttcagatcgagaaactcacttgaatcaaattctgggtatcaaccaaaacacgaggaaactgaagaagatccaagcaccgatccaggaattagaaatctagggtttcgagtatgaatgaaatgggaaatggaaattggggaaggagccgttagtgaaggtgcatgtgattttggcgggtaaaaagaaaaagggaaaggagagaatcgggaagaagaaattgggggaaggggcaaagacggaggaggaaggagagaagggttggattgggaatttacagaaggggcagaagagggagacattaggtttcccttactccgatgatgtccattttacacgttgccttcttcctcgacaaggctatttatgtcttttagttcctttttgctctcactctgcccttcggatttactactatttacggacttgccctctttgatttttctgagtccagctactaaattggaaaccaccaaaagtattataaagcaaagaaaggcccaactctacctatagatagttttgtcactcaaactaatcattgattttggatttcataactaaactataccattattttaccatcaaaattgactaattgaaattacttttgttagatatttgatgtaaatgaacaaaaaaatcattttttttttttacttttattattatttctcagttatataaaattggtctctttttgatattctgatttaaaatttaatattcttttattttgatcttgtaatatataattctattgaggtaggtaatttttgttatatcttttttaaaaaaaattcataaatttgtagtttcactttattcaattaacaatgcaaatcattttagaatgtgattcataaataaatgtaaatatgaaaattgtaactaacaagtatggttcaatttcaaggatcaaatctatcaatagacacccaaagatgtctgaatccaaatcaaacggagtgatgtgaagttgctgaggagccaaaaagggtttctgactttttctattcgaacatgcttgggagaggtctcaccgccatgaacgcatcaaccatctggaacataaatttgtcgaatcacttagtacaaatgatattttgaatcttgatgattgacaccaacaaatttagttgatctttttacctcatcagtaacagcagctcgagccctgcggtgtctctccacaatttctgtcaacacttccgtaagtctcttctttacttctcctgttagcattcttccttctccatattcctgaaacattataatcattgtgtttttacttttatgaaaaatccacacaacacattcttccttctctgtataacaagctagcgactaagtgtgatgttattattacctttttaatgtgttctagttcagaatcgtcttcgaggaagaaactcagatacttgacgggtatgtcaacctataaaacgtagaagggagattaccccaaaagaacaattaaagcaccagatccgataagatcaactatcaagaatccgcaactgatttaaaattctttcctagtcaattagtttatagcaagtccttctacatttccagctgagttaggggttagtttttgttggcttgctagtactctgaggaacacaatctaaacaaagtgaatattcattcttaactttcaaccggatattaccgcataaggaacacagctgagagttgccactacataatacagaataagggacgaagaggatacaaggaatttggtacctcgagatttgctccaagttctcggtgcttctcaatggagtcttgcccaccactaaacgcatatctgtttatctgcatatgaaaccataccaagtttaaatgctggacgaaagtgtctgagttcattattaggactggtatttaatgttctgtaacgtgtttcagatgccgttacaccagcaaaagaaaaaaacgagtggaaggactcgagtagcaaccaatctagacgatgaatgtgtgtgaaagcctacaaggttgatgtggaaacccagaatggcttgttatcatagatggaaagaacaaaaagaattacagaaattaccatgtttttaatgtcctttgcggaatcagtcacataga

SEQ ID NO: 32383 - DNA, 560 bp, Arabidopsis thaliana landsberg
  unsure (1)..(560): unsure at all n locations
cgccgacgcctggctctgggtaagaacggacccgtgccctcgctcgaggttgaggttcccggcacccgcgacgacaccggctactgggccgagcagcgctattcgttcgataccctgcccaaggatttccagtggctccgcacccctgaaaccgagcgcatcttnnnnnnnnnnnnnnnnnnnnnnnnnnnnnnnnnnnnnnnnnnnnnnnnnncgtggttcgagcaggccctcgtcgcccgccgccagacccatttctcctacgatgccgaagtgacggtcgatttctcgcccgtcgatgagcgccagttcgccggcctcaccggctattacagccgctacaacttccactacctcaccgtcaccgtccactcggacggcaagcgcgagctcctcgtcatgagctcgatggcctcgcaccccgatggcaacctgaccttcaccgtcccgcccgtaccgctgacgcaagagggcccggtgcggctcatgatcgagatccgagggccgaagctgcagttcttctacgctgcgggcgatgccagggcgggcggcaactggca

SEQ ID NO: 32384 - DNA, 1291 bp, Arabidopsis thaliana landsberg
  unsure (1)..(1291): unsure at all n locations
agtatgtgatctttgactttttctgctgcactttctgatatatgcatgtgcggaagtactgcacctgggaatttcctttatatttgaaccatgtgttccaataccttgtttgttaattgattgaagttttcctggtttccttcgagcatagctcctatggaatagataaaattacttggaaacatgtgctttcatttttttttgagcactaatttgtcatcctgatttctttggtcttcactttttactaactgtttattataaccttctcccagcagaaacactctagtgctgttgtaccagcccaaaatgacaggagatctgtatttgtaagtaactaagccatcattttttttttgacctttatcttttcttcatttgttacattatctccatcttttcagtatcttcctagtttgtaaatacttgaaacgagtactctactaatgttataaatatatacaggagacaccaacaccttcaaagcacaacatgccaatttcacatagcctgtcagagtcgcgtagatccaaattaaccgcagaaagaaacctggtgcaaattcacttggatttttattgagctatcaattttgtttgactatgatggaagaaccttgttttcctgtagtgatagtaacataatgcgtttttattgttggctaaagtggatatttaattttgacataagctaccattatattgcaggagaactacgaattgctctccaggtgtataaaggaaaatttgggattcaatgatgataagccactggctgcctgtgtaatatacaaatgtcttctgcactggcgtgcctttgaatgtgagagcacagccatatttaacatcattattgagggaatcaatgaagccctgaaggtgatccttttgttgtgacatatagtacccaatctccttttttttaaagggattttgttactactttcttccaaattggattaccttaaataaattgataggaacactttcatgtaataattttcgtctttgctttatatgtttatttcagggcggagatgagaacggtgtattaccatattggctctcaaacgcttcagcacttctatgcctcttgcagagaaatctgcggtcaaatagttttctaaatgcaagtgctcagcgttctgggagggctgcatatgtgagttcaattgagactagagagtagtttgcatgtttcatttctatggaattgaaatcgttattgagtttcagtatttttgtaaaacgttcctcagtaaactaatttttgtnttttgtgtacagggagt

SEQ ID NO: 32385 - DNA, 3769 bp, Arabidopsis thaliana landsberg
  unsure (1)..(3769): unsure at all n locations
aatcttcactaacatccaaaggtaaaacctaatccctctacctaatccctttacctatagcacatggacgcaccagtttcctaaagttgtctttgtgactcattttgactcgataaaacgtttgaaaacttgtgtcccttaagcatgaacaaaaccatgctcttataccactcttgtaacacccccgaactgttctaggactatgaacgaatccggaagcgttacttgtgatgccagtagacgatctgaccgagttcccagaacacatccggtaccaaggtcagctcatctacgaacatcgttcctcacaaacacggcctaaggcttttcaacctgtatcattttcgtaagttgtgttagtccggacaagactaatatcagaagtacacaaggattttaaaaaaattctcctttatttactaaaacattaaaacacttacaatggaatgggatcccgagcctaatgctcaaatcgagtcaatttacaaatctcattttacaaagacaacaaactctacaccggttccccaacgttcgtgctccccttaaggcctccccaactaaggttacctgtaagacaaaaagtagaatcttgagtaatctaatattactcagtgagttcgggtttctaacaaataacaaaaaaatctcaatcccaatccccaatcaaacaatcaatacgagtatactcgattgagtatactcgacaagaaatcacacaacacaaacaaacaagcaatgaatactctttacagagtatatgcagcggaaactactaaagctaaaactagcacgctaacgactcttcatcctacaggccctatactatacgatgctgatttcccacaaggcaatgtctccgaccgctagacacaaagtctaaaacgatcgcatcccttccccaattcaaaccgtgtacaagggaccaactcccttacggtaaaacttttactaccccgtcgggtagtcccgggtggtagcgaaccattccgagatattgggacaatcacgacatcgtcacaccttagtcataaaaatgactaaccacattacttactacgagcctaatgtaacctaatactactagtaataaaacctaatagcaagcaactaacacacaaagattaatcaagccaaaacaagattaaccaacaacaatcaatcaatcaacaatcaaacaacctaacatgcttgctaacaatttaattcgtaataaaaattaggaacaaacaaacaaacaaacaacaattaccgcaaataaatacgataataaatcctaccacaatcaaacataatggctaaactaatgtctagcctaagcacaccaaatacttcatcccaaaataaatgaagcatgaaagcaagatctaatcaaacaaccaatccgatcatacgtaaaaacgtagatccgactatcaacaataaatgcatgaattatactaagtataaaaattcaacctcatgcctaacaatcataacccaaattaaaacctagtcatgtgctactacacacgctacggtactcaccttagccttaatgtcgagagagtaaaattctacccttgaccgcctaataattttgatccgaccgagctatctccaacgcgtactaacgatggatcaaagcgtcggaccaaaaacaaaattaaaaaaaatattctaaaaagaataaaagactaaggacggaactacttaccttaatacccgactacgactcccgactcgaccaacttctacccgactcggactcgacggactaactagctatctaacggtttaagctaaaggttttggtgtggatggtaatgaactacaagtgaaatctcatgggtatttataggtgtgggaaacttggagaccaagtcacgttccttggagttgcaagcaaagtaatggatagggcttatccataaccttatccattctcatgcttatccttatcaaaaaccatgtttatccttatccaaactaatacttatcctcatcaaaacgctcatccttatccttacacaagtagctgcacaagcagcttacgacatggcccctccacgagcactcgttccgcttactcacagtacacgcccgtaccgagaactctccgaccatcgtacgcggacaatgatcattatatattcttctaaaaaatgactaagtcacttaaatactccactaaaccttgttgtgtctgcatccaatcccattcgatcaccgcttgcttgtctcaacctaaaattactatttctcgataaaactagatttcttcgataaaaactaatcttgcgtctgaaacagtccagaaacgtccgttaactattcaatcgctccggtgaaatcctagctgcagacgtcacaaagctgcccaccaaatctcgtgccgatcggaaaacagacgagaccacgatctcagtttcaatcttcgctggtcctaattcgcgtctgagaaaatgtgtctcacgaaacttttatcacgatttgatatgacgaaactgatttctcccaaaccctaacgattctgcttcttctccttttctctctttttctcctttataaaacgaaaagtggctaactaaagccctaatttcgagtttccttcttttataggcacactttagggtttccaattaacccaaccaattaaaccggatgatttaaaaacaaaccctaatcgattttccggttcacgggcgttacacattgagccaagtccaatttcaccatatatatgcacgacgcttgcaacaacaaactttgttggatttgttactaaagaagctggaggaacgatgattactgacatgtccaatctgttatattttcagatattattcttttatataaaatataaaaatatataatcatttacttattcaaaattaaagttaccattctaaaagaaattaatacttttgcctttaaaataaagaagggatttatgaaattatacaatcaattaataaaatactataattaaggaaattatacattcttattattaatcctagaagaaaaatgattataaatactaacctctatataaacaaataggccaatcttttgggaaacaaaaatgtttttttttcaaaaataataccattgcttcaactttgttctattggtaaagctattttttgggaaaacaatcttatctataggtcatatgttctattttaatatctagaagatgatacattatatggatacctatttgtcataacagtattaagaggccaatttttgtcaatatattcttttaagtgtttatatgtttacataactagtcttgtcaatacatatttgttcatatgtttatgtaactaagaccatatttttacgaattatacgtatatcactcttggttgttctttaaatttaattacctctaattttagtttttttttcttttaatttttagaatatctaccatcaaacaaaacctgtggatacaagtttaaaatacaaacaaagaatatataacactagctcagctaaacaaaannnnnnnnnnnnnnnnnnnnnngaagaaagtgggaaacgaggaatttgcttttaaaaaaatagcttacatgaataaattttctcttactctatgaaaaaactatttttctaaacctaaacctaaacttatttatcttaattttaatttatttcaaaacataacaaaaaatagaattgaggctacgtacatcattctctacttgaaaatttagtggtcaattatgtgaagaaagtttatcgagcagaaaacttcgaccgcagggatatgaacctc

SEQ ID NO: 32386 - DNA, 1169 bp, Arabidopsis thaliana landsberg
tttgctctcgccctcttctcaacatcaagagacccaataagctcagccacgctaaactcttgtctcttatgttttagagtgatagcaaaatccgtccaagaaggtggcagcttaacaataataccgtcaactatgaacttgttaggcaagacacatgggaactgttcgagttccttagccagtgcctgtatttcatgagcctgttcaactacagaacggttctcaaccatcttgtagtcaacacagcggctccatgatgtacagctcgctactagcatcagaaacaccaaacttctcatctaatgcatcccataactcttttgcagatatgcacgtaatataagaatcaacatacttgttagcaagagcgctaatcacggcacctcaaaaaaggttattagctacctcgaacgctccctcctccttaggagtgaactattcgggtttcccttgtgcgacgtgatagcagttcattgctatcacccacaatatcatcttactacgccaactcttataaaatgtaccatcaaatagttcatttgattttatcgcagttgcaaaaccacttacataaaaaaaatgtctattattagagttttggatttttataaatttaagcatttttcagttttaatttagcccagaataataatgtgatatatgtgatgacatgtatgtgcatgtgtgtataactactcgcataagcagtaaacagcaatgaaacatgcacaaatacgaagaacagagtgtacccagcggagggaccgatgctcaaggcaccagtggctccattcacacgagacatctcgtgtgtttgttcgatgtagccgtacgaagtcggtgcaggaagatgtacgctgtgcagtccctcgaacggtcgccgggaagaagaacagcagcacgcgtcaactcgggaagacgacgaacaacaagctgtgaacgaagcagctggacaaacagatcacgcgagcagtcgcgaagacgctccccaaaaatctgatcgcccgcacacccgtgcaagtgtatctctgcggtcggtgatttcggaggcctgctctcccactctctctgtgctcgcagaagatgggacgggaatgtgttatttgcaattcgcgtaactggaagagccctcctctccattcttataggcggtcagaagaagggagaag

SEQ ID NO: 32387 - DNA, 1926 bp, Arabidopsis thaliana landsberg
gagtttttggcaagcccactttagataaaaacatttgggtcaaagctcaacagtttatgtggccacacgcatttgttgaaagggaaatcaaaaagtgaaacctcttccaagttccatcctagggattaagagttattgtatattcccatagttcttgttattgtggcaagaagtatgataatcgctcaaatgtctataagaaattgaaaaatagctcgatatatcgttaaaatatttatatatgattgaccataacacgatgtgattacaatcaattacaaagccaaattaacagagatgaatatgaggatgtaaagagtgtatacaaataaccaaatactccaatgagaaacatgtcaaccaaatgtatatttaatgctgttaggtgggctttggacctgtttcacgatggcaaccttcgagcactccgcatcctctcctgtaaggatttgcttgtttcttcttgcaggtgttagggtgggctttgtcacaatgtacagcatgatctccacgatcgatagcaggataagttatgtatcttacggaggcctcaaccttggttcctgcaagtgccaagaacactacaagagcaagagataggataaccttgatacttttagacatccccatattattattgttctttttccacaataaataaataataaaatttataaaaagaaccctggttaggagttcagtttatgttacttatataattgataatgtatcgggaattggctctgtgggattatgaacaagcgctagttggtgtttctatagtagagactagattgatttcaaagttggttatatttagatgatgattagtaaccacatatattttagtaaatgaatgttatttttagtaaaaataaagaaacgtctgtttaaacagaaaatcactagaatggtttctagaaaattattatagaatttgcatacaaattaatttagtttagggatttgtatctttataaactaactatatttagattgactatatatatggcctagtttgactagcttggttgtcgctgcctctatccatggacgatgcattgtagatgctgggctgtgcttcacatttctttgctcgatgtccttagcctttgtggctctcggagccatcatatccagtcagtcctatacccttttttgctcgtaccttctctagttctcttgctgccttcctttggatttagttcatatattgtttttgatattttatttcatgtgatctcttttccatttcaaaagaaaatcttttgtcaaaatatctatgatatgtgtcactagaaaatatattcttttgaagtatatttaaagcctcctttgccgatatctttcgcaactgcggtattctttcgtagtatttacaagatgtaaagttagttaaagaagtagtttttttatataaaaaaactatcacaatcgtagtcttaaaactgaatcgggaaattgtatgtttaacttgttatgctagctaggtcttccctttgcaatcctgtattatgtgtagtgtatatttttagtggcatattttattagggacaatgtcccacatcggaagttaagtaggatcttaagtgatatgtataagatatgggtcgctctacctattgccaattggttttaggttggaagcccacaatctaatatattttgtatttatttgctttaccaaacagtgtcatattgtaaatttatacggtttagtaacattgtgctagatgaccaaatattgaatgcaaaaatactagagtctagcgataggaggaccatgttaaaaaaaaaaaaagaatctgacttccttaaatatactgataaaccaaactgataccaataaaaaaaacgtgggcacataggaataccttatttgatttgagaaattgcaatatgcctataactaatatacacaatttt

SEQ ID NO: 32388 - DNA, 571 bp, Arabidopsis thaliana landsberg
agagaaacgagctaaagatgaaatcaaggtgttgttcaccatttggaactctaacccaaatcctccactaacgagcctaagttttcactcttttacttttgatggtgacttatgcagatgggcatatcaaaacgcatagaagagaaagaaattgagcgtgattcatttgaattcgaaatttccactgtggatgttaaacaaactgatgaaagagagaaacaagtggtattgctttcgtccctttatttacttacatgattttggtcttgatgacttttcccttgctatatgtgccttactttttcatcatctgcgtttgcacagcaagttgagcttgagagaaagacaaaacagaattctgaaaggggatttgaatccaaaatagaacagaaacagcatgaaatatacagcttggagcataaaatcaagactctgcatcgagaaagagacgttatggctggtgatgctgaggatagagtgaaattgtctttaaagaagacggaacaggagaatcttaagaagaaacacaaaaagatgtgatctcactcaccaaaactgttctcagatagct

SEQ ID NO: 32389 - DNA, 607 bp, Arabidopsis thaliana landsberg
  unsure (1)..(607): unsure at all n locations
ggtattccgatcgtttgagatacctagtaagagaatccattatagaaacgtcactactagttcagagaaacaagttagatgtgttaagatcaaaatcactgctggaagactaatcataacaagtaagatgatatcgctaaactcgttttcaggagctgatgttgtatttaagggaatctacctgtgtcacaanaagcaagaagaaaacccgagcaagacctgtggagtgtctggcagacagtacaggatcctgactgtagatagaaactcccgaaggctgaacacgtgagtccacccgagaatcgcgctccagaaacaaaggttccctccgtgctaagagggagaaatcaggctccattagatttgacgaaatagtatgcagagatgacttgctttcagctaacggttcttcctggcgagtttgagagaccctagctagatactgaagataagaaaagataacaataattcagaaaagaaaaaaaagggaaaggaataatctcgattgaaacaagcaagcttacttgcttctcgaagagagggacaacagtatggtcaactaaaaatctcctaaagtgtccaacaatggcttctaatggcttaagaa

SEQ ID NO: 32390 - DNA, 3239 bp, Arabidopsis thaliana landsberg
ttgggatgctcgcagtaagttatattcttttaatcgtttagttttgctcctgaaatatgcctggagcttggtttagaaatctgtatattttctaatggattagctatgtgtcattcacaaatatttctcgcaatcttggcctttgcttttgagtcatatcgcggagactattgattgatgaggatcggatctaagtttcttagaattataaattagttatttagccagattccataagagaggaatttgatcaggtttttgatatgtggctactattgtatgttttactatcaattgctgagatatgtcttcttcgagttctacaggtggaaaatgcacacagcaggcagaacttagtggagagaatataaacatcacctacaaacctgacgggacacatgtagctgttggtaatagggtattgtctcgagccccatatctttacactttcattgttcttactgtctatggattacttgatagatcccttttcatagtcgttgtcctttctcttactggccaatgtaggatgatgagcttacaattctggatgtccgtaagtttaaacctctacacaggcgcaaattcaattatgaggtaacgtaagctcagactcatgttaatctttattaatggctttttttttataaggctcttccgtatctcctgtttcaagctcatgcggttatatgtcacctaagttccttgttcatgtaataatcgtcaagtaattttctggtgccgtatggaatgttctcttatcttttgtcttcttgtaacaggttaatgagattgcttggaacatgcctggagattttttcttcttgactactggacttggtgaggattttaaattctgtactttcctgcacacgattccctaccaaagatttctttgtttttgaacttgagaaaatgatcttactgaaagttactttgtatgttgtcctgctcaggcactgttgaagttctttcatatccatctcttaaaccacttgacactctcacagcccacacagccgggtgttattgtattgcaattgatcctaaagggaggtaatatatatttacatttgtgggctggccgtctgagacacgaatgataatctttttgcttttgcatctaattcttcctctttaccttaacagatattttgctgtcgggagtgcggattccttagtaagcctttgggatatctcagacatgctttgtttgagaacatttaccaaacttgagtgagtatcaacatgaattttccatagagtagaaaaaggtttaatttctgttacatgttagtaaattaacatctatttctcataggtggcccgtgagaacaataagcttcaactattcgggagagtatattgcttcagccagtgaggatttattcattgatattgtaagtgattgcccagacttaaacactgctaatttcaatgtagtttcctcaatatgagattagttcctcgtatctgaccactaactaccaaacaggctaatgtccaaaccgggcggacggtgcatcagattccatgtcgggcagccatgaacagtgttgagtggaatcccaaatacaatttacttgcatatgcaggtgatgacaagaatcccaagtataatactgatgaaggtactaccgcgtattagtacttcattgttagcaacaactcaaaactctaatattggtagcagaaaatgaacaatgacaacaacttggatctctttgcaggtgttttccggatatttggttttgagagctcgtaggaacagagcactgaatcgggaaacatgatacacaactccacttgattgttccttgttgagttagaaaaagtttatgtgcctagtgtacctaaatatgtattgtcagtatatcaagttggaataatcttacagtatcactaaatacattgaaagtttgcagttctgaatctggcattttatttattgcaaaaatttgttactatacaagcaatgttgtttattattaacgaagaatgaaattaataagatcaagatcagaattctaatcccgaattacatcaattttctactatgtgtgagtactgctaaaagttacaggttgttcttattccctccggcgaatcttcagtctgggagatttgacagctactctctcaaagctagaacagaggccaatggtaagatcggaccaaaagcatcatccccacaatgaaggtttaagaaagaatgcagagtcctgagaaagaaaacacatttattactgagagcccaattttggattaaagaacaagaagagcacacgatttgcttaccgaacaaacagtgaataggaagagtttgtcaaaatccgcagaggatgaactttgagaccgggaagaacaaccctgcagagcaaagaagaacaatagttatcaaatactgagagaaccaagtaacaggtttccacttgatctcaacgcttgaactcttcatcctcttcccactcatcggctctttcgacaaatcaaagctcgaccctttcatcctcaactccaaaacacaccgtgtaagcgttctattatcattcctctccctattaacacctctgtaaactttccagaacacaaacagcttagcttgaacaagaaacaccagaaccaatgaagtagctaatgacactgcagaaggtatccaccatttcttgcaaaccgcattacttttcaccacgtcagcatcatcagaacaagaagaagagtagacaagtgtgaagaagaacccatggaagactaggaagaaacaacaaagctgaaagatctctcttttgattgactctagtcttgattctttaagaagaacacgacgacagaacaaatcttcttctctttgccataacttcaaaagcaacaaatgtcctggactctctgagatttcagacaacggatgctgctgaatcactttgagtattcccattcccggatttgagaccgcaaccaactgttgttgttgttgtctctctttatgctcttcatctactggaatctccactacatgagaatctttagttccggccatagagaaaaaaaagattgagactttatgaagaaacagagatcggaataggaaagcaattagagagtaagatgaagattgaagatttgagttcgttgtgtttttttagtaagaattccttttctttcacaaaatttcaggtatttaaattgttgttctttaacggctatatgtacaacggtcggattgttttctttttacgtta

SEQ ID NO: 32391 - DNA, 453 bp, Arabidopsis thaliana landsberg
gatctgctaggagaaatacctgtttctttggcaaatggggagaaaaaagtttgacgcttccggtttcgtctgcttactctcactgcttcttctgtataattccttatggcttgcctctcctaacatggaaggtgagctactcttcccttatctttctttattatctacgtgactactcttgcctgtgttacgggcggcatgagaattgaacctgtccatcgtggcactggctctgctcttcagaaaggactttttaagaacctgataccgcttgaaagcttcaatttctatagagaatcttgatcataatctatggatacgctcctttagaaaaatcacaattgttttactgtcagattcaatgctacatctctgacatcgacatgtacaagaatctgtatctatgtcactagcatacacatttagaatgaagaactgaagatgcattcatgc

SEQ ID NO: 32392 - DNA, 686 bp, Arabidopsis thaliana landsberg
ttgaatataagagatacagctaaaggcaatcataataagctgaggaaagagctttgaatcttcatctcaaaaacgcaaactgcctaattattatccgtaaaccttaaactcaaaggataggttggaattagatctaattaagcaagcttggactgaaaaccaacgccatcaccaacacacatacccaatgaattcttatctaaagacaatcaacggtcgaaacgtaaccgtgatataaaccaaaaggaaaagaaaaccgaactacgccggattaacaccgtgagctagccatcaccgctgaaagagccgatgatgctagacaagggccgaccatgtactgctgtggaagccaatatatgtcagacgaaagccggatactacaccggacggcaattcaaccatcaccgacgacatcaatttaccgtcgtcgaaaattttggtttgatgtcaatctctctctctgaaaattttgagagagagaagagagagagggccagagtcattttaattttgtctttaagaataaaatgaatacaatagtaacagaaaaaatataatagccgtgactcgataagcattttaaggcaaaactcttgtatgattctagaaaggaatatgaatataggccactcccatcattacaagtcgactgtccccgcacatcaaagctaataagtgttgtgata

SEQ ID NO: 32393 - DNA, 621 bp, Arabidopsis thaliana landsberg
actttgtgttttaaaacatgaactcgtaaggacacacaggaaatactttgaggatttaaattactactgcaagattcactgctgtcacttactgtctatgattgcttggccttaatgttattcatttcagagtacacggcttcttattaataatttttctcctaggctcgaagctcaaaggagtggctgatgcagcaaaaaataaccatgttgtctttgaagaaaatcgaacactgtacaatgaagtccaagaattgaaaggtaaaactcttttagtcaatgtcatttactaatttctatgtattgaaccattcaagaaatgacttcagttctttctcttcctatctaggaaagatcagagtctattgccggattagaccatttctttcagggcaaaacagtagccaaacatctatagaatacattggtgagactggtgaattggtggttgcgaatccctttaagcaagggaaagatacgcctcggttatttaagttcaccaaagttttcgatcaagcagcaacacaaggtttaaacctctttccctcttaagaaaagatagcgttttcctctataatatatgatattcatatcctgaatctgttatcttatgtagaggag

SEQ ID NO: 32394 - DNA, 495 bp, Arabidopsis thaliana landsberg
ccgcggtgtattgcgggtcaatcccgaaataataaaatttttaaatctttcgtacctttaaaagatactcaaactacaaacaaaaaatgctgaattttaataataaactaatatacaacaaatatcagaagataaaacatgaataacccaaaaactttatatagataaaaatttctatcaaaaatatattatttaaatacaaataataattcttatgaaaaaaatctataattttttaataaacatatctacccgcggtacagtatctagttaccttacaaaaaagatggattacatcacataaatagtatcaaaagtataacttatattagtttgaattattttgtaagaaaatgacacaaaataaataatataacatcaattttaataagtgatgtggtaattaacttggttagcggtcagttcaatctaattgatacaaatttgtattagtttgcatcattttaagctattgatataactacaagaaagcga

SEQ ID NO: 32395 - DNA, 585 bp, Arabidopsis thaliana landsberg
gtgacacattcatctgttaattagagagggttaatggtttaaaggttcagggagtggataacagtaacgggtggattgaagacgaggcagatgctgcattgggaaatggtagcactcatggagatttagatagagaaatgacaaataaaaactcgggttcggatggggtggagcaggttgttactttgacagcaaataacgctgagtcaagtacttcaaatccatggcctctgtccagtttgtgggttgatgatcatgaattgcgtgtagggttgtgttttaaagacagggatgagctgaagaagacggtggactggtgctctcttagagggcggcaaaagtgtgtagtaagagagaccgagaaggacaagtatacgtttgaatgcatcagatggaaatgcaagtggttgcttcaggcagctagaattgaagagcacggacttgttgagataaccaagtgtaatactcaacatacttgttgtcctatagggccagataattttgacgtggaatttgcagcagaggagattgaatgtcttgacagggtacagcccgcactaacgattgaagagttgaaaaattggt

SEQ ID NO: 32396 - DNA, 1598 bp, Arabidopsis thaliana landsberg
  unsure (1)..(1598): unsure at all n locations
actgataacatcatcaacgtctttcttcttgggatacttcccacattccagcccagttaagatactaaattctcttaatccaaatctgattggatgaccgccgaatacaatccacatctcattcaccttctttgtcactaactgacggcatattagtccaaggacaagcttagcattgaaagatgccttgtttttgggtattttaaaaagtttcccaaatggagaatcgagaagaaactgcatctctggtttcccctttagtacttttgctatgtcagaaatgtactccggtttnnnnnnnnnnnnnnnnnnnnnntcggaagggtaccggtcttttgcaaagagtcttggtggtaactcttcaactgtaagatcttcagtcggagcaacacttggactacctgcaattaaaagtcatatactgttgagcaaacagaagtagtgtacgtacacagacattttccagattataactcaaaatcatatttttggcggaaacagagatttccaattctacttctcaatttttcatcctaaagatatgctaaattccgacaaattctaacactttaatcaaacaagctttacaattctgatacacccaaagacaacaaacggtaaattagagattctaacccagttcctccgttgcctttgtcgcagagcgttttctccgcggggaaactcttaatacacgcttctccttccctggaccatgctgcttcctcgggacttcgtcgttagctttattcccagccatagctaaagatgctatctcgccggaggttcaaatttcgccggaaaaacagtaactttctcttggcttcgccgggaaaaacagtaactttctcttccccggatgtgggagttcagtgactcaattcaactacccaacaattcgaagttatgtcaaattttgaaacaatggatactgaatttcgtttcgctttctaattctctctcaaatctctccgttactctcttctctttttctttttcttcggtttcttcgtttcagtttttttgttttgtctttttcaaaactgaaccgcatcaactaaaccgaaaccaactgctgtagggtttggtttatgccatcaactgaaccgatacgaactgctgcacggtttggtttgtaccattattaagttttcctaaggtaatttggtccgaaattgaatgaaaagacaaaccgtaaaaaccagttctcactttgacaaacggtgagagcaaatcttttttcgtccacttttgtgaaaatttctttttaaagaatgatggagttaagattgttggaatctctggtcctgcaggcattggtaaaagtaccattgctacagctttacatggtcgactctctaacatgtttcagcgtacttgttttgtggacaatcttagggaaagctataagattggtcttgatgagtatcgtttgaagttgcacttacaacagcaacttcttgcatatgttttaaatcaggataaaattagggtgggccatttaagtgtgatgaaagaaaggcttgacgacttgagggttcttattattcttgatgatgtggagcatctatatcaactagaggctttggctgatatca

SEQ ID NO: 32397 - DNA, 461 bp, Arabidopsis thaliana landsberg
gttttcgaactcaatgggttcgggtggttaatattttactgctaatagcacgagcttaggcaaacgggtaaatataatttccacgggcttattcttttcactttaacggttgggctttggcccattatcagtacactttatttgcaatttttctattcttatatatctatatcctaataatatcctatatggcaaagtcattacatgttgttattcagctatattagctatattaattgaaggtacatggcttcaaaattgtttttaaaaacattcaacaaaggattttgtcaccaaactcaccattaacaactacaaaaaaaactaaaagagagagacacatatgagcctttccggacttcttttgtgactgggcctttatatgcttatgcccatttaagtttacttaataggacacgattttatatgaataggggaattaatccatttctgtctaagac

SEQ ID NO: 32398 - DNA, 3872 bp, Arabidopsis thaliana landsberg
attgggttttataactaataacaccccacttcaatgaccccagaaaacaccttctaatcctacaaactcaagagtttcttattttagagaggaaaaataaacggacatgtattagatagcaaaacactccgccaaagctgagttttatacttatggacgagggcgtgctaatacatagattgtttctactattacgagagaaaaatctaccaccatccttgtatcttttaacgcaagtctcaattttggtggagtcatatctttaacccaagtctcaaaaaatgtaaaatcaaaacttgctctgtatacaaagtaacaaaatttctcacctgattgcctaaatatataaatattaatatgagaatgttccaaatggatagtatgacgtcaactttgctaccacccccaccaattcttagtgggtgatcatcaactttattaggttccagtgaagtgggtgtaaactcaatgatttgggattctattatccttttgtttaatccaccacctaaaccattgttaggatgagtaatgaagcctcttaattgtctatttcagctacagaacaaatgctatttgtttagttgggttctccatacaaaagttgaaaaacactgttctctactttgcaataatagacttcatcaccgactagctttcacagaagctttcaccatatccagacccccagatgataatccaaggaagtatctgctgctcataccaaacggaaatggcacctgcaatggaagaatatcatatgggaaagagttaacaattcatcagttgacaaggagaaatgtttgtttccttctcttttgtaaaaagatcaactattgaagtatattagcagtatcagtatgtaccccaatagacctctgccttgccatatccttggtgtgacagataagacgacttttgcaccttgcctcataacttgaacagaaacggcttgtccctggttagactgagcttcagcggcaagcctttgcaacaggttgtcaccaccctccacgttgccaaatttcaaaacctgatctccaagctgtaatccaccctctgctgctggagatgactcgtttatctcatcaaccattgcaaagggaatactagtaaccacatccacatccatgggaccggaagtaacactgaagccagatgtctgcatggaggcagataaagaatttactgcagcacctgacaagcttgtttcttctggacctgcatcattatctattcataagctttgtatccacccacgtcgtgcatatggtttcaaagtataaaataaacttctattaatcatagccttaagaaaaaggaccagaatcagaaaagatgattaagccaatcaaagattccaagctgaaatttggagcttcttcctgtacagtcatacctgaatcttttgtggatgaagctctagatgtaggcctcactgaatgaagaatttgaatgttcacatttatcttttccgttatctccccgtgctcactccttaactctgtgtgggtgtagaaactatttcagataaataaaccaactcaaaacggaagaagtagggaaaaacttaacaactggttcactgtagaagctacacatcaagcttgattcctttcaatctcatttccagctcacaaaactatgaataaacctcaagccaactagccaagacaaaaacctaaactacatataatcagtatgattctgctatgtttcctaagtttaactaaccttggagttgtagtctcaccctaactatggactaattcagcacaagaaaagagaaatcaccagcaagacgacggcgctcagttctcaccatgggaatgtcaatatcttcccgaggaaatccctgccataagcaaacgaatcaaaggagaaaattaagcagaattttcggttaagattagagaagagtgaggacgcagatacagtacctccgagtcgatgagattgccggagagaccaggaccaccgggattgcagagacgttcgacaatagagttcatctccgtctccatggctgttctcttgtccattagagccatcgtctccgctttcagattcgcgccaaccatcttctcttctcttctccaagtccgatcgattcttaattctttcaccgaaatcaatcgcaacttctctctaccttgggaccggagcatgtcaccgtgaataattgtgggcttcattaaaaggcccaatagacccattctttaaccggcatatgatcctaaccgtacatttattaaatccaacggctataatctctttgtttctacacttcatatattaattttacagacagcacaagcagctttaaagccaagcaatatttgtttatctcaaccgtaatgattcccataaattataaacaataatgtctacaagctgctcaatcatcagtcagcagtgaaatcaggctcaggaggcttctgcagcttcaccaaatccctaatctttgtgttccggttcctgtgaatggtgcgaagcgcattagccgcaaacttagtggcaagaaatgcagccccaatggagtatgaaggtccagcggttgagctggacacagccgcggcctcggcttctgcctcttccattttcttcctcttgcagtatctacgccaggcagcctggatgaaacaagcagcccaagtcctccattggtgagagtaaaacctgaatgtgtgctgcacttgcctgctatgtaagcgccggaactggcttgctacaaacttcagctcctctgaggtcagcgcaaacgcctctacttctgtcagagctttcacggtcctcgtggaagacgggagatttacacctgattttggatccaatgcccatgtcagaagctcttccccgcagaattctccttctttcaggagactgcggttgaagaaaccgctcctgcctccatctgttgtcacactctcgaggcgaccacgtattatgaatagcatctcgtctacagggtctccttcccgcactaagtaggtactctctgtgaacaagcatggtttcagccgcatacagatcgcatccagcagcttgtcgtccatgctcttaaacaatggaacctaaatattatggtaaaaacgccagtatcatgaaccaagctagcttgtcgatggtcaagagctcgttttaattatgagccgactgttattcaatgggtcctagatgttcaaaaggttgtgtgatctatgtgagaagcttgaataaggaacagcggggagaacttacccttcgcactaaagccagacagagatgccgcttgatgtctctccggagatccttgggaagattctgaacgagatactcttcatctacaccacgtgtctccaaccatttatactggtcataacgcctcacacgctccctaagatcttgtggtaacattctgtgatgcatccattgttctgaatcacgcctctttactctcatttcttcaagccggatggtaagagattggagatatgtctgtcccaagattgcaaaatgttgttagatagtcattatgcagaggaaacaaattatgcatgatgcttccattgaaagagcttacaagaaatttctaatgatcacgaaagtagctaaggttgcaccataattactcacctgcatgtttccaatgagaagagcaaagaggatcaacccagaaatggcgagagatatggaaaatataatctccattgggtatgtactggtttcaagcccttgtccaagtgtactgtggtgcaacaatgagaagtactatatgaatatctgaaactcatagacgcataactttgataaaggagccgagtttagtgagaattggtaagatcaaagcaatagtctttcgactgattagtgatagaacatggttacctcaa

SEQ ID NO: 32399 - DNA, 1598 bp, Arabidopsis thaliana landsberg
attctgcaaaactctttaacttgtcgagtaatgcttcatacataaatgagaaaccgttccgttaaataaaattaagcatgaaattatttagcaataaaagagaaacaaaggaacactgcccaattaaaacaagggcaagttcagaaataagcaaagaattgcgttttgaccagagcacgacttagttttgtagttaaacgaattgtcttcctcgagaagagaaggtttggccaaaccaccaagaagaagggacaacgttcaaaaatgtctgcgttttgctgtccgtcagagtaactttgaaggagagtctctgtccccggagatcaccggagctctgccagttggcaccccaattacgggtcatctgaagccaagtctttccctttgagcctctcaccggtactgatctcaccgagccgccaccaccaacgtttgagatcattaccatattgaagttaccttgccctctcatcgtgaacctcacgcctcctcttcttttgcatcccaccctatatatacacattacaaaactattagatattttgcataaatatcacagtaattacatgctatatttttatttaactaaagtccatttaaacctttttccagattcttttgaaggattggccttgtttttgttttttttttttctgtttgtgagcgtacgtatatgtacatgttataatgtgatgttgatctaaacttcatccattctttccttataaattttgctataatatataatgacctagcttgctaatgatcattatagcaaaataatgatatgtagatcaaataaattaaacaataatgttaataacttaaaataatgatagggttgtataatgttctctaccttacattttaaaaagaaaaaaaaaaaactccaaaatatactttaatgtatagtttcagtttattaacttatcaaaaaggatgaacactatatgcataaaaaagcaattgactcctatagcatcgaataagttaccggcgatagaagacggggacgatgccttcattgccgcgacgggcaatgcggaagaaagcgggggaggacatgtcaaagtgatggcgagggagattgcaccaaccattattgttattcgttgggcaaaagtttgtagccgtcaccgtcacggcggctcctcggagacaccacttaggatccgccggaaagtcgcacctcacctggtagcacccaccgcatgactcaccgcttctgaatagctcaccgcttagcgccgccgtgtgtgctccgaatccggcgtggtacggattgtcatacccacaagctcctcctataaaattgtatctaaaaaacaaatttaccatacaaactttgaagtaacaaaaacgtatattaaacaatagtttaatggcctttttaccaagtgaagcagggctatcattgacaccataatacgttgcatgagctcttatccaaccgttagaacacatccccacacttaacgtactaaccaagagaataaccgttactaagtatgtcccttcataccatatatatatatttttactttatttgagataagtataaatttttcgtgatgaaagaaagagaggtcgagaaaaga

SEQ ID NO: 32400 - DNA, 718 bp, Arabidopsis thaliana landsberg
cgaagaacacaatttttgttgtatcaaattacaaattctaagatttaatggccctggagttttcataggaatatttgaatgtataaaccaaggacaaaggaacctttaaaaatctaattattctatacgacccttgggattgtgtttgataacttatattcaactggtgtgcctggtatcctgacgatgtgtacgatcgccaatggaaaccatcttacattggagcttattttgggccagtagatcaaagggagtcaaacaccacgctcactgtgaatacttctaatgcgtttgaactaccggaagctgatgctaggttcgctgcaacgcccataaatgccagtgacccactgtgtatttacgaacatgcagatagccccagcgataaattgattatttatcttcactttgccgagctccaagaccttcaaaccaacgataccagggaattcgacattgtattgaataaaaatattatattttcagcatatagtccgaagaagttacagatagaaactatatttaacagatcaccaacaaaatgtgatggtgttgatggtgatagtgattgcggtatggaattagtgaggacagggaagtaaactcttccacctctgctcaacgcttatgccgtttaccaagttatagagttcccatattcagaaacatatccagccgatggtacgtcaagttaatttgtctatttgtatgcatgttg

SEQ ID NO: 32401 - DNA, 417 bp, Arabidopsis thaliana landsberg
ttggaaatgctcgattgtgattcagtcttatatgctcgtgagattttatatatgcatacaactttattgtaagtgggggaactcttccataaaaattaaaaggcctagatacataagatataggcaacgtttcttttgccttctcatacaagaaaatacaatataagcaaaggcccatctgcctatataaaaccctaactctcgtaaataaaactctgtttttttcaccttctcgtttcaataaaatccaacacacaccaaagacagtttaaggaaaataaaagaagaccacacgatgcattttcttgtaataggattggtgattcatctatggtttacgaacgcttataagcttgacatcatcgatcacaggcccacacaatgacgagaaatcatcgctcctcatggcatagaaag

SEQ ID NO: 32402 - DNA, 2977 bp, Arabidopsis thaliana landsberg
gatagttgtaagcagagatgtagtcttcgatgaatctaaaagttggaagtggaatgatctaagaagtgaatcaccagaagattcaggactctttgtacttgggtttgagcaatttggaaataacggactaagaagagaaagagaagaacatggttctgagacaagcgagaagaacactgaggatgaagacacttctcgagtcactgaagcaacagaaacagaggaaccaattcaagaagaaggtcaaccacaagagaacacacaacccacactaagacgatctcaaaggcaagtttctatgccgaagtacttagaggattacgttctacttgctgaagaagaaagtgaatatctcctctctgtaataaacgaggaaccttggaattatgctgaagcaaaagaaacacaagagtggagagaagcgtgtgaggacgaaatcgcttcaattgagaagaacaagacatgggatttagtggaacttcctcaaggagctaagccaatcgggctcaaatgggtgtttaagctaaagaagaacgcagacaggagcataaacaagtataaggcaagactcgtggctaaaggttacgtacaacgacatggcatagactttgacgaagtcttttcccttgtagcacgaatcaaaacagtccgcttcatcattgccctagctgcttcaaacggatgggaggtgcatcatctcgatgtcaaaacatcattcttacacggtgaattaaaagagacaatatttgtttcacagccagaaagattcacagagaaagggagtgaaggcaaagtatacaaattgaataaagcactctatggattaagacaggcgcctagagcatggaacaacaaattaaacaagatacttggggaattaaagttcgtcaagtgttctaaagaaccatcgctctatcgtaaacaagagaaagttgatcttcttttagtagcagtgtatgtggatgatttgcttgtttcaggttatagcttaaagctcattaatgatttcaagaagggaatggcgtccaagtttgagatgagtgatctcgggttactcacatactatcttggaatcgaagtaattcagtataatggaggaattatgttgaaacaagggagatatgcagagaagatcctagacgaaaccaagatgagtgattgcaacgcagttcacattccaatggactccggtttgaagctgtcaaaagcgggaacagagaaaggaagtcatgactcggagacagagaagaacattgagccaaaagagtatagaagaaacattggatgtcttcggtatctacttcacacacgacctgacctctcatactgtgttggtgtgttgagtagatacatgcaagaacctaaagaaggtcatggagtagctatgaagcagattttgagatacttgcgtggcactacttcctatggactatctttcaagcgaggagacaagtcggggctaataggtttcagtgatagcagtcgcaatgtagacgaggatgatgggaggagcacaaccggacatatattctaccttgatggctctctgataacttggtgtacacaaaagcaagaaactgtggctttatcgtcttgtgaggctgagtttatggcagccactgaaggagctaggcaggcaatttggttgcaggaattacttggagaggtaacaggacaagcatgcaagaaggtgagactactcattgacaacaaatcggcgatagcacttgccaagaatccagtatttcacggccggagcaaacacattcacaagaggtaccatttcattcatgagtgtgttgagaatgagcaaatagaagtggaacacgttcccggggaagaacagaaggcgaatcttctaacaaaggcacttggaagaatcaaattcaaagagatgagagagctagttggagttcaagagttgtctaagtgtgagttcaagcttaagggagtgaatgttgataagcttgaagttagcttaaggaataagctaaccaaatactaagtgattaggattagattgtatttaggagttatctacatacaatatttagtagttatctaatgttattaggagttatctaatagctagagttttcatataaatagagatgccaagttgtggtaatcctattgagaagtttagagtttgagagtttgagagctttggtgagagctttaggttttgagtaagtttcctaaagattaataaagagtgagtctttatatacaccattttcttgttctataaatcgatagtttcgagagtatatcgtagatctagttagcttgtgtctaatacatgtgtgcttgggtattagttagtgatcagttgtatcctgggattcaaaaattatgatgtccgaaaagcacttatgggcgatttattgaagtaaggaaaaagatatcatatcttgcctccgtgatttactttttgtccttaattactgttattgtaatttataattgttatcgttatttaataaaatttatacttgtttctcaattcggtttttgagctcctacaatcttaattcaataaatccgcttttagcttatcgctctagacggattgagaatttttcgaattttaaaaaaaagatttcaaaatcttctaaaaattgttttttctatcatctttgcggtgttacgcggaagatttatagaagaacgttcttacttctttctttctcctctttctaaactcgttcgcaaatgctacgtagcgattgttgtggacagtttcttatataaacttctctagtttccagggacgctcatacttgagtgagtttgtgaaacgcgaaacaagtttctgcgaacgcttcttaagcgagtttgcaaaactaattcggtataatttagttacctgaattttttggttaatatactaatcagatctttttttgtgaacaaaatgactaagatcaacaacaacaacaagattgttggcaacaccacaagtgttgagactcct

SEQ ID NO: 32403 - DNA, 714 bp, Arabidopsis thaliana landsberg
cttgcgtagaatgttcccaaaccaacgggcatttgcctgtcttcccagtcgataacatccttaggggaatgggtagcctttagccgacctatgtgtagtttaattacagggtcctgcttaaatgcctgagtaaaagtgatcttctgaatcctaccatagtacagaggcaaatcatcataaccactgtaaaatgaccagatctggccagtctgaaaaacctatcccttgctagcaatgtagatggcttggcgtttagactttatattgctctcagagtttgaaggcacaatgatctcttcaattgtttctggtaaggcagcttggtctagctcataagcatcttttggcatatcttttcctttcactcctgtcagtttgaaggaagggaccctatgggagaaccgatacaaactgcgaggtaaaatacgaaatataccttcataaccagttcccattcagaggaacacactagcaaatccttttgctttatgtaagtatgcaacatatacaccagcttcatcatcgtaatctgacagaatctcgacaaattcgtactcatatttgcggtgagaatctggctctgaagaccacttaatatcccagttcttgaaaagcgcccaagtctcgccttctctaggggatacactaaaatgacaagtgttgatgaaacgacaagtgacgctgaaacaaagagtgttgcttaattcaatgcaa

SEQ ID NO: 32404 - DNA, 860 bp, Arabidopsis thaliana landsberg
tccgccatggcaacaagggcaaaggccaattggttattcgctacaactcgcttgacgagttgcaaggcgtgcttgctcacatccgctgaaacaattcccgttgtagcgcgcagtcggaaatcactaccgaatagttgaataggggttaatccacccctatactctgcgcgcattttgccggcacaaattatgccaagtcataactgacttgctggtcgacttccgaggagcagttgtgatggaaatccgcacgccaaaccgcctgcctttccatcgctgggcggttttcccggtactgctggctcaattcgtcgtactgctgctggcaacgttggtgttgtggcagtggaaaggggcggtcagtggatattcaggcctttgcggaggtttgattgcctggctacccaatgtgtatttcgcctggaaggcctttcgcttcagcggggcccgggcggcacaagccatcgtcaagtcgttctacgctggcgaggaaggcaagatgattttgacggcagtgctttttgcactgaccttcgcaggagtgaagccactggcgcctgtagcagtaatcggcgtactcgtgttgacccttttggtcagctggttcgcgcccccgcatcatgaatgaaaggctttctagaccttagggcgtttaagtcaaccatgtcagcatcacccggtttgggctatatccagcaccacttgcaaaacctaacatacggtcaaataccatacggcagttgggtcttcgcccattcggctgcagaagccaagaaagagatcttaaaagcgttccacctgaacaccctgggttggtccgtcgcgctgggtctgatcttcctgttcatctcgttattacg

SEQ ID NO: 32405 - DNA, 1454 bp, Arabidopsis thaliana landsberg
  unsure (1)..(1454): unsure at all n locations
tgttgactagaaagtgatgcttcagctgctcgtagacccgcagggataccaaagtttccaactaagatcacaacgtctccagcattaacacttggataacaagtgacacgacgcaactctaatcgatccatcacatagctaccagctggtcttacatatatctaaaccaaaaaccaacatagaaatccaaactttaatctaagaacactctgttttcaagcaaaaatcgaaactttaatcaaaagaacactctgtttttcaagcaacaatgaagtaaaaaagcagagacttaccgagagtactgcgtttggatcaacgatttgacgaaagagatctaattgctcaagacaaagccgttgaaaatcaggacttggcaagataatcttagtcttgagatggtctttctcaatcatctgcgtgaactctacaggagttgttgaagctccacgaatcgcggaagctatagcggaagcagaagcaaccatggtctctcctcctccgggttctgattcttcattggatacagtgtggtttacgtaacggagaccgcgtgtaaatatagaagacgacgaggaggaggaggaagaagaagaggcattggggagcttaagggagggattagaaggtctagggtttggaatagaattggagaagtgtagattagggtttgatgagagaagggtctgagaagcgattgcagaaagaagcatcactacggaagacgacagtggagtttttactttgtggctgagactgaaactctcgcgaggaagacgatatacgcaaaacaactcccactaaaacgatatcgtatcaacggacttgtaagttgtaacagttccagttaacgtgaacacaaacggcgtcgttttgctatctaataaatatgtgtattttttttatatattaacaactttatagacttcgttttcgagattatgttgttaatcgcagactttgtaatttggttctttagaacttttctaaaaattttaccatatgaaaaattatatatagcctctaaaaaaacattcaattgtttttaaattcttgtaaagtttctacaatgtttaaaaaatttcacaaattttcgataatttacgatagtttatgttttgcatcacttcgaaagttgtgatgactgatgaacggtatacagtaaaaaatatatatatatatatatatatatagtagggcatgaacaatacatttctaaataactaggagtatttttcttaaatttttcaagtttctacttatgtttaaacacaagttcttccaaccttgtgaaatggtcacacatctattaaagtaagaaaacaatatgtggttccccctagctagtccataagaggccaaaaaaacgttagatgctcaatcagtaagcttactattaatcatanttatgtagccatagccaatcaaacgaagcatagcccttttcaaccagtgac

SEQ ID NO: 32406 - DNA, 483 bp, Arabidopsis thaliana landsberg
acctgtaagataagatatcgtcaaataaacataataagtgcatcacaccgcatttatccaaattaattattcaaaacgaataaaagaaacaaaaatcttggtattgtgggacagagattctgattgatcaaccaaactatgtcatatgatctttaactaattgcaggacagcgatgaccaagtcataaaagagaacatagctcaccttttccttagtcgagtgcttaaccacttccgtgagcctttgcattgtcctcgatgttgccaagtactctattgcaggttcataataggacagaagccagatgcagagacatgtttcatacagaagctgtcggtcgaaagcacacaaatcacatgaattaggcactgagaaactatgacaaaaaaaaaagagagaggtgctttcttcttctgaaaactgaaacagaactatttcaaagtttactaatttgttcagcccgattttagaataagggagcg

SEQ ID NO: 32407 - DNA, 944 bp, Arabidopsis thaliana landsberg
tataaacaaaaaaagataaaacaaagttacaatcatctaccaatttgttttagttaaaacatttatttcacttgcacatgcataattgtttctttgactgctaagaaattttcattagtttatgatattatgcatgtgaaaagatgaccataataacctttcaaatggaatgctcttgaaactaatacaacgcaattaagaattgctctttgtggataattaaaccaaacttcactgaattatagcttcaattcacattgcactgaactgtttagattgatctcaaaattaagtttttttcctaactattgtcgtttattgaatacaattatttaaagggtaaattgatttagttgttttgcttgtataaaagacaccatagctctctcctctttcctcagttcacataatctaaattctaaagagagacgaaagaaataaaaaaaaaactttcaaaaatgttggtttaagtttttttctttttcgatcctgatgataacaacggttattggtgttagcaaagaatgagatgaacagtcatgtcaaaactttttgttggagcttaagacggtttcctcaccactctcggagatgagacgtcgtgagttattgatcatcgttttgaagaattccgtgcggaggattgacatggctttaatgggggggagggagaaaacaaaccacctgggggggaggggaatgagatgcttggtgtgaaagaagacaccaatctatttgaagagatgatggagttggcaaaagataggatgatccgctttaggaggagaaaaccctaatcttggatcttacgaaaacgtccacacttagcttagtggcgttcttactagctactttacatgtatcaacgaaattggtgaaggtgcctataaacgatgggtcgagccataccttgaggacctcatttctagggcacgaggagcttt

SEQ ID NO: 32408 - DNA, 2504 bp, Arabidopsis thaliana landsberg
acgagaccaaagccgatcagatgactgatgaacacccttaagccgatgtaatgtgattttctttataataatgtactctaaataaaattgttggactatttgctacttattaaacaaatgggttaaagttcataagtttagaaagtaaagggtatatcaataattaataataaaatagagatagaatatactttagaatattctttttgaagtacaaaatgaaggaaaccattggaaaaggcttgcttcatttttgccttcaaatttgaagaaactctaattatgaagaaatatttgaaggcaaccattggagatgtcataatgtgtgtaattcatttgatagcacatgtcagttgtgaaaatacactaaactccttccgagggatgcgcttggagagaaagataagtcaatgacatgaggaaagagaaatatatatgactaatatatattcatccctcttaattttgtttactatattagtttaataatattacttggttaaagttaataatactattgaaaaaaacaaatttttttttgtttatctaatatgatttgaattttaaaaatcggaaacgaattattttttaaatgaatagtggtatcaaattctataaagatcatcatagaaagatagaatattatatatttgttcaaataaaaacgtttgtttcgatgaatccaaataatcaattaaatactttttgatggaaggatactaaaccctaagataatatatagggaacccaagacttttaatataaaacactaatcaaatcacttaacatccttaatcaaaacaaacaattcattttaaaacgtatatagtacaaggtatacgtaaatagtatattcacaaaatagaatattatctgtcaaaaatctttcaaaatcaaaatcgatttattggctatttccctttagaatttctaccatcgtaaacccttcatcgcttctagatctaagaatgatccctaatttatcaatatttaagaatgatccataatttattgtagatatgtggtgagcctgtaactatgaagaacaaaaaaattaagtgataaattagtttcagaccataaatgcattttgatgttaaaattatgtttcaaaaaagacaaaaaaagaaaaaacaaagcttagaacctaaataaatctcacaaaaaggtaattaatgaactataactaaaaacaaaaaaaagcaaagaggtcatttggagagaaagagaaaaagaagtaaggagaaaggcggagaggagagagagaagaaaagagagaaggagagagggagagaaggagagagaaaaaaaagaagtagagagacaagcggagaagagagagagaaggaaggagggtaaagttgtgattaatatataaaatataaagaatatcatctcatttttttgttagtgttactttcttaattatagttttttttaaggttagttttccaaatttcccttttttaaatgggtttatttctgactttttaaaaactacgggggttgttttgtaaacaatgagagagatccggggatgtataatagtgggcttgttatcataattccaaaaagcccactaagatcgaaattaaacttcgttctgatggattgatcttttccgtcggagacatgacaattgcaaagcgaatttctacgtcactggcgggtgacatgacaatttttccctcggtgacgcagaaattccaatcgctctatggaaaatctattttgtgtaaaaattttgatttagaaaaaaacgtacaaattcattactagtagttctatctagttcatcaatattcatgggaatgctccaagaatagattttgatgttgttgaatcttgaattcccaaaaagaaaaagctttttgaattgaaacaaagtctcagactttattgttgttctcattcaatgttggaatttaagccctcttgaaattggttcaccgtctgtgtgtaaagtcagtgatttcaaattactggttgtgcacttacttggttggtatatgatttcaaaggtagtaactttgaaagcatttgtgaggaagcaggacatgaagattttatttgttgaatgcggagaggaatttgttgagcttgttttctcttttcttgctgtccccccttgaatctgcatgggaaatctctggcagcagtatctccttaggttgcattagaaacttgtgtagtcaacttccacatgcgcacttccgtctttctataatttccagatacaactgtctggtattatcactcaacaacctccggtgtactaccgttacaggctctacgattacaggcaaatgaactatggtttgactacaaacggtaatcgaactacttattaccgcaaagacagaatcgttcgggtggatttgaaggatcccaaaatccgtggcagcgataagtctgctcaggggtttcttgaagaaagcgacaaagtgtattgtattagatgatctgaccattacatctatgaactcctgctcacagtttgttta

SEQ ID NO: 32409 - DNA, 2713 bp, Arabidopsis thaliana landsberg
  unsure (1)..(2713): unsure at all n locations
ctcgcatctctttctcatgcttagccgcttgtttcttctgctcacgacggtccataccagcacgaaacccttttccaaagagaagctgagcttcatgagggttttggtaaagaacgttcatatccctagaagtatcctcagtgctttcccaatcaaaagagaaacgaaacttttcgcttggcctaatgactctcttcttcggcttcttacctccaagatactgctctttaatggcgtcaagttccttctccttctctctctcaactaattctcaacacgcgccttctccctagccttaacctcctcttccctctccttttctctatttctccgatccggttcacgatctcgttcacgacggtcacgctcacggtctctctctcgctctctatccctatccctatctctatccctatcgcggtctcgatctcgccctctatctctctccctatctcggtcacgttctcggtctcggtcccgatctctatctcgatccttatcccgattggtatctccattggagacatcttccgtctcgggctcggggcgaccaagttgctcacgacggacacgttgctcggagatttgatcctggcggcgttttagggctaactcttcccgctgttttttggtgaggaagacaggcttcttagcaatggaggaatcgagagtattgacggaggtagatccgacgacttcgttgattgttcgcttcatcggtggttagctggagattattcgcttggtcgattagcaggaggggaaagcaaacaagacctagaaccttcttcttcttctcttcttctcttcttctctcgctctgatttctttttcacttggattctctttttctacatttttccaaaaccccccaattctagcaaactctcaagggttttaggcccattagtttttcttttgcattccgaattcaaatctaattttgtttttaggcccattagtgttttttcagcggagattatgtagagtagtgagattttctcttgggtgaagattacaaacccatttcaagggttagagaactcgcttgtagtagtgtggtgtgacacagttcattcatcattagggattaaaccaactacactaattctgtctttccaacatgaagttttctggtaatgcaaacgaaaccgattatcttcgacatcaatgttcagataaagttgaaaactgatataatggttgctaaggagacgacaaaatgttttttgtggaagcagagaaactaaaacctgattcgttctaattgatgctctcaaaacataaccctaatgctgtgtccctaaactcaaccgtacactacaatctatacatatcacctaatcttagttaagcaattaccaaagataatgcttcatcccaaggccattgcaagtcaatatgagttccttgtactcattcaatagttcctgcaacaaacgacacaagggaacttatcaaactcaaaagcattgaaagtagtttctctctcgaatgaaataactaacactcgtttaccttgttgtgctcatagatacgacgcatccttttcttgtcgtactcctgccttgcaattgggtcgctcaacactgttcagttacaagatcaaattctttattgctaaagtccacacaatcaatggctaaatgaaaacagattcctttcccctaaactagtaaacttctttcttcaactatatattctgcattacatagttagaagaagaccaatgaaacaaatccacattctaagcttactactacttcaaagcctagctcaacaactacatctacatgatgaaaagagaagcaaaaccttgataagcctcgttgatttcttgaaacctagacgtagcagaatcctcttgtttaaatttgtccggatgccatttctgcaacacaactccaacacaatcatcactgaagaactcacactcagagactgtcacaaattagtgggaaaatgaagtggaaaagagaaggaaccagagcaagacggataaagctggaacgaatctcatcatcagaagcgtcacagttcaattccagaactttatagtgatcctgcaacacccaattcacaaaaaccaaaactttaacaaattcaaaaccaaacaattatcaaatttttgtttttttgtttgtttaccttgtaatcctcgaaatcgaaaaaatcgaagccatggctgtctccccaatcggaacaccacattctccagtgcgaacaaacgattccaagcttcctcaaatttacgattttcctcctctcgtcactgtgggcttcttcagataaatttttattattattatgcaattgcattttagacccctaaactattacattattacagttaaaggacatttcgcagcttccagaaacatttagagacggctgagatacacagtgatggcttcgtctctgaccactagattatcggcgctaatcggatctcgacggagttttccgatcgtcggagcgttttgcgttctgtcaactctctcaatctcttctctttcttcttcatctcccttcaaatcgggttgtgcacagtctttctctgttgttcctctcttaaggttagtattttcgaataaacgtcgattctttttgttcagttttgttaataaagctcatgaattggaaatttataggtctaagtttagcagtaaggcttnttcttcgtcgatcagaatggaggagagcagcaaaactg

SEQ ID NO: 32410 - DNA, 520 bp, Arabidopsis thaliana landsberg
gtgtgagctttgaggattgtaatctctggccctataaaagaactagcctcattaaatccaagccttgtcgaatgatatccagatttaattgtatatattccagatttcgtaaagtgccagcttaaggtatcttccttagttggtgtaccaacagcaaagcacaaagcaacggtacatctttcggatcaaagagcttctttaagagatccacattccaaaattttgacctactgtctaatagactactgacttttaaagatgggtcataaattgaaccattactttttactggtctcgggaattgagccgggatccatgggtcctcccaaacagagatggaagcccatgaaccgacttttaataattcctttgcaaaccagagatctagctaaacaagtacttctccagccatcagacgaggagtatgactttatattttccgaagaattggatttcctaaaatatctccctttaaaaacctttgcaaaaagagagtctggaaacgaaattagacgccata

SEQ ID NO: 32411 - DNA, 1183 bp, Arabidopsis thaliana landsberg
  unsure (1)..(1183): unsure at all n locations
acggtttttatgtactcttaactattctcatgtttatgcaattatgtgtgtgtacatatttatagtttttatttgtaaaacgagcaaaataagctaaataaccctcatatcccgtttagttatatatttttccaaaatttgaaactatatagtactgtattaacgtgaaagctaagttttctacttcgattggaataagctaaaaacctttaaaaaaaaaaaaaaaaaaaaaaaaaaaaaggctaaaaacctgaatacagaaataatacattatattcatgtattagtttgggtaaagatggaagacgatcacatcccttcgtcggctaataataatgactcgtgacctagaactagactagggatcgctgtccagcaaaaatcccttaaaacaaaccacatagttttttttttgtttttttttcacacaccacatagttttcttatagttcatattcaaaaagtgtttaagtttctacgatcgccctcttcatgtcgattcaatgttaataccacgtatttctgattagacgaataaataacaaaattatcaaaaaaggaaaaattaacgcacgaaggcgtcgttgaaaaagttatgtcattgaaagtctaatnnnnnnnnnnnnnnnnnnnnnntcacgatgagaccgtccgtgacgataaaatgtcaaaggaatgtgacgttagactatccttttcattttttctcagatttcatttttttttcctttttctttatttcagacttttatctttgccttttttgttttctcaaacttcccatatataatttcatcacanaatagataaaccgaagtaaaaagacaaacggcggggagggttatgctgaggaggcaccagtgaataaaaactccctgtactaacacgtggcactctattcaccactgataaaaattaacactatgagcttaaaaagcgagctatcctctattttctagcttagctttaaaagaaacaacattttggataagaaattacttttaattcacacatcttaaagttttaaaacctactaaaacgaaaacgagtcattattaaattcgatacgttggaacggtgtaatatatcctatactccttgatgcatattgctttgaatcctaaaaccatccattagatatataacttgcaactgaggacaaaacaatgacttcctacatagt

SEQ ID NO: 32412 - DNA, 583 bp, Arabidopsis thaliana landsberg
tgggtagtcactttaagtcttaaagatttattattccttgccttaaaacttccaccagctccttggctggctccattaatcggaaaattcgatcttcccttatcttcctcaaccttcttctcctctggtttcttcttacacaacataaagttcctcactcccaccgacccaattgcttcccatggactcaaagctacaccaagaaaactaaaaattaaaaaaaaaacaatctttatataatcacaaaacagaggagaaactttgcgtatttgacaagttacctccaggtccaaccattggacaataaaaaacaaaatcgttgaaatcagatccaagaataggaagacgaccttcacgagcataacatttcaaagcagtatcaatcacagatgcaacacgatcaccttcattagcaacgaaccggatcggaccagcactaccaagaaacgttacgctgatcaagattctgtttcctttaacaatctgattctctttcttgtaaagcaacatctttttttcaaaattctcaaaaaatcaaaacacagaaattattattgaaaatatgatcggagatgatgattga

SEQ ID NO: 32413 - DNA, 4494 bp, Arabidopsis thaliana landsberg
tctcgcgaagttgccgtcgaaatccctagccaaactcatcgtcgtctcgaatctatggtcttctacattccgcagcaaatatttcatcgatctgtacttgaaacgatctctgactcgtccatgttttcttttctcaataattcaaagcaacatctggttctttcactcaatctctcaagaggcaatttttgaggaagcatcactgttttcttacacaactacatcaagctttcctcttagtcttgatatacggacctttccactaagttacaatgtttgcccaccggtactcggctttatttgctgtcaagatttagataaggtggtggttatgaatccaagcataggccaattcttggttttactaaaactcaaaactaagagaaaacgaatatcaagattcttaggatacgatcccgttaaagataaatgcaaagtcttgtgcatgacggtattgcaagttccttccaagaaagagatcgccagaagagttgaggttaaagagatcccgttatatgagagttttcttgaatcatgttgagtgtccaatatttctctaaaggaagtcttatagtatgttctgtttttataagatctgtctttcgaattgaaacttctcctctcccatttgcgggtagtctctttgatctaatacaatgattctagttaaattagacaacactcagtttctttcatggtcgctttttcattatcgacaaggttaccaaattggtatattgattacccttggcacataatttgatattagctccttttgttaatattgtcagcgagtttctcagaagatatgacaaatactagaatctatttcattactcctgactcttgggtcttgattgtttaatcaaaagagaaagggtatgttttgatataaccataaaaaggaagggtatgtatggaattatgaaagaagaaaaaagaggatgtatttgatgtaagcataaaacatcaggggtttatatgcaattaccaggaagaaaagaaaaaaagaatccttcacgagggttttgtaggagagttcacattttttttttttttgtcttagactccgccaattctctggaaacttaatttggatattgttaatttgttctcgcataaatcgatttctcttgcggagaaatgcaatcggttcgtggcagtacaaggttgcttcagaggcatcgtttctccatctccaacactcttcgtttcacttcttcttcttcttgtggaagctggtctgaaaatgaatcgagaaaactagggtttgattcttgcccttctaacagagctgcgacatatctcattagctcgttgaaaaatgcaggattttcctcttcagctatacctgtaagccactttcgttctctatcttggtttaacattgtcgaaatttacaagaggtttggttggtaatggagatcttatatcaaatgggtttgaaaattgcaaatagtgtagaaaaacgcaaactttgctcttgtgtggtagtaagagttatgtagatatagaacaaccagcttgtgcggttgtcatttattttcagctttgacaaaagttttacgatttcacaagttcttttactttacatgttttctctatgttcgggtctatctatattaggcttctatgtgtttaagatgttcttgggaaatgttttttggcagaaacaagactttaagtattcgttgaggtgcttttctactaccggagattctgttcaatctactcctcaaggatcccctgagtcagattgtgttgtgcctcagagaatcaagtttaagcggcttgataaagccgctaagcatataatgcaggtacaactcaaactagacaactatcatggatacaatcatgtcatcttttacctatgtcataatcttctgcagattgtagacaaggaggcagttgaggaagtgagaaatcttagagagattccagagataaagcctggttacattgttcagcttaaagtggtaagtagggccttagattgtaatttctttttttctaggggaatgggatcaaactatcttttatcttctaagtgaaacctttcataggcttgccatttactttgtttgcacacaggaagtgcctgagaacaagaggcgtgtatcaatagtaaaaggcgttgtcatagcaaggcgtaatgctggtcttaactcaacatttagaattagaaggcttgtcgctggagtgggcgttgaatccatgttccccttgtaagtacttttgtctatttctctcggtaagaccatcaagaggcattatgataagtcaagccaccgagttttatgtgttctttttgctttggtcatggtgaaaaaactgatgtgagtgagggtgtttgtttggtgacaggtattccccaaacctgagggagattaaggtggtggacaagaagaaagtaagaagagccaagctctattacctcagggacaaggtgaatgctctcaagaagcattaacaaccatataaaaagcaatctactcttatcttaaaacaattttcgaaggttttagttacactccctcaaaaggagacgatttggccttagtgtcacattgaattcgtgtaatgataatgaatctcttcagtcctcttgataactcgttagcatatcaatttatttttatctcaaagatataaatttataagtaaaacaaaatattttttctatccaacaagaaaaaataaagattttgaacgttagaaaattgtactaaactgttttataattattagtgttaaataaataaaacccttctctgtataatttggtttatttttttggttttatcttattagaaacgaacccaacctgacccgtctgggctcgccgcctcctatatctcttctctctcgattaatatctccaagagcaagcttcgttttcgtgtggtgtcgtttctaattgtaagttttactctcttactcctgtgtcgatctcaaagtatagatattgaatcaactctaattgtttctccgctctattgcataaaccttcagctagatcctgattagtagatggagaatcggattttattgtttgggtaacgaaatcaagttatgcaatcgttacatcaagttggaacactataatttttggggatctgtgtcaaatttcttaggttaagttttggatatcaaagtgcgtgttggttttttgatgtagctcaagttatctagggttttccagaagattagtgtttggaacggaattgtgtttgttaatagtcttatgattttgcgaaacttgtgctattgaaggtgattttttaatattgcatcaaaatgtcgaagaagaggaaggctcgtagcggctacttgaagaagtcatcacaaggaggagacgaagctgtggtacagcgaagaaaactagttccaaaacctggtaaaattgggaaagagattgatgatatctttgctgggagatctcagaggacgccagaggtccaaaatcccgagtcgagagacacgccagaagcccaagtatccgagtcgagagacactagagctgagatgaatgagctcaatgttggggtcaataacaacactgaaagccgacctaggacgagaattctcagtaacgacacgggaccccgatccaggacgagacgaccactcaggacgagaactctccgtaacaacagggaaagccgacccagctcgagtatttttaataacgatacggaagatagccgacccaggaagacaactgaagacgggttacgagtgttcacggaaaatgaaattggtttcaacaggaaagatgctggtggtactcgtttttgtccctttgactgttattgttgcttctaaatcttcttaaaccatttcgttttgaaccttttgttttatggtgccaaaggagatttaactcgttctgctattaatggatgtatgatcttataacttaaaaccatatttttcgttcttgttcatgtttgatgagaaaaaaaattacattttactctctacctagttctgctctagtctgaggaaatatctgtctttatttactcgaaggattaagatttcttatacatggaattttgttttccagcaactataatgtataccatcttaatttgttcttccctgtcaaagccattatgtatgacttatggtctaaactctaaaccatttgtgtagtagtctgcaattaatcgatggaaaaaaattctatctttagtaaaaacatcaaaagtataagtatgatcaaaactactttttcacaatatgtaaggttaagagtaacaatagatgagactgaaaagtgtattcacctgaaagcatcaagagtacacaacgaccaaacattatgcatgtcagacactcgtttgtccgtactaagcttttgtattgtactgtataagctctacaaaacacactcgtatgtataaatatatgtaggtatttagcaatagtcagcatgtagctgaaaactggttgggagagatatattattaagagccccttaaagaa

SEQ ID NO: 32414 - DNA, 929 bp, Arabidopsis thaliana landsberg
ctcatggccaatacaccttttgcgtactatgaaaattacagaggatatattttgtgctagatagtcagagtagttctcaatctgccatgacttttgtagaatagccaatacagaacttccattaatccagttgcaatacttttcttgtaattttttgttcacagattgccaaggtcggtgcttgaagtttcaaagaagatgctaacagaatcaaggagaaatgttacagttgcctcaagtgaaaaggaagctggatggttattgttatcatcgctattaaattctatgccaaaggaggtaatataatccttatgtctttaactgctgtgtttggagcattcaatttcttatgcaatcctgtttgattatttaggagtttggagaccaagattttgatatattaatcttgtggactgacgtctttgctggaaacccagaacacttgatcaaacaacaggcagaattaaaatctatgttaaggtaactggcccgtgatgcattaagcttttattgaaatgccaaggtctgaatattcttgccctatgttgtatattttaatttagctcctggaagcaaaccatgtttatctaaacaatgcacacgctattagcataattctcgcatatactagtctccaaactggtcgtagtttattttgtacacattagccccccccttgagagggctaactcctcacttctccctgattacttcaggtccaagagcaataaaagtgattactccccttttttgttcttgataacaagtacatgatcattcttctccttgttgtattgtgtggcccgccgcaattgattcactcacagtttttgagctactttttgtatctagtaatgatggtattctacttcaacccgttctggcaaaccttcctatgtacaacattactgttgcttcctacagttttt

SEQ ID NO: 32415 - DNA, 1503 bp, Arabidopsis thaliana landsberg
aacgatctcgaattcgtcacattatacaagccgcaacctttgatcaaccattgaccaaacatcgacccttgaccaagtcattgactgagaaacttggagccaaagtttagagagttggagccaaatttcttgttgctttgagccagagtcgtcggagaaatgtgtcgccaccgttcgccatgcttgacagttgtcccgtgaggtgtcaacactcgccaatatccgataccttggagcgcaaggtaaatatgcctataaacactcgattaatcccgtgtcatttaaaaggaagagagggaaaacactgaaaggctgctacggaggaattgttgtgatcgtgagcaatatccaagaattctgatcgaggaacgtcaagcataatcaagaaatgatcgagaaatctgatagtctgttttctttgaatcattcccatgatttagttttcgtctagaaactatttataagggttgattttgagttaaccgtcaagattgaaggctattattataatgaagagtcgttaaatcaagatgaatgaagttgagatgagccaagggaagttgagttgggatcatagttaggaagtcataagatgttgagatcgttgctaaccttaaacctttagccgaatctctgtgagtcttgaagcgtgtgatatggcagatgataggtttgggtgtttttttatttttccacaaacaccatttatattaagttatcgggaagagactctccgctagagagagccattcaggaaccgatgtgcttacaggggaaaaagacaattacgagctcgagcttttttagctaaataatgtgctcgagtattttaattacgaggaaagaaacgaatactaaaagaaaagaaaaaacacactaatgaacgataagatgccaattccgctgcgaatgttggccaatcgtcttggttgtcgagaatagtaatcaaatttgagcaattggaggcaaatacgccagacgtctcaccaatagagatcaagcactccatcgcccataacaaggagtcaaattccgcgtggagcggtgataaactccggcgatcacttttgagtcccatatggaggacggcgtcgtgtcggacaagaacccagccatgaccgcttagagaatcatctgcatgccaagaagcgtcaaactgacattcagggaactcagcagggggagcttgcacgaaaacaggggggatagaatcttcgatgtggtcctcgtcaattgaggttgcttttttccaaactgcagcctcttgaagggccaaagcgagagtttcaggagggggttccctgaagttctcaaaaacaaaacggtttctacttttctagatataccaaagtatccatggaaagagtttcaatacctcctctccgatttcaaattctcgcccacgccaaaagagaaagacaaagttatagaaaagggaaaatctagggaaaatattccctgaggtaggaataggcgataatgcttgtctcgacggtggacaat

SEQ ID NO: 32416 - DNA, 4404 bp, Arabidopsis thaliana landsberg
accgatcaggttgatgaaaacggtcatcaaaggcctatgctgcctgggggtggcgggtcaaagatggaaagaagattgtcgatggtgaagtcaactaataaatcatcttttatgaggacgtatactggagattttgatcacaacaggtggttattttacacgagtggaacttatttttatgggaatgctttttggacaaaagactgatatttctgtagcggtaatgatggagatggagatggtgactgttttggtattgaggcccaacatttgatgagcagaccggggagaccgcttacttggaagctgaaaattgctgctggtgttattagtccatacaggtataaaaatagacaagtctattgtttgttgttattgtttaactttactattacctaaacatgttaaaagagttcttttttctttctatgcaggcttttgatatttatccgtatagttgttcttgcattgttcttgacttggagggttaaacatcaaaacccagacgctgtatggttatggggaatgtctgtggtttgtgagctatggtttgccttgtcttggcttcttgatcagctccctaagctatgcccgattaatcgtgccaccgatcttcaagtcttgaaggaaaagtttgaaacaccgacagccagcaacccgaccggcaaatccgaccttcctggattcgatgtctttgtctctactgcggatccggagaaagaacctcctctggtcactgctaataccattttatctattcttgctgcggaatatcctgttgagaagctttcttgctatgtatctgatgatggaggggcgcttcttacgtttgaagcaatggctgaagctgctagctttgccaacatttgggttcctttttgtcgtaaacatgcgatcgagccgaggaatcctgattcctactttagcttaaagagagatccttacaagaacaaagtgaagtctgatttcgtgaaggatcgtagacgggttaagcgtgagtttgatgagtttaaagtcagggttaacagcttgcctgattctatcaggcgacgttctgatgcttatcatgccagagaagaaatcaaagccatgaagatgcagaggcagaacagggacgatgagcctatggagcccgtgaagattcctaaagctacatggatggctgatggtactcactggcctggaacttggttgacttctgccagtgatcatgccaagggagaccacgcgggtatcattcaggtataaagtcggtataagattcaagatgttattattttattcaatatctcattttgttttggcatattatcgatcaatgcaggtgatgttgaagccacctagtgatgaaccactacacggagtatccgaagggtttcttgatctaaccgacgtggacattcgactcccgctccttgtgtatgtttctcgtgagaagcgacctggttatgatcataacaagaaggctggagccatgaacgccttagtcagagcttctgcgattatgtcaaatggaccgttcatactcaatcttgactgtgatcattacatatacaactctgaggctctgagagaaggcatgtgtttcatgatggatagaggcggggatcgtctttgctacgttcagtttccgcagcggtttgaaggtattgacccatctgatagatatgctaatcacaacactgtcttctttgacgtcaacatgagagctcttgatgggcttatgggtccggtttatgtcggaacgggttgtctctttagaagaatcgcgttgtacggattagatccacctcgggttaaagaacaccatcccggattctgcagttgctgcttctctcgcaagaagaagaaaagccgtgtgccagaagaaaaccgatctttgagaatgggtggtgactcagatgatgatgaagagatgactctttttttggttccgaacaaattcggaaactccactttccttatcgattcaatcccggttgccgagttccaaggtcgtcctcttgcggatcacccagctgtcaaaactggacgtccaccggaagctctcaccattcctcgagaacttcttgatgcatcgactgtagcagaagccattgctgttatctcttgttggtacgaggataaaaccgagtggggatctcggatcggatggatttacggttcagtcactgaagatgtggtcacaggttatagaatgcatacccgaggctggaaatcggtttactgtgtgaccaaaagggatgctttccgtggcacagctccaatcaacttgacggataggcttcaccaggttctccgatgggctactggctcggtaaagatcttcttctcaagaaacaatgccttctttgctagcccgagaatgaaaatcctccagagaatcgcttacctaaacgttggaatctatccgttcacatcattcttcctcatagtctactgcttcctcccagctctctccctattctcaggccagttcatagtccaaacactcaatgtcacattccttgtctacctcttaatcatctccattacgctctgcttactcgctctcctcgagatcaaatggtcaggaatctcactcgaggaatggtggcgaaacgagcagttctggctcattggaggaacaagcgctcacttagccgcggttatccaagggctgctcaaagttgttgccggaatcgaaatctcattcacattgacatctaaatccggaggagaggatgtagacgacgaatttgcggatctctacattgtgaaatggacatccctcatgatcccaccaatcacaatcatgatggtgaacctaatcgccatcgcggtcgggtttagcaggacgatatacagtgtgattccgcagtggagtaagttgattggaggagtgttcttcagtttctgggtactggctcatctttatccattcgctaaagggcttatgggaagaagaggaaggactccgaccattgtatatgtctggtctggacttgttgccatcaccatatctctgctttgggttgccattaatccacctgctggttccactcaaatcggaggatctttcactttcccatgattcataggtttggtttctcaaaaattctctttctttagtcctttctaaagatggagacagagattggccaagaaacacacaagtatagttgagccaaaatatagagcaagtcaaagaacttctctcattgtcttttattttttgtttttttatttggttgggaaaggacactttttatttgtctttttaaattttgtaatcttttatctgttgatggaattatttatgctactactgttaattatttattcagttcaaattcaagtgccaaagttttgttaagttttaatttatttgctttcataaaccttttaaggaaaaggaaacaaaacgggtcgggttatcgggtcaagttatccagaaaccgatccaacacttgtcccgccgaaaccctacctaaaccttgagaaccttctcgtcgactttgagatttctaatggcaacagatattccgacttcgaatttcttcttctccaagccaatttcttctacataaatcacattttattacagtattctcgaatctcgaagaaccctaagtctcgtttcccaggaataatggctcagaaatgtgcgattggtttgatttcagccctagcagcttcggcttctcttgcgaaatctaaagtcgcttctgcagatggtcccttcaatctctctgggttctctacttctgcgaatcctcagcagcaggcttctcctcctccaccgtcgttggctggtgaagaatcttcagctcctccgcgagctcgcaatgataatccgaggacaagttccggtggtttcgatccggaggcactggagcgaggtgctaaagccttgaaagagattaacaattcctcttacgcgaaaaaggtcttgaacctttttctctctttctatagttagaaattttgtgaaatcgaatcatgcttaggtttaggaaaggctacagaagaatgtttcaattaggttataatttgtatgatgaacctaaaagtgattgaaaatggtagcatctgtgttggatctcagaattgttctatttctgtttgtttatcaatcgtggttaagctcacagttgttgtgtatttggttctggtaggtttttgaaagtattaagcagcaagaagagacaaagcaaactgagtttgcaacgaaggcgcaagagtttaaagctatgcaagcccaagctgaaactgtgagatcatctaactttaagtttcttaaccaatatttggatgtctgtttatatattcttgaataattgtgttaacaaccaatggctacctaatagaaatgagttagcaaaagtggcataacgattatgctgttatcttagtaaagttgaa

SEQ ID NO: 32417 - DNA, 1974 bp, Arabidopsis thaliana landsberg
  unsure (1)..(1974): unsure at all n locations
ctcctcttgtgtatatatgttcttcttcttcttgcaatcgagtgattcccttaatcaattcttgttgatatatatgtatgtcaggggacgaacttgcagctcagttgcgtagagaaatacaattatcgatctccaagagtatattccgccttctatataaccttgattgctaaggatccagatgcatgcaattcccttgtgacttttcagacaagggttgttgaagaaggctttaacatgacgaaacattcttgcaatatcgctagacctaatcccggaccacaaggtaaaggtcttggcacattatatcagagagtaacaaaacaatttgctttgaatgaagacaaattccaatcatctttataactctactagtcccatatgggtttaccttaatctataatgtgacttttctatatagaaaacgctgcgttgccacggcatcctgtggatcttgaaccggtagatgtattctacaaaggtagtttgcctgagtggccaccagaggatgctttcaatgataataaacgattttacgtggtaagatatattgtcagtttcacgtatgcctttgctcatgacagtccagtagtagtgatgtgtttgattttgcaggtgaaaaaatcagagctgctaacacatgactggattcgtttatacatnnnnnnnnnnnnnnnnnnngcgcatttgagatcgcctaaaaatgtacaattttgatttttattttccttttcaatgacttttggtattaataacaatacaatagtgtattttttttttaaactatttgttgcagccgaatctatctaagttggtgattgtcatggtagcgatagaaactaaagataatatggagccgccaagtgagagactcaaggccaggaatgcatttttctacataaagtacaagtaccacgcgaataaaggacggggtcctaagcgtcgtcttggtcataagactcatgatcgcatagctatagtaagaagaccttagacaagaatacaggatacctgactctcgagttcccagagccaatactataaagaaacttttctaaaaagtggtttaggcgataactaggcatcaacgtccaaaagcaccacggccgtcgtcactcgtacggttcggtcctactctaattactaattacgaagcttctcataagatcagatccatctggaaatgtggatcacataatgtattatgtatgctcgacaaagtttaattggttgtttgcatttttaagtggattgtttggtttctgagcaattaatttgtgagttggttttcctagttgtacattattttacaaggagtcaatacgaattatgaaccataagtggattttcgtaattagcattaaactagcttgtttttgaacaaaaccataatataaaacgttttcgtttaaccaacgttggagtcaatacccgaaccaagcaagcagttggtaaaccggataaaccccggtcaacaaatcatgccttggtgcgttcttgactccccaaaagatttagtggtaaattccagtttttaccctttgtatcggatcgaatttacctcaacaaataataagtttttttagctgcgattatttaccaaaataccctccaaatcttctcttaattaccgacgtcgttgacgagcgcggaagtgatacggttgacagtggcgcaaatacggtgattgatgacggagacggtggaaagatcgagtctttcggtggtgacgttgctccccaagacctgtattgcaacagtgagcaagcacgaaggcgaactgacggaactgccctcgacaccatcggatggattcactggaacaacagagaatccaacgggcaaaagtggtatttcagaaggatcttcgccgttcatggcgagctgaacagcgacggggtcgacggtagagtacaccaggagactcccggagttatcggtgcatgtttcttgaagcatcaactctacattatg

SEQ ID NO: 32418 - DNA, 1103 bp, Arabidopsis thaliana landsberg
tttcattactgtgatcttatatgtttattgtgatatggaactatatattttaaggcatagttaatattctagtaatttcccaaagatctatataagtctagtaatttacaactttgatatgctatattactcagccagcacaaccacaaagctatagacatcactctttgctgtgaattggctagactgaaagtactcaggatccatatatcccatcgcacctgaaactaccgttgtcaaatgggtatgatccactgttacctatcttgaagttccaaaatccgaaactttggctcgatatttctcatctaacatgatgtttgtagacttgacgtctctgtgatagattggagatgattcagccgagtgcaagtatgaaagagctcgtgcaatatccactgctatgcggagacgtacatcccaagtaatcatcgtgaaatcatcagcttatcgtgaagatgctcgaaaaggttgccattgggaataaaatcgtagacgagaagagggacatttgtctcattaaggcaacaacctaagattttcacgatgtttctatggttaatctgcgaaagaattacaacctcattgatgaactcttctagcttgtctgcgtccacaactttggatttctttactgctacaattctaccatcgacaagcatttctttgtacacagtaccttgaccaccctgaccaagtattctatttaggctgaagttttcagtggctttctctaactcactcgagctgaacactcttgtcttctcgacattgccttctgttgaagtcaattgttgttgcaacaataaacccccagtacgtttgaagaactttctcttttggtttagcctcatttgttttctactaaattttataaccaatatactccaccaatgaagattaacaagcctaaccctgcaaaccggcaaaaacaaaatgattagatatatcttggaaatataaatactaaaaaatgaataacttctattttattttattttggtgtgttgaatattaacttcttttattgcttgtgtagatgggaatattaattactaatggctaattaggggtgttaatttgtgtaaattctcatttattta

SEQ ID NO: 32419 - DNA, 3731 bp, Arabidopsis thaliana landsberg
aagagaacgacaattctgtccctcttttctttgtttcgaccaactctgtctttgtccctctttattttgtttctttcatttttctatgcgaacgaatatttttgatgtcattgcgtaaaacaaaagggaatttgtacataactacataaaaagggagaaatggaaagtagtttttccatattggtgaaggcgtgcattattctctttttcatttaataatatgcaaaatcctcttttaatttgtattttttatttttgtttatagaatatattatgtgctattattttagttttttttgtgtcatgtattattggcattattaaaaatatttgatctaatcctattacgatataaactacatgcaacatatgcaattacaacgaccaaggattccattgttatgatgaaatattattttagtttttgtaattaattgcagttttttttttgcaaaaacttaagactacttggatggctattggctccaatatgccaagccggaggaaaaccagaggatttaagaatatatttttttaaacgatgaaggggaaaaataatttttttaacgtccaacatgtatgttcacaaaatttgtattttgaacggaactattacatgacgttacaaaaaaccatgccacaagagtatccggacttaacaacgtttcacaacacatcaattttttttttttcaggtttatggatatttctgaaattctagctaaaaactattaggatattttaaaggtcatatatcaaacttttggttgggtactatataaacttcatttaaaactaggaaaaatatgaaagcatttttatatctatcaaataatactgcaattaaattatcatagtgttactgttttaaggttatatgactaagaaatggtgcattaaagctgtatcacattttgtccaaaaaaattaaactgtatcacgtaattgactatttaatattttaaaagaataactaattatatttgttctttaccaaaagaagaaaacaaatatactatatttctatactattaaatagtattatcaattaggtgttaatactatttgttaagtgggcgttagaggattaggtgtgtctaccggtcctgtcgttaaaggtgggaagatattttattttcctcattctttttcaaaatttcaactaatttttaagttcaagttgttgatcacttattaggtcttaaatcattgtcacgagaaggaaaagaaaaatgtttttaatttttatttttattttacattttatatacgtacatatacacgtatttatgatttttgtaaagcacgttgttaacgtgcacttttttcataactttacgtcaaggtatatactatatatcagcatattgtggaatcaaacatatatatagtagcagttttctagactaaagtaattcagattaattgtaaagataacaatcaccgtataaaacaatcaacgtccgtgtgtttgtattcacatatctgatgaaaattagtaattctagttttcagtctttcgattaacaatacaaaattatactttctatatgatttaatctgtataaaaataataacttacaaaataaattttagttagtgttttccagcatgaaaataagatattgaacgattttgttgaaattgttcgtttgattttttattttatttttgaaatgtaaatggaattatgtttcagacttaaaatgatccaaaaaaatatttttttgaaaaaatatgtatggtatggcggaccagacccgtgtataataaacattgttttaaatgtattttatatataaataagacaaaataatctataaaacaaataatgtatatttttagaaaagaatggagtgaaaaacaattaaaggggaaagaaatcaggacagctttatataggttgatttcatctgacaattctctctctctctctctctctctctctttttctaatcatacgaacacaatctgcttcaagaattagggttttgatcagacacaaaaaagtatctctctccgtagttttgtgtcaaggttatgcaagaagcggcgctaggtatgatgggagccaccgtaggcggagatggagacgccgcggtcgtggcggagcagaatagacagttgaaaggtgagatagcgacacatccgatgtatgagcaattattagccgcacacgtggcatgtctaagagtagctactccaatagatcaacttccgatcattgaagctcagctttctcaatctcatcatcttctccgttcttacgcttccacggccgttggataccatcatgatcgtcacgagctcgataatttcttggtacgtttgaatataaatttattcgttttattaaaaaaaaaaatcttgtttggttaaattactcacaagttctgtttctatcatttttcttttttgatggtttctagtggactaactttgaatgaagttatgattactaaccaatctttgttgggaaattatgattttcaatgatttttcgtggtttacttttacaagatcgttgggagtttactcgcacattaaagatgtaaaccttttgtcacaatatacaaactatttatataaattttataattactaattactcttgtgggaaattaattatatttcaaacaaattatgttttttttttgcaatgattttaattagtggtatattttacctgatttttgtgaagggttttgttcaactttcatggaaatttatgtatcttcacacaaatgttcaaatgtataacacacacacctagatgtagatattgttttgtgtatagttaggtgctaaattcacatagagtgagtcaatgttaaatgtcattttgtaattaaattgaaattctatttaaactgtgaatatattatcatgttgattgaagtcggcgattgattttctactccgaactaaaatttgcaattgcattaaagttggaattgatattgcaactataattttggaattagcttgtgaaatgttccaaaaaaagattcgggtttctttatatttatttaagttaggtagaaaataggactatataatgatctaaccgctcaaaacacaccacaccagaagcacatatctatatgtgtgtatgcatacatgtggaaaatgttaacatattgactaaattatatgaaatgtgagaggatattaaaaaattaccaattatatttaattggaaacaggcacaatatgtaatggtgttgtgtagcttcaaagaacagctgcaacagcacgtaagggtttcatgccgtcgaagctgttatggcttgccgtgaaattgagaacaaccttcattttcttacaggttctttcttttctactttttttaatggtattttttataacccaattaaaaaacataacttcatgataattacatgttattatatataccacatagctatagaatcagaaagtacttaagatatatataattaaaattcctgttaaaaattagcgatagttaaaacaaataatagagttaggtatatctaaaggttcttgctgatcataccagatatgaacaactagtaaacatattaaatgtaaggtgttgggagatgataaggaagaatatattatatgctcacacaataagattagagattttatttgtgcttatatagttatgttatatgattagtctaaatatgaaataaatttaaatatacgaaattattaaaaatatttatttttgcactgatgtc

SEQ ID NO: 32420 - DNA, 403 bp, Arabidopsis thaliana landsberg
ctagtgctgtaaaacggtggtgttcggtgttacataattgaaaacgttgtatgatgtaggattctgttggacccaagctagtgttattcagcacgtgccctgtgttgtgctaaatcatggcgaaatatcctttcttttcttttgttacatcatgctgtgagatatatagtcattacaggcaaagagtggccaagaatacatggcacacacatattcatttcttgatgaatctcaagagatcacccaccacatgtaatgaaccagttaccaacacctaacacccaaaatataacaaaatcccacttaggccgatgtgttgacacctgaatccaacattgtacttcaccagtgacacactgaccttacctcaatacgaacttgtaaactctgactagcattgtcc

SEQ ID NO: 32421 - DNA, 4562 bp, Arabidopsis thaliana landsberg
  unsure (1)..(4562): unsure at all n locations
gaacggaccaaaagaagagagaattcaaagactttagaagagaacaacttctctgttttattcataaaccaaaagctgcgtttaaacatccatagaattaaccttaaataagacttaaaaccctagaaagcaacaccgtcaaagaacgaaaagtaaataagaaataggaacaaagcccaagtaaaaagcgcaaacaaattaagaaagatagatcaatatcaaacacgtaaagctcaagtgtgtttgataagagttaatgcgctgcatcaccgtgctatcgtggagtattgtttaactttggtaactcgatctacacgtagtgcgaagggctcggagagattgggttagctaccctagctgatgcagtctacacgacggtgtagcgtttggtactgatgctctggttacatgtctttgtagttgtaacttgggagttcacaagagtgtgtatggtgtgggtgaatgtgtggtgtgggtgaatgtgtggtgtgggtgagtgaaggcagcatatcaggccctataaaactgatttaaatatggagtcaaaattgcatgtgcatgtttttgtaattgtttcgccaagctacctttcgttgctattctctgatgcgtgtttcgtgttagaattatgggatgaagaactaatatctgttacagggaattacgagctcactaagtaatgttagattagttatgactccattttattctgcagaaaaccttagtgggagccattagagagatgctcaggacataggaatgtaaatatagagttattggttttgcaaaacttagtgatttcgattcttgttggatttgagcgtgtatgctcaagggcccattgttaaaacgtttggatacttgttgtacgagaacttatatgttataaaatattattttcgtataaagagtgtgtttcattcgatattagtcttgtccagactaacacaacttgcgatcatggcaagggttgaaaaccctcaactcacaatttgagggattcttcatatgatgattcggataagggtctaaatgcgtttggaacctaagttaactcgtctatatgagctatcaatgtagcgtttttggcttgcccttggtttgtccgaccatagagcaattcaggggcgttacatccacggtggaaagttataaggaactagtatcactggccagatgctatactactactcatagtaccaaatgggtagaaaccatcatttgctaaaccaagtctgacatttcttggatcagctgcgaatttggtaaatttttaatcaaatgtcttccaagtctctccatctcttggatgtcgaagtttactatcattatattagcagttgtatgccatctcatgtgggtagctgctttcgatgacatgaataaacattgcagtcgtggctttagaggaaaataacgcaaaatctttgtaggaactttatttttcttattctctgatccaaaaaccatactctgcgaagaaatgttatctttccaacaagagggtttacaaactttgcgaatctccctttttaaatttgcatcccaatataacatgcaatcatttggacatgcgttaattgattcataagtcgttccttgttttcgaataaccttttcatgtcattaaatgaagctggtaatttggcatgtgtaaatgcatctttcagcaaatcaagcatcatagatatctccttgtcactaattccacacaaacatttgatatggtacaacttcaatatgaaagacaacttcgtgaacttattacttcccatatatagcttttggataaattcagcaaacaaatcatcaaaaccttctccttttccacaatttccacttgaagttgatggtatatcagtgtccacaggttgatcacacgatccaggtacgtgttcaccagacaaattcgaattaatatcggtgaaaagatcatccaagagattcaaagttgaatctaaatcagctcgatcaatatcagaaggtactcttgcattccctgtgacacatatatcctctccatgtaatacccaagttgtataagagcttaaaaagccaatgcacatcaagtcacattcaatatcttttcttgacttcatttttgttacatttaacgaatacatggacacttcatcatttctgcatttgatttatatgaatccaagaaatttatcacttctaatattgtattcttgagataaacttggtttgtctatccatgacttatccattacaaaacctaaaaacatattctcacaatttgtaagcttaagaaattcaaaaaaataatattaaagttcaaacaagagagtaataaagagaagggtattatcattatctctactcaaaagactgtaaaattaagtcactcgattttcaacagttcccaatactctgttcatcatacaaatacaattgtacctctataactcatttcaaaattttcattaccgctagcctagtattgtgtcaaacgacaacataatcttttcagagatttgatttggagaagcgtgatccaattaataaagaactaaatagaactttgttagaaaatattgaagagtcgcgtctccatgtcctctatatttatctgttctcatcttcgctcattgagacaccataaccctagaaaaacttgaagagaaaaccgtttaccagtgcacaaacttttacagtccaatctcctagtcacagtcccatttggagtcggtgatcttatatttcttcttcagatttaactcacaacctgtggatttcactttatatggtatggattagagttcaattctcattatcttagggtttctgttgccatttccgatcatgttaacccaattttttttttccgtagatgggggaggttgatttaccggaccgattgattgcttttggagaagaaccgctgccccaaaagagttaatatgcccaccatatgtacttgctatttgatccatcatagatgagccttaggcatctaagaaagaacatgtaggctcatagaagggctctggtttagatactaggtgaactaatcaaacttgataataatgcatgtttatgttaaagatctcttggcttctccggttattcttagctataggcatagggagtttcatggcacgcccaccggttactctaaaatcatagtttgagttcgagaacggtgcgataacaacctagctatttctagatctactatcatctgtttcttgagaataccccaagcctgacgcttttattatcttgtttcacaaccatccaatcgattgctattgcttactttttgtttctctttattttcattactgttttacttagcttaattcaaaaccttagtctattgcgtgatccgagagctttgtgaattcgatccctaagtgctgcaaatgacctctttatttgagagagtggtcttaggattaatttgacttatatcgccgttgccgaagttctctgtgattcaccattagactaagtgtagaatttagcctaagtgtttattttctttattttgttactcacgcgttttcttgcttctttttcttgtgacaagggaactacaagatggaacgtaacaaactgctggcaaatttcgacgacagtgtcgaacgacaccattagggtgtcgatcgacacaatttgcagaatagacagctaccataggcgacttcaacagagctgatcttttctactccaatcgatcagagatccagctacctccttttgtaagagaagactttgccattcaccctgcctactataatcttgtttcacgagaaaagtttcgaggtgcttctaatgaatcaccagtagatcatctagaagtctttgaagacttagtatcctcaatcaaagcagatggtctaccagctgattatcttttttgcaaactcttcctacactctctcgcgggcagagggacattatggctgcgacaactagaaccaggttcactaaccaattgaactgacacgaagaaagcattcatgatccacttccttgacgattcagtggcagaattactgagggagaagatctcttcgttttctcaagattcaacagaaagtttgaaggcagctttgatcagattcaaatcctatcagagaaattgccctcaacatggtttccaggaaagccagctcatcaacatattcttccgcgcaatcgataagcagtatcggttttgtttcgatggtgcaagtgatggcaatttcatgaaaaggactccaagcgaagcactggtacttataaacaacgctatcacaagtctctcaacttaggacatagaaagtgatcggagaaaagcggctgaggcttccgacatgcgcagagcagaacaaggatctacacacattgcttctccatatatcccttcttacatccaagcccacccaccaaccgttgctcagagtagaactgaagtcatgctagaggaattactcagactttcaaaaacgttttttgaactgaaagcanaagctaggaaactctaggagtctgcttatagaaatgagaatcgagttgattttgacagtgcataggtagagtcgaccgacacc

SEQ ID NO: 32422 - DNA, 2392 bp, Arabidopsis thaliana landsberg
cgcataacataatttttgacctctaggagcttgtggagagattctcgcttttcttgctgctgttaggacgagaggaccttgtcgttttccatacgttactgattcatttgaatttcgtaagttccttgaaaatcttgttcgtttgtccgtttgtcttgatacattttttacgtgaaactgttttaaagattcgttgttacacttttagaaatgagaaaagctagttgtcagtttccgacttatgccgatacgtttggagaaggtagttcagtagcgacgaatgtcaatatattcgtcgttgtaaccaagtccatagcaggtggcagcaaaggtttcagagagtggtgtggtagagagtaaccaaggggatgctagtgaggatagggcgacacaactttcagatgctcaagcttggaagaaagcttcaagttctgttaacaaggatagaacgactcgactttcagacgctcgtgccgggaagaaagtttcatgttctgttaacgaggatagagctatttttgtgagcgatcgagtgtcgacgtttcctagcggaggaaggtttctggtagaggtagttcaagagattcttttcccattgtccgggaaagaggttctactcaggatattcaggaggtcaatcactccttttcgttcaattatgataggaaaagttgttgtttccagacaccatgatttattgtggtgagtttggtaaaaaagttatcgggtcgtcgcatgagatccctccccttgaattccctattgcgaaaaatctctaccaaacttgggcttgtaaggaggtttaggaccaaacttgggcttgtaaggaggttcaggtacgtttatcctctatttcttgatttgtcgtgtttattattttatgttatgataactttttgtttatttttcgtttatttttcttttttttataagttgattgccgccggaaacgcgttacaaaattttcttgaggaacatgcgagggaggcaagggagaaaacagtggccggttaggaaaaatgaaaaaccgcaattttattgcaacgactcgtttgcgtaacttaaactaggagaaatgaaggattgagggtctcgaaaagcagatcaaggagctctcagaaaacctcagaaagtcgaacaattttggtcgagctgagaaatcaaggttcagaagttctcgtgacgatgcgtttcgaaatgctcattccgaatggagccatttcaaagatgaagttgctatttataaaggccggatcaatcagttacagaagcatatctttaacaaacgtgttgcggacgaatctcttttcatgcaatgtcaagccgtaggtactcggaaagtcttgaagaagttgatcaaaaaatgtacaacaatcccgggggagactatgtgtgagcttaaggttgacaaaaagaagttgcgtgatttagtcgatgctcttgagattaccgatcttcgtgacgatgacctcgtggcctttctagagtttgaggatgaggcagtgatgacgacggctgaaggcgaagcaacgagtggtggtagttaaatcgttgtgaccttcccatgcggcgagaggatgggggtctttttttattattatattgatcttatctctttcggtattttagacttcgttcggcattttagctttttttggctttgtcgtatcggtattatatgtatgattagccctttgttggatttgcttggtatattagatgtttttgtggagtttgactatcgcgctattttgacgacttcttttatcctgatgtttgcggtttattcttggtttagcatagtcgatattgaatttgagattgtcttattgtattcattgagggttaggcgcgagttgcagctcgacttatcatgttcaaatgttcagcttcaaaacactaggaggaattgatttatatctttgagttcttatgcagggttgcccttggcgaggtgtgcctagcgttttaaacttggtttcgaaacatattgtggagcaagacgtctcttgacttattatgtgtacgttttaaccgaaatgacaagcttagtgttgagtagacaagacagactcgtcgtaccagatagatgtggttctggtgtccagcttatcccgtatattctttgaggtcggcaagaacgtacaagccggaacttagcttattaagatttggctgcctgctggctaacgtgaggccagctcagcttttattctttaactaagtaaagatgtggattatttcgtcactgcattcatgtggaacgcgattaaatcgtgctcctagctagggtgtcgatgtgggagcaggtagattggcgaggcgtactagtccaaaagagcttgtcataagtgatatggcgtaaatttgcacttctctgattttattttgg

SEQ ID NO: 32423 - DNA, 624 bp, Arabidopsis thaliana landsberg
agttgaatgaggttgcagctgcaagaggatgtcttggccgtttccatggcggtgaaatgatgggagtcatcactggctgggttaatctagaggtatgagttacttaaaaattttgcatttttctttgagaatttggatattgaaaagtgtaataaaaattttatcaactctaacaagctcaggaagttgaaaaaaaaatgtctaacaatgtttggagggtgtagttgcatgttaaagtttacactttggctcttaagatatacacatgaaatttcctttaacattagctcggcgagaaattaaagatatcgaaaaagaagacatttttttctctcgtgattctcgatttcctacaaatttataaaaaataatggtcactcagttaacgaagacactatcttcactagatgtaaacaatcaattatttcacgttagcgaaagtcaatcatgcatttcattgtccaaacgaatgcttttacatttcaagcacataagtcaagatttatcgaaggttgacagctcccataattggcgtgtcttcatttgatagtgtataaaaaaataatattcatgagaaatcatcattcctttccaggaaccataaatgaaatatatgatcctgtg

SEQ ID NO: 32424 - DNA, 588 bp, Arabidopsis thaliana landsberg
cataggcttctagatccatagacagtatccaaaagctttgttttgctaagagaacaaaaagtttaatgcatactttatcttgtgtaaatggacgttacgaatgtatcaaatacatatctttcaaggtatgatatttatttattttttggtcagaaaggtattgtatgatattaaacacaggattttgaactgaaatacacaatacttatcaatatatatacttatcaagttagtcttttttactcccaatttgaaaaacacgaaagagtaattgagacctatatatgtcttaatgaagccaacttgcccaaatttatttcactataaatttgaatcatgctatatatccaatgattacaaagtttgctgttggtatatcctactccttgaaaacatactttgaaataagcattataaattataaccaagcctatttcagttccagttggtatcttaacgaaactggattgttaaagttgaaacatgtcaaaaccaaagagtggtttaagcatttgatcttaagctagaagagatcagaaagatgagattgcctccaaccatgctgagggatccatatgttcttggcta

SEQ ID NO: 32425 - DNA, 2155 bp, Arabidopsis thaliana landsberg
gttctattggaaaccttcacatgtgatcattttacatgttattcttttctcataaattttttttttttttttcctagaaaatagctgatgacgcttccatggaattcattcaaatttctgaaattgcgaaagccattcaaacgatcacttgtcggagatgtttttcttctttgcgatcaccaatttaacagtgttgtatatcttttattattagactatagatattgttcgattcgcaatattagatattgtgtcacaaataatattgtatacttttttatgtacattataatttatacactacaatatatatcataaaataacaaaaaatctatatttaataaaaatttattataatattcttttaaaaatagaaaactctgtacgtacgtccggatcatgataaagacagaagatacaaactaggtttacattaacatgtattttggcccaattaaaacttttggcttgaattatgggccactaaaataaattttgttagagaggttttttgagttaccaaattttaatttataaactaattttgcatagatattttacactatttcaaatctaattttcacaaatatatatttctattacaagtttataactattagacttttgaaactattaaaactatttgttatgcaggaaaaacaaactatttctataaataaaatactaataaatgatgcaaaattgttaaatttttaaataactaaaatttctattcaaattttaaaactaataacacacaaaataaacgtgtgtatcaaagtaatttgaaggacaaaagaaaaatttccaatgaaaatgttactattatgatatctatgctattatacaattcactaacccaaaaaaaaaaatcttaactaaaacttttcgcaaactttttacattacctttacacatcttattttcaaatattatgataactgataagtttatgatatatatattattatacaattcactaacacaaaaaatatattaatacaaacttttaccaaaaccatatgataatacttacaacccgcataagtaatgtgcaattcacatcattagttattgtgtcataaataacactatacacttttctgtgtacattataatttatagttttatacattacaatatctttacctaaaaatttattctcatacatttcttaaatttattctaatacgtatgtgcgggttagaatctagtttttaattaaaacttctttcatgtatatatttttaactcagataattatgtctaaaacaaaaataataatgttttaagaattgttgacgtcgaaaggtacctagaaagggggttttattaacaatagtaaataagtggttaatacagtaaactaattaaaatatggagcactgaatctcaaatatcaaacaattcctcctcccaaaaccctaaatcgaccttcgtgaccctccgtttcagatcacggaccgacgcttgctctgtgctcatcgttctcttcttcactttgtaagcttcctcatctataaagttaccatttttccgatgaatcgtgaaggtttattgatgaaattgggctatatttctgcagattcatggtggtttagttcatgattttggatgttttaagaactttttctactagaactcgaaatcttccaagttctggtttttattcgataagtactagtataatgcgagatatcaaagtcaaatctgattctaaggagtttctaacatcatctgatgaagaagaagaatcagtttccattagagtgtcgtcttcttcttccttgagtagtgttaaatcgacgcctgagattgagaaaaagtatgttcatcgagtttacgatgcgattgctcctcattttagctctactaggtttgctaagtggcctaaagttgctgcctttctcgaatcgttaccgtctggatcggtgattctcgatgccggttgcggtaacgggaagtatttggggttgaatcctagttgtttcttcataggttgtgatataagtcatcctttgattaaaatctgttcggataaagggcaagaggttttggttgcagatgctgttaatcttcctcatagagaggagtttggcgatgcaacaaaagtaaagcggttttgcatcattataggccagagaataaaaggcag

SEQ ID NO: 32426 - DNA, 648 bp, Arabidopsis thaliana landsberg
aaagagcacatcataataattattcgaaaacgaaacaaactttcagtccttcattaaataagaatcgtttattttataatacaagccggtaaatgcaaaaatcgaaatccaaactaaatttgaaaataagaaaaattaggacaaagaaaaaaaaaagttgtacttaagaaaaaccgaattcaactaattaagggaagtgtataatgtcatctagcttggcccaaataaaaacggcctaaatccttgcttttagttcattcaaataaatgcttcatagcatgagatgttgtctgctgtgtgaatcataagatccctcttttgatttcagattttcagcccattttacattgtttctgaatctgttgaaatgttgtctgttaagggaccagatatggtgccagtcttaggaagcaaatcaagaagatggaagtgagtcagcacagcaaatacttctgctagttctgtggcaagtatgctgttaaacggaaggctgttggaatttggggatgtaaggactgtgggaaagttaaggctggaggtgcctacacgatgaatactgctagtgctgtaactgttaggagtacaaacaaaaggctcagagaacaaactgagagctagacttcttctactcagacacaactttaaaac

SEQ ID NO: 32427 - DNA, 1248 bp, Arabidopsis thaliana landsberg
gtatatggtagtaccattggaattgagaggacagatccactagaaataaaaaagattgtttatcatcatgtaaaaacgtattttacatgaatcagagagaacaacattttcatcttcagaattttattgagatgcaacgatcttgatcatggcttgtgcattaagccctgttacattcttctcacaaaacttcttccaagcttcttgcttgcttccttcttcgtcttcttcttcattccatgtaaatttctcgaaaagcgagttcaccatactccttgcagcttcccttgcctctggcaacttgtcactcaactgatccgcagccatttgtgcgagcagaaccatcccaaattcttccatttcatttacctcctgataacaaacatagagacaaatatatcaatcacacaattcaagaaaataataactttgctctgagcattttaatcattgttgaagaattcaaaataccattttagaaacgcagttggaagtagacacagcagctttggccctgacacgagggttactgtgacggacataactctgaagcttacgcagaagcgggaagcgagccaccgagttaaccatcgtgttcagcgctttctctgcttcttcacacacaaacttcttgtcttgtgaagctttcatcagcaactgcaacagctgttattttcaccatcaagataccaaaatcaaactttattattaaatcaacaatccatagccaatcaaaaagctaaactaaccggaaaaaacaaaaaacaaaaatcaattttaccagatcgtccatagatttcaaatgaggtccttccagcaacttttctccataagcagtgaagatatcagaacaagtcataatcgaagtcttgcacaatgcacttctaggattcttcatcgccttcaccatcacaactataagcttttctctacaaattgacaaaaacaaaatcatcaccaagaaactccataagatttcagattctggtcaaaaaataaaaaatactcacagaattggtagcaacagagaagagtgatgaattgcaaatctccttgtgttgatcaatgagtcacatactttaatccaatcctttgatgctaattcttcaagtaatctctgtgatagattgaatcaataatcatcaaaaacaaattactacacataaattcagaatcaattgagaaatttaattacctggacagaagattcaggatctgaaaatggtttgagattctcagaagcaacgt

SEQ ID NO: 32428 - DNA, 1555 bp, Arabidopsis thaliana landsberg
ttagaaaatcatacatcaatctcttatgtataagtaataaaactcatgtgtatgaaataacatttaaataaaagttaaaagtatatttattttatgaaatgacaagttatccttactataaaatttactttggataatttaaacaacttcaaaagaattaaaaaaaatctctttttatatttttaagagtacaagttctttttttttctacatcatgtgaacatacaaactatagaaaatagttaattacaataaccatgaaaaacaatactagaaataaaatttaaagtaataataaacgaataataatataataaaacacttacgttttgaagatgagaataatagagatatcgataggttgaaaagagcttcttttctttattagaaatcacttaaacaatcttacagatctatttaatcagttttacacaggttaacacaacctgttactgaccaattcctaatctacccaactcacaacacagcaacagctatgtatccctctttgttcactcaccaagaaccctaatagcttctagcttagatcttgagattcacaaagcttgtgagataagacggctacctaaacctaaagtctagcttccgattatataggtaacgacacaagcgtcattaacctatttcctaattctaagatatcttcaaatcttctttccatgatttgcttatatcttgaatgacttgttcatcacgttctggaaactccagcaaccaaacgcagctcgccacgtcatcatcatttgagtctcgctgcttcccgcatacagctccttcctgtgcttcacagagtcgccttgtgctcaaacatctatatatcttcattctccccctttttacttgaatgtgacaactcaagctccaatggatcctgtcatgattagtctaacaaaaaaacacaagaacacaaagacaacatatatcccaacatcacaagaattctgaaaaacaacatccattagcataaagattcaagaaccaaaactcaaatcacggaataaggtgcaagcagacacaccacccgaagaaacaaaggggacaaacacagagttttagtagtgcacacaaaaacaaaaaacaaaagctacactacacatttcctcccccttattactagaccccaagctatagtaactcagccaggatcaaattcttcctcttcctcttcctaggttcttcctcaactacaggagccacaacatcaaaattccagaaaacacaaggcaagaacacaataagcaaaacaccacatgaagcaagaaaacaacttacctgtcaagcgacgtcgtatgcgcttccctatctcaagaagatcattaatgtcttcaagaaggagtttatgacccatcggaggtggtgcttgggtaggctgcgtgggtggcggatcgttgacaaagacacccggttcgtcagagagagtatcacgaggacgagagcgcacatcacgctgaaaggtgagcagctggtagatcagatttgggtaagccagacgatgtgaagaaaggggtcccaaacgtgccaaactcatggtatg

SEQ ID NO: 32429 - DNA, 3129 bp, Arabidopsis thaliana landsberg
agtctcatcttttacaggctccaacgtgaagttcaagccgctggatctgcacgagtagttctgagaaggatctggaatatttcctgggtcgtctacatgctgagtctccagcttcccagctcctcctgcaccggttgttatataaaccgggccacattggtctaacgtgtagttgtagactctgtttgatctctcatatgcatcaacctagttcaggttttgtgggaaattagcgtaaaagaagatatttcccaaaagcaaaggaatactttaacagaacaacacacatacatgactattgaagacgatatcgactcggtagttatagagcaagtcttcaaggtgaatcctcattgattcagcttctctgtaatgccctttgaatgtgctgtaccaaggaagactccaagttgcaaccacccatggagtttctgatctgtttattttgatcaggtcactttcaagccaaatatactgatcagctgttgaagaaacagggaattaagaaaattagaaacacatttcaatgaaatttaaacctaaagagagaaaatcaaaacctggagaaactatacatgagttatcataaggtgtgtatgaattgagcactatgaaatgagctcctcccgcgtcgaaagaatagtataatggtgagaaagaaccgcttttgttagaagggaatgcgaatcttgaactgtatgcagcgaatgtcagattattctcggtctgcggctcactctcgtgctcccctgctaccatcatggttggaacattagccgtgagtggctccatgaacctgtcatcaaagacaaagcccccaataatttagtgtttaaaaccatcaaaggattcacaatcactagagaagaatcttcttttaccttccccaataatcccagcgaggctgataagtttctccactagaataacaagaaccacaatcagaactagttccattttggtcacaatgacaagaactacaatctagtttagtcttattcgcaagataagtatcagcgtagctgaatcctccaagtaaaaccacaagatctggatggttagacagaatatgccccaaaacagttgatgtgttgtaagtaagacccaaatctccagccacaacgattctgtgtggataattctctgatgtagacttaggcattgccctgaactaatactctttgctcattgctgaaaaagaagagtctccgcattggtatcggtacaatgtgtttggtttaagacctgtgagttgaacatggtgaatgatgcctgaagtatagttcatgaaaccattctcagaagaatactgttggttataaacaatagaatggcctgttgcattttgcttcctagtacgacgaacatcgaattcacggtattgaactatgctttgcacacaattaggatccagaggtgcagaatctttttcaccaatttggtattcccctgtagtatataatacaacaaccatgcttcagagttcagacaaatgcaaatgcaaatagttaacttaaaggatgaatatttaagcaaaaatcttgatgaagcttcttaagtagatccagctcttggctcaaaaagattaaccctttatgtactttcaagataaactaatcacacattccacatttttgtaaacataaataagtccaattttgagaatttaataatatttcaagacttttgtagtaaaaaaaattgttttttccgaaaggtaaagaaagttgaagagacaaatagagacctgtgacccaagaaatccagacggagtcaaagctgtaagagagagagacagagatctgttcgggaagaagaaactccgaaatgggttttacgaaactcgggtcggattctggtaagtcgaatgcaatcgggttaagattcgggtcgagtggagcagtaacggggttaagcggaccgtcgagtgtcgatgggaaaccatgaacgatgatagtaacagtagaagcgaaaatgacgaaaaaggacatcgacattgtatattttaccaccattttcacataaatgttttgttgcagcgaagaagataataaactctattagaccaaaaaaaaaaacaagaagataataaactctgtttggaatgaaatcttaacatgaaatcttaagatagtaaactctttaccacagaaaattggttatttacaggaaggtaatatcaattccgattatttcccggttaactctgtgaaccggtggacgctttctcgatattccggttctcagattatttaccaattaccgagagaaaaacattaactaatttccttggaaaatattagtacgaattaacaacaacgttaagagagacttaagatgcaacattgaaactaaaagagtaattaagaaaaataactaaagttctttagaaagcctaatctgtttatcccgcgaacaaatcgggaaaattttgaagaaactccggcgagatctcaaggagtgtaaggaccgccaccgccaagttccatgaccatacagatctcatcttcttcttccatgtgcagctgttggaacaaaaaagtaaatgaaagttaacagtgaccaacagtgttgttgtagatacataataatataaacaaaaatcagaagaaactaaagatgagagagacctgagcaggagtctgtcgagctttgatttctctaccattgtagacgaatcggacagaactgtaatctaagtttctcttcgtacagtaagcactcattagtttctttagatgtgcatgagttccaattttatacaaatcctctgctccctgttggttcttgaccttgagagtgactttcatatggggtgatgtttcaggagatcgagacttctttgatacaaatgaagcagagattgtgtctgtggaactcaccattgttgttttgagaaaccttttttttttgaggtttcttctgggttcagagagagaaagagagagaaagagagaggaggtgagaaagagatgatggggaaagttaaaagagctttgaacgaacattaaagtacaatcctcgtcaaacactcctattggtccatttttacttactgagtttcccatataaacccttggtggtggtcttttgttttctcgcctttgaatcatcatcacgccacagttc

SEQ ID NO: 32430 - DNA, 549 bp, Arabidopsis thaliana landsberg
aagaccaagaagatggtgatgaacatggcgatagcaacagagtttacagattttcctcgtttggtatctactgcaattagagcttggagttcgcagaatgcttctgatgttgaacgttgctttgatgttcttcgatacttgaagggtttgaatctttctgacataaatctttcccattccaaagtgatacttcccttggagagtctgagagatcacgaaaaccctaagatacgaacggaagctcacgtcttgttcacttcatggatgaagactttttactccagcggacaaaactcttcttctacttgcaacaaacctaatcccctgaaactgaagaaagttgttaaagcgtgttcggagttgaagaagaagaacgacgagcaactatctcatggttttgcggtacttaaggctaagaaagagactgtttttttggggatgaagaagaacgaagatgagagatctagggttcatgaaaccagagagatgaaacaaattggtgattccaagtctatcgcattgatgaggactatcgagaagaagaagcaa

SEQ ID NO: 32431 - DNA, 2352 bp, Arabidopsis thaliana landsberg
atttaatattggttcaggccatattagcacattagccatttgccattcacgtggggtccaaaccttcttccttctatagtgtcttagacaagtacgtacacacgcttaagtacaaatcatatacaagtatttattcacttaaaggtacaatgattgatgttttttgtgataacatgttcctctagtccactatattaatccattacggagagaactatctaaaaattgtataatcgcaattgtaaattgcaaatctattaacaaaactaagatgtgttcacatgcacacttcgataaacattcttccatatatcttttgtgttaaggcatgttttaaatgatcaaatcacatattgattttatttgaaagtatatcaatataataaactgtttagaagatgttttgccaaaaaagaaaaagatgttttgttcttcttggaagtgtttgttaaagcccaagagagacttcaagctcacaatttctcaaagatccattaatactgggccttagttagatataccaagcccatatactttctcttcacaaattcccgttctaacaccggcgcgtcgtgaaatctagagattttgccgtcaccagaatatgttaataaacgcaggaggagataaatggataaacccaaaaactgacaagtgaaaaccttttgaagccaaaaaccccttcaaaatcaagctccatgatagaaaaccctcttcctacataatctcctggtaaaacaaaaaggttagtctttttctcctcaacttcgagtgtgaagcgtttgtaaaaatgcccaaaaaaatcgtaccttggttatggacaattgttgtatcaggttcttcttatctgggttttattttttgtactagtttgaaactgattctgagcataattgaatcggttgtttttgtaaatgatacagtgagaagtagaaagagtgtaaatggcgtcaatatcaaccaccacctggctctaccgaggtcaagtatgcacagacagtggaaagtccagtaattgtattgtgcaggttggttcttacacatcaagtttcttgttctgatccaaacttatctaatttagagatagtgaacattttagcttgtttcaagatgtcaaactggtaaaagtttgtttatgtatgtagagacgggttaaatgtgggtttccactcaagacattgcatgctgggattacttctagggatcggtctttgcgacattgtatcaaatgcaagaaagaggatggagatggtgatgtaagtgaagggtctaagaagagtgaagaaggatttgagtatgtgactgttgagaggcatccttaccatagttatatggattcaacttctgggaagcttgagccagcgtccggggctcgggctagtattccaggtgaggattattggcctgaaggaacttcgagccgggttagagctgctagagctcctcaaccagctggtgagtcttcgagttttccttcctatggaaagaatcctggaagtaggagaaagaagaataggaaagctactgaggagaatgtgactgttgaaacgaatgacgaagtatccgattctgaggatagctctgaagaagaggaaaatgattcctcggatgggtttgttacctataagaatgaatttgagagagaagaagaggagactggttttgaattagacaaaaagcttggaaggccacatcctttcattgatcctacgaaaaagaaacaaattgaaaagacactcacgagcgatgaatcgtggtggaactggaggaaaccggagaaagaacaatggtcaagatggcaaagaagacgtcctgatgttgaaacggttagtcatcacaatgatttcaggtttaaacatgtgtgtgtttccccaatgtttgatccattatggtatttttttttgttgttgatgcaggttttcctcaaggcaatggcagaaacaggacaagtgaagctctatggggaagaaccaacactcacagaaacttctctttatagagcaagaaggcatcttttcaaggaagagaggtatattgatctaacgaactttcaagtgaaaatctgttttattaggattttctttcgagttttctttctctcaggctgcaagctgagcgagagagattagcgaaagaaggtccaatggctttttattctgaatgggttaaagcatggaagagagacacgtcaagagaagctgtacaaaaacattttgaagagacaggtgaagatgaaaacacacaactgattgagatgttctctcatcaaacagatagagaataccggataatgatgggaactgatattaggatcaagagagatccaggggatcctctagagtcgacctgcag

SEQ ID NO: 32432 - DNA, 1634 bp, Arabidopsis thaliana landsberg
cttaacggggtcaattatggaaccttaaaataatatctaggcatccctcttggaggacaaccaaaaaatttttattttatctcctctgtagagaacaaaaagatgaagtctagttggtaaaaatttaaagttttcgtgttaatattaggttgaaaaaactatattctgttaaaaaaaaaaacatacacacaactaattaaattggacctacagtttttttttcaacgtactacgtatttacgttaggttagattatgattgatcaaacgggttctatttattaaaattaaacaaatttaattgatacattaatgtgtcacgagttcaactaaggaattaaaatactgtgcatggaaatattgaatttgcatatactgtacacgatgagaattaaataaatcaaaatatatatatatatatatatatataccccagcctcaatttgaaggggacaggttattttatttcaaatagaacgatataaatccactgtatatctattattttttaacagaattggacctacaaaaaaaaatctgaaattgttgtatcgaattgagttggtcagtcagaatttatgattgatcaaaccaggtcccattcatcaaaataaatgatatttttagttttgggtggtgttggaggaaatcaaaattaatgaatatacaatgtactagaggcattcaacatatttaatcggatatattaatgaattcaaatatattgtttccatgaaaagaatttactatttagatactaatcgataatcatactattgaacttcgatattcacggagagaatttatagaatattaaaattttgggtaaggattagctccgatttgaattgtggctgagaatgatatcggttcatgctggtcaaacaagtcccatggtttacttaaaaagggagaaattagcaaaatgggtgaaatagtctgttttctttaaaaattataatttatcaaacgacacatatataattactttttatcttaaccatgcatataacacataaaacacaaataaagttttccaaaatgtgatcatagagtaattatgtatatacacatcaacaattgtaagacaaaacgaatcatctcataatatagtaattaaccaataatgattagcatttgatgtataaaatcaaaattaattaattaaattgcctagagatataaactaaacaagtacagtatttagcttgaaaaatgatatttatgaacaatcaatatatcacatgttgcctgtcgacaaagacaaatgtaaaaaacaatcaatgacctttaatttcatcattttgattgtacttgactcgagttttttgtctaccacgttttagcgtctctttgatttattattgattgattcattcatttataatttctcacgtttcaaaaatgttactagctggctaagtttatgtagctatattcttttaacctttagtctcaatgcagattttaccaaaaaaaagcaaagaaacaatttgttgaccaacatccactaccaaaaaataaaaaccactatataagcatgccccatgacccctatatgacaccacgagaaggatatcataatccgttactctccgtctcaaatggtggttgtgattaccgcgccattttatt

SEQ ID NO: 32433 - DNA, 2667 bp, Arabidopsis thaliana landsberg
ttattcagtgatcagacaatataagctactcaatgtaactataagcctcaatattataactttcaatatattttgtaagattccaagagccttacttgtccagaatgtataatgtggtgttctcaggatctttaaacttcaaagaaagcttcttcaggaaaccaggcttgtcttcaccgttataaacagtagaaaccgcttttttacccaaacccttaatattaggactgcccacttgtctgaaatcagcagtagctcttatgtcaagcaactgagcattatcatcagtacccaacttggtataagcattcttagcagactcaactccccatgatttgggcttcttgttcagaacctgagacagaacaaatggaacagccaatgcagcaactccaccggcaataaccaaaggattgtctgtgacaaaattggatatcccttcaatcagaccatccgaatcaaaagatgaagaagtggtcatagattgttgcagagcttcctcgtacgtcagggatttagcaggagctgttgcactgcttagaacagaagttagaagagccaatccaccattgaatctcttcaagaagctttcttgggagattggtctctgtgattttggtggaaagaggttagggagcgagaaaggctttcgtggttctgatcttttctcggataacaccgacatagggctaaaagttgcggttttcagagcttccatgactctctctctctcagattctacttctacaccaagaattgtccactccgtatcatcaaacttttcccaacgattaaagatgatgaagaagaagtggaagaaaagtgtcaaggacaagagcattgagccgtttctagagagctgacgtggactgtgtaatcaatcctagcctccgcttgcttgacacgtggaatattcggatgagatacctcttgatcatgttttggtgtagaggactaaagcatagtgacttacttagtccgaaattgcatgtcaaatgtgtggccagagaatattgaagatgcttcaagagaagcctctgcatatttaccaaaatgtcctttatctagaacacaaagaacagagactagactagatacaaaaggttcctcagcatttgatttaagtgaacaaagaggatcaagtataacattaagaaaacataacatgatgcaatgtatggaacttacaatagatcaaagaaataatctaacccttgtccgatttcccagattgaaatgccgattccccagagacgagcattctcaagccgtagaaggattgacatcaatgtaggatagaaaacagcatgcttgatgttcttatcatctctatacatgaaaagatgttcgccgctctctttatcccaacggaaagttggcttgtgtttctggagtaatgcgaggtaatcccttccggtgattgctcctccacctcctgaatcttgcgcaaaagaaaacagtttatgtcagttggttttgaaagaaaggcgggaagagaacaagttgcttatataagcttggatgctttatatacctccagagattacaaaatcgttgccgtaaaagttgataccaagaagaaccttcctggctatgtttgagtctatgttgttggatgacccaagcaggagcttgagagttaaatctatccacttgacaggagcattggggccagggttctggggatttgagaaatcataggtcataagagagaacccatcaaccgaatctttcaagaattgaagatcttctggcccaaaatcgtacatttggagcttctctgaacgaggcggaccaacgacatacatgaactgcatatgttgctggttgtttcttggtgagctcgttgagtgaagagcgtctccaagttgttttacgaatttcagtgcctagaagatttataaaaaagcttgctgacatgatgcattatgtggaaaaaaaatcgcagcggcctggaagagattacagggcataccattttccgcaaatcagggtcatgcaaaacgccataagctgcccaccttgaccaagactctaacacgataccattgtattccatttccctagagttcaaggcaaacatgatgacaaggtaagtgttaaaattcacaagctctaatgtaaagaaattcatccttttcagagcatgaaatatacaggaattgtagagctttgggagacccttacttgcactctgtgacaataagactgatagctttctctcttagtttttttttgttaagcatctccccaggaattgcttctagaacaactcttggtaatatctacataaaaggggaaaaaagtccagacaatcaaagaaggaaaaacaagttaaacatcagcattttccgggtaccgatctctggccaattcagagaaggaagaaaaataggtgtgttggttaaactaccagtgcattgcctcttgaccgaagctcttgaatccatcccttatcagcattatgtctcccttccaaaaccaatccagacccttggctaccagaaacagaaaccaaaaatgtcactactattttgtggaaaccatgagataattgcaggaacttagaactcattaacaaatgtatacaatatacctcttcaagtcgaaccataccggcgataaatgtgtaaactttgagttgaatatctgtgccatatcatagac

SEQ ID NO: 32434 - DNA, 2134 bp, Arabidopsis thaliana landsberg
cactattatgggtgcagatggttgcatatgaatgatgatctttttagttgtaccaatttttagaaattgtagttggtgaaggtttcgtggacaaatcttattgtttgtagaaaaacattttctgataacataactttacttgaacactccttttcttctagatagatcttattcgactcataattggtgtaagattcttctaattttagcaagatatcattgacgtggtagttaccatcaataagtaaagatcattgacaattacgtggagccaatagctactgctaaaaaagaatgtttgttatagatcttaatatattaataagaacagtaacataatgtgatggaacatataattggtgtcaagacataaaagatgatttccaacaaagatattaagcttttacacgtgtactttgggtaaggaactgtgacaaaatacgatgaggctaattatatggatactttgttgatatgaatctagaaactattcatagcctttttataatgcattgtaacaaattagtactttagtctcgtagtaaccaattattggaaatttaaacataacgtctcgcaaaagagtatcttttaattatgacgaattcgtttctgttaaaatcagggtttttcattcatgagttatcaaattaaaatcttttcgaagatttctaatacgaaagtacaaatacttttttttttttaataaaaaatttaagtacaaatacctgagagattagatgttttgaaaagaaaaaaaaaattcacaagttttattgcggtttgtatccctatcatttagcatagaaaaaggttcaatatctgcatatatatggtagatttgaatatgttgtaaaatttaatttgtctccctgtgttcacttgcccacaacacgttgcaaagtgttattcatatgatctggttttaaatgaattgttataatttcttcaatcaattttggtttcagtaaatggaaaaaaaaaaaacaagaaatcgaattaatattgatttagttaccaatatatatttgataaatttcaaagaatttaagaaatctgtattgtgttcaattttttggttccgtttagtttggtttctacgagcttcttatgattgctaataataagtaaacaagttaaataaaccctttccaggataatgagaatctgtcaatcagatacacaaagtcagtgatatctcgcaagcaaatcatctcaaaactcgtgcacttctttatacgtgtcataacaaaggaatatttttctttttttgataagatttggaacgtgagaaaaaccatgtagccggcagtttaaaaaagattttcgtaataagcaacctaaaattgatgattggataatagaagggactatataatatacagttgaggaagatctggatctcgttaactaccgagaccattttaacaccgtcgatcattttaaatttgaacaactcgaaaggtcaattgataatgtggcaaaaccggaggcaacagagactatgactcatcaagctttctcaatttgaccaatataataatctgacaggtcagagagccacagatttgtcagtaataatcggaccaatgaaatttaaaacatcaattattgctgaggttttgttggttgatgacgtttcaaaaaccattgctatatatataggcatgtgtagggcaagttgaataaaacagatcgatcaaagaagaaagaacacaaaaacccttaaaacaccttatatcaaaacacaaaagatggcgaatatgatcattaagaaacagttaagatctataagtttaccttctagatcacaaccaagcacaagtgggctcgaagaatctcttaataagattaaaacaattaacaccacgacgggttcatccgagtcgatcttgatgggcttggctggtttggaggagctctacatttttctggaggagtttctgaaaatgggttcaacgcaacgggttatgtcctctggtgggtcggaattcatggaggaaatgcttgatggttcgttgaggctgatggatatctgcagcgtctcaagggatctaatggtggagactcacgagcatgttcgtggcgttcagatcatatgttagaacgaagaaagtgtctcgtgtaggaggag

SEQ ID NO: 32435 - DNA, 811 bp, Arabidopsis thaliana landsberg
  unsure (1)..(811): unsure at all n locations
gattagggggatatattcgtgatctcttaatggttgtccttacttcttatttatgctttgtttccctaatctttatgataagttcctaagtccatgtctatcttgatcgattcttgtgaatcatgatttatatattttaagttaatcttgtttcttgtttgcgtattgcatgatttttttttgttccatttcggctgtctttagtttagttactgtttagtttatctttttttccgaacacttaattttattaatcaatctcagcggaaaaaaaaaaattctctttagtttatcttatttgacaaagtattttttcgttgacagaattttttatattttatcttggagaaactatttattttcttccttttcacttgtgtggtggaatatatagactagacanagaaggacatattgtgagtaagtaggttcacaatttgacaaattcaatttgcttatttattattattttatttttgataaattcaggatttgacaaattcagtttgtttatttattattgtttttttttttgagaaattttccatcactttggtttttagtaccattaattgtttacataaaaatttcgtaaataatatgaatttcaaggctggttaaatttagtgctattttgtttaagttcagttaatttaaactgaatttggcaccctattttttttttttttcctcgaaacaacaactaaattttgcttctttttttttaatataaaaaatggccgaccaaagtcacacaaattttctaattacactaatggccataatttagagggctacattttcaatgtat

SEQ ID NO: 32436 - DNA, 211 bp, Arabidopsis thaliana landsberg
ccctgacaaaaaccctacgagcaagaaagaagctgaagctaagttcaagcacatctctgaagcttacgacgtcttgagccatcctcagagacgttagatctaccatcagtacggagaagaaggccttaaatccaccgatttacctactgcggcggagacggcggcgcattaacagcagcggagctactcttttagcaactcttgattttgg

SEQ ID NO: 32437 - DNA, 419 bp, Arabidopsis thaliana landsberg
aacaactcgccgtcttctcgagaaacatctttcttacttcgcttcattacaaggttcgaatccagctgtctctcttagtatttgtctatgtatctgtcccgtttctctccttacattgatttatgtaaaatcagaaggctttggcttttgaacgtgattcatacgctttgtcgtaaatctattgcacatctgacgaaaccacatcggaccttgatttagatccagactgcttcattaacattaatttacttccaatgtcataaatcatctcttatcagtcaccactgtcacatgtttctaaaaagacagattgcgatatcaaactccgacgaacgttatggaaacgactagatctcttaatgcactagagtgtgctctgattaccagaagttcaacccctatgctccaatcggactgat

SEQ ID NO: 32438 - DNA, 1112 bp, Arabidopsis thaliana landsberg
caattattatacacatattaaactctaacacttaaatttaattatattatatatatatatatatatttgaaaggtaatttttatctaaaaaatattaaacattaactataaacaaaaactaagaataaaaattgcaaaaaaacttaaaatatccgtgagaaaatatcccattaataaaattataaaaatattaattacttaatttaacaagaaaatgggatgaaaattaacctgacaagcccattggcactagccttgagccgttctctgccccgtttgaacacgaagaaactcgatgagttttggatcttcttcaatctcacagtaaagcccattgacaaggcccattaatgcgagtcgtcagccgttctctgctcccgtttgtcgacgaagaaactcgatgagttttttctgcatcttctacatcgtcaactgatgctcgtccgtcgctttcacggtccctctctcaatcgtaacgaattaccaataacaaggtgaaattaattcaaagatccgacctaaaaatcgttctcgattaactggagaaagaagatggaaatcaaatcacgaaagtgaattttttgaagagatcatcgacgtacttacctcaatatcggaaaggatcatcggcgatcctctctataagaacaaagaacttgaaagatttagggtttttttctgtttggaagaagaagaaggagcgtgcagaaattttgatttctcatgaaagaagagatgcgtgagccgacccttaaccgttctcgattaaccggagacagaagatggagatcaaatcacgaaacaagatgctttcctccgatcaaatcttacggatagatattgagatgaagaatgaagttattgagatcatcagcttatgtcaatatcggaaggatcatcggcgattctgtctataagaacatagaacttgaaaaaattagggttttttctgtttggaagaagaaaaaggagcgtgcataaatttttgatttcttaatgaaagaagagatgacggttatctttcgactgatttcctttttttgttctttctgactaggttaacgttgtttccttttattcaattctgatgtaaaacaattgaaacgttatta

SEQ ID NO: 32439 - DNA, 1230 bp, Arabidopsis thaliana landsberg
gtccggctaataacggacgttggagaaagttgttaccaaaatggaagtgaagaaatcatagaggaagcaatgcttttcgcagcttcaagagaagttgaagaagaagaagacacagagagcttagtgacattaagctcactaatgggagaaagtccaaagagaagtgagaagaaggtactgatgagtgtccgtaatggttccactagaggggtagcgatagagagggacgttaacaacgcacattgcttttcgtttttaaatgtgtttagcttttggcgggattgacaatagaaacttgtgcaattatgattttaataagtttttaagcctatccgcaccataatttgtatgtaaaccatgttccttcaatttgactatctaaacctttttattatataagctgttgaaaaaaaatatacttgtttaacacggcgcctaaagaacttgcatctttttttttttttttcacttaaccctcacgaaccaacaaaaatacacatgtatcttcttttttttttatataactttttttagtaacccaaaaccccttatcttttttatttaaacccaaaactgcaaaacagataaatctctttaggaagtagtaaagaaatttcaggtaaatgttgggtacgttaaaatgatgttctttatacaaagctttcaatagttctttatgccttttattttcatctttccactatggattctggctgctatgattagaaaaacacactcaaataaaacatatgattttgaatcttacaacataacatcattgaaaaacaaaaaatgaaaatttacatttttatggaacaatgactcaaaagaaagaacaaatttagtcatgcaacacaagaaacattcaaaagacatatatactgaatttggtctgctgaaatgcaaaacgaaatatttactgattgcataaataggtcaagttcttaccacttttggatttcatatgagcagattctgaagtggttaagaccttttctatattatatttaccttgattaacagcaatcacctctttgttgctaagcaattcaaatgtaactttgtccatcgatctaagatcgcagccgatcagcagaggagcctgcaaagagagaacacaatccaacattggtttaagtaggtatacattcattctctgcttagtttaggtcttttaggtaaaacactattcatacttttgccaatgccagatgctgaaatgcgacatgt

SEQ ID NO: 32440 - DNA, 626 bp, Arabidopsis thaliana landsberg
gtctctactgaacaggaggattcagattctagttccagggtttttttttgtttgcctggaagagttttcttggggaagggttctgtatggactcctgatgtgaggtttttcaagaatgaggagtatccgagagttcaacatgctcaagactgtgatgttcgaggcacgttagctattcctgtgtttgaacaaggtagtcagatttgcttaggtgttattgaggttgtgatgactacacaaatggttaaactaagtcctgaccttgaaagcatctgcagagcacttcaggtttttgtttcttttgcttttgtcgcctttgtctttgaaataagctttcttggaaccttttaggcattgtttaatcatcttcacaggcagctgatcttagaagcacagagattccaataccgccttctctaaaggtaatgaagttttaaaaaatttcgctttttgcttatcttcgattagcttacttaacattaagccaaatgcttctgaaatcagggaccagatttctcttaccaagctgcattacctgaaatcagaaacctcttgagatgtgcttgcgagacgcataaactaccattagctcaaaacatggtcttatgtctcaacaaagcaaactg

SEQ ID NO: 32441 - DNA, 825 bp, Arabidopsis thaliana landsberg
aacatttcctttggctcctcgaatataccctaaagaaatgattgctataatattatagaattatgtaagtttggtcaacaagttattatctacaagtgagttttatatatatatatatatatatttttttttttttttttggtagagactagagagtgagttctatattttaactatagagtaagatataattttttcttcatcttaagagggaaattaaatggggcattaaaagaagacttattatgacatcttacaaaaaaagtaagcttggtcatatgttattaaggtaatttcttagaatttgtttttttttttttgtgttgaattacattacaagttatatccaactctctttatccaagtggctgccagctggaatccacttgacacatcggtattctcgtccacgtcaggtcagtctaacgtcttattaaccgccacgtgtctccctgcggccactcacatgtctcaaaacgaataaagggaaaaattaaagtacgacttttcactgtccaatattcttattaaccaaacatatagattgttgcgagttatttttcattcgggactatgatattcgatcttgtttttgataaatgatcacatgttcgattgttctacctcaattacattatggtgcaatggacaaatttttacactactaaacttttgaaagcgaaataaaacatatatacttgaatctaatgactaaatgtggttattgcgtatgtaccgactgtacaagaaaaaaatgagtccaaagctgctttgaatattctaaattagaaactcgtgaacatcatttgacgtacaagcttgaag

SEQ ID NO: 32442 - DNA, 576 bp, Arabidopsis thaliana landsberg
ttaaacttaaatacattacgatacaagcacacaacacaattaatattaaacacacatatattaaatctccttaatctcggacattccaaattttgcgtaggattattgttggaatttggtagggaaaaggaaagttagtagaattttgcctaggattattattagaatttatttcaaacaaaattaaggatataaccaagagtttatgggggaagaataagaaaattatagtagaaatgacagttttttatttgtttgaatgaaatgaacaatttctctatttatatagtttaaaagttataaattttcatataaatatatatttttaaaaactttgttttgtatgtaataagtgattataaatagataagatgaagtcaaaatctcaatatctaatgaacatatagcaagtgtcagcatctcaataatctcttcatttaaaaaaaaaaaaagtttgggacagttcactcttctttccacaccaccaccaccaagtctcaaaacgtatcaggagaccaaaccgacggcttataatcatatgctacttcttgccaaagtcgaactccgggatgagtg

SEQ ID NO: 32443 - DNA, 1211 bp, Arabidopsis thaliana landsberg
tgtttgatgatagataccacttcaaacaagcttttaaaaaggagagctgtttcggagactttgatgaaagggacttgtgctgagagtgttggtaagaagagaaagaggaacgagtatgatgatagttgcattgctagatatatcggtgctgtaagtaacaatagaagagggtctagtgacaatggagatgcatgcataggagaagagtcggcacaagcaaacatttctaaatgtgttgttggtccaaagtttaacgactttagtaagctgagggaagaagcaaactttaaagttggtcagacctgggcgctttatgatacaatggatgggatgcctagattgtatgctcagatcaggaaagtttcagctccttgttttggtcttatgattacatatctagagccagattcaaatgatgagaaagagctccaatggtttgaaaaagacttgcctgtttctgttggtaacttcaggcttggggaaaataagagcacaaaagatcgttcaatattttcacatgttattcaaaacaatgaacggagcaacgccagttgtttcagcatcacttgtcgtttcatcagtacttatcattttagtgtatctcttagattttgagagacttgggcgcttttcaagaactgggatattaagtggtctttaaaaccagattctcaccgcaaatatgagtatgaatttgtcaagattctgtcagattacgcggatgaaactggtgtatatgttgcatacttgcataaagcaaaaggatttgctagtgtgttcttccgaatgggaactggttatgaaggtatatttcgtattttacctcgcagtttgtatcggttctctcatagggttccttcctttaaactgactggaattgaaggaaaaggtgtgccaaattgagctggatgaagctgcgttacctgaaacaatcgaagagttcatcatgccttcaaactctgagagtgaaacaaagtctgaacaccaagccatctactttgctagtgagggaaaggtctttcaaactggccagatctggtcatttcacagtggttatgatgatttgcctctatactatggtaggattcagaagatcacttttactcaggcatttaagcaggatccggtaattaaactacacataagccggctaaaggctactcgtttccctgaagatgttatcaactggaagtacgggggaatgcctgttg

SEQ ID NO: 32444 - DNA, 455 bp, Arabidopsis thaliana landsberg
cagagcgagcccaagtgaaaagattggtcggccgtaagtaatgacaataacaatacccttgattttgggtttaattacattcatgccaccgtggataacgcgtttggaggaggagggagtagtaatcatatgtttccgctacaggatatgttcatgtacatgcataagccttactagaagggaatttctttcctgccgccgaaacgcaatgcaaacgaccctcgtttttgcgtttatggcacacgagaccgttttttatggtcaatgagtgtgccgattcggccattagatttctgttcagtgttcgtttattctatagaccgtccgatttcagttcatctctaatcggacggtggtggttggatgtatcagtagtgtattcctgtgttaggtagaagatagtccgcttgttcgtaaattggcataaaagtcccaagctaatatgtttgtgccgc

SEQ ID NO: 32445 - DNA, 185 bp, Arabidopsis thaliana landsberg
atgttactgcatgatgaacacttcatacatttcaagatgaaacttaaaccaatgggtcaattacgaggaagactcttatctactagattatcagtaaccaaacaagaaacccacaataagagattgatcactatcagctcaatcatgcaaactttactaaaatcctagtcgtgagaacagataat

SEQ ID NO: 32446 - DNA, 797 bp, Arabidopsis thaliana landsberg
gacaaattaaaccttgaccttgtggtactttaagcatcaagcttttgaaactcaacaagtacggatggatatgttcactgttttaacattgacatacttcattgttcatacttgtattaacttatgtaaatttctttaaagttatgaaatactagtattatgaaacagagaaatattattaatttattggatcacacaggtgtactttttagcatttattatgtgcattaaatgggttgagagtagaggtcatttaatgtttggacaaaataacaggtgatagttatctctgagatgcggatgttattgtgaagaaaacacacaaattatgcctttgataagtacagtattaactttatcattgatttgtatgtggaacttattggccttaaggggcggtcgtgttggagacatgacaaattgacaataggtaaggattttatctaatggatggtccaaaatctacattcattctagagattaataattatatttggactatatagaatgacaaatcaattactggattggatgataagccaagaatttttctttggggaagttcaaactaaagttacagttttaccaatagaaacaaaataaacttataccgaaagacatttctctctatatatattgttgtaattgtgcatgtcatcagacaaatgaagaatcctctgaacagagaaaaacacacaaaaaaaaaacatattagagtcaacacattgatagaaccgattgtaatttttttggaatctgtttctctataccgtttattagatttccactccttgatt

SEQ ID NO: 32447 - DNA, 1035 bp, Arabidopsis thaliana landsberg
cacctgaatcaacaatttatgggtcgacctgaaatatattttgaaaatttatttactaattctttttttgagggagaattgataacaaactttagtgacaagtcataatcaaaatcagatgactcatcattttccaattttcctaggacagtggatttttcatatggaccccttaaaaaataaatatattaataaatatctaaaagcttttgtaaccgttgattaattacttaaaaactcattagaagcttgattattagtggaagacagacaacctttgtacttaaataccttttatgagttttgtctgcctctaatttactctttgctacacgcttctagatccctcttccttcgtcaaaatctcatttttcttttttcttgttgatattgagaaatgacttaatcctatttcgtctccttcctcaattcaacgatgcttagggtttgccccaaaattatataaactcgtcgatacatacaaagctcgtgactagaattcgtttcttcaagagtaaagcttcctcctttcttctcctctgttttcatctctctgaaacaatggaaagaattatgataaatccattgttatcaattcaaaactccccaaccaagttcttgaaaccaccactttcgtccattcacaggcaacaacaacaacaagagaggcagagcaataacaatacccttttcatgggggaagccagaccaagaagagcgaccacattcgcatgtctctcgataaggagaaggagaaacaacaatggtgtgtctgaatttgaagaaacggcgaggtttgaacaagtgggtggtaaaggaatctcggttttgtgcgggttaggttattgggtacaaggatcaagatgtttctcatggcttgcacttaacttccatatggttcatagcctcgcactcaagccatcgacgcttcagcttgtgcaatactcttgcagtcttcccatggtggctaaacctctctacggtgtgctctcagatgttctttacattggaagtggtcgtagagttccttacatc

SEQ ID NO: 32448 - DNA, 588 bp, Arabidopsis thaliana landsberg
tttaaggccctttaaggttggagaatccttagttaattggttgttttcttatatgcagaggaccccaataatgatccaaatgctactggagatccatacaagacattttttttttcaagacttgtaagctgtgtttgtttttttctgactgttgaatgactttggttagacatctgagttatgttgtgcttaactttggtctgttcttgtcttgcagaactacgaatcctcaaacagtaagattaaaagggactttgaatcttatggaccaattaaacgggtaggttattctgagcattcccttgctggttcgataagaatttgtgtaatggcttccctctctagagctctttgctcaatttgttttattttatctacaaaagtcttccaaggttagaatctttcagtcccttataaatttgcatcttttctgctagaccaaaaggccatcctacatttgctttgctgtgcatgccttctttagactgtgtaaagccatcaagtctcttatacctttctcaataactgaatatatagatgcataagtgcttctcatataatgacacaactactctctccatggtgttt

SEQ ID NO: 32449 - DNA, 3832 bp, Arabidopsis thaliana landsberg
atttctgcaatcctccaagatttttctcacttctttcgttcctcctcccagtgacaatatatttgtaatgttactagaacaataaaaagattgatatattagttagagaatattgtcatatatctaagttaatatatatgtatggttattagaagggaaaacttgcttggtgatgatatcgagacgagagtcgagacagtgtatgatgatctcggcgatgccaacacggtctgcatgaacggaggttgggtcggattcaagacattgcatgcaaatggtcggaacttgtgcattatggcattcctctttcatcaggtccttctcggcgcaaatcggagagatcacgagcagagctaacaggagaaacttgatcattatcgtcattatgcgatgtatatttcctatgattgattatgttatatttctttgaggggtgtgaatttcttatttgtactaagaatatgggactgggaatgtggttggtcacgagtttatctatccttctcaaaaggaggtagctctattgtttacttacacaagttttaacatctattcaattttaccttttgttaatgttaactgaccattcaaacgcgagctgctcttcttctattactccatttgggtaaaataataaatcatatggctccaaattcattttcacaaacgtgttaagctagttttccaatttggtagttagtttagctattattgaaacatttgcaaagcactggaattggtaattgtattttataaaatggaggagcctccttcacggttgcaaacgtcaaaatagtgaaaacctaaacaaacttaagatattgccaaaccttgaatcgtttccagaccaaaacaaaaattctccgatgttcactacgaaaaacagacgacattaatttagctcaaaaaaaaaatacaatacagggtttgttaatgttgcatccctttctattcagcgctcttagacttcttcttcttcttcttggtgctgtgaccatcatcagtctcctcttctcctccagctttactcttctttgtcttcttcttctctgatttctcgttctcctctgcagtctccatcttcctcttctctttcttcttctttttctctgacttgtcctcctccattgccaccacctcttcttcttcttcaccctttgccttcttcttcttgcttttcttcaccgaggcatcaactggctccttcccttcctcttctaaaggaggaacagataaaaaaacactgagtttgccatcataaagaggactctgattacaacaaaaaaaaaacagctacaagaaataccttgctttagattctctatcacctccttcattacatccacgttcttgcgtggggcaacacctttgtcataaaattctagcctttcctcaacttgttcgcgaagcttctcaccaaaagcagtagttgcaccatctgcataggacatcagggcacataatttaacactttcacaacagaattcataatccaaaactcttcttcaaggagtttcagatttttaccagcaaaacaatcaatccgggatgctatagagcacttgtttgcaagataacgagcgatacggcccttgttcttagcagatgctcggccaatgaaggaagaatggaaaatcaatccatacttgggagtgtttccacgtgttttaagtgccctgaaataccacagcagttcatgtcacaagcagcactaaaaggaaactggtgaacattaaaaaatatagtgccagatattgcacctgaaaagagccttctcggcttcaagaatctggagggtggaagatggggcatttagcaaggttagtcagacttccagcatgtgaaatcaaacgggcaccgaccatttctccaatcaaagcagccaaattaggggcaatgtcgctcatcttagtgacaagataatcatagagcttcttcctgtagtcagcaaggtccataactttctgagcaaaggtctgtacgttgattaagtcaagcggtgataaatccgagcctgccaatagggaagagagtaaatgtctcaggacataagttaacagaaacacacattaactcaaagctaccaaaaaagtcagctcaaaatttttacccatggatgcttttccagcttcgatgacctcctttgccttatcttcatcccctaagacttcagtaagcattgggatgtgatcttcagtcaacttagacttgtcatcaatcatctttgaaacacgggcgtaaagatagttgtcattgactatcttcactagttcggggaagtgccacgaataccattccctgtaataacattataaacagttcagctaccaattttctcgaggtaaacacacaatctgaaagggaaaagcacaaaacaaacctgactctcatggcaaaggaattgatatccttatcaagcgtgtcaagcatgaagatagcttgaataaccatgttatccactcggttaacattgaacttcaccttggctctgctgtagctgtgagctaatccaagctgagatttttcaagatcaccaggctacataaacagaaattttttatgagaacacaaaccatatgagataagcaaacagacaagaagattttaaacacatagaaaggagatcacacctttaagtccttgataaacctatcaaaatgctggcgaacacctctgagaagctcaagaacaaactcattgctctggcatgggattttagtagcttcaaatatatgtgaaccgagtttaggctcagccaatcctaaactgaacttgggtttctttccctccttgaccttaggaagattcaactccagaaaacttctaagctcatcagtcataacacctaccaatatcacattaaaaccaattccaaaaacatcaatgacaaaaccaaaacaatgaaacaaaaacagaacacaaaaacaagaatcaaccataaattaaagctctttctacaatatatccaggaaatttgaactataaggttttaaatcgaagtgtctactctagctctaaatacaagaacaagctactcaacacaacacatgaatatacagaacaaagaataagaagagagtaatgaagagtctgaccttcagagacggcgttgacttggttgagagcatcgagagcagactcaaagggatgaaacgctgtgagctgaacaacacggccaaagcgactgaggtcggagacagaagtccgaaccgcctcagtgttctgtccgatctcatctagtccgtgaacctcgaagagaccatagccggaagaagactcgtagataacatacatcgccattttttgaggagaagaaactaaaaccctaaagacctactgagcgagaagaaatatacaacgaacgaaactagggtttcaggggtttaataagcgcatctgttgatggcgctgctcttgacaaattcaatgggccaggcccatttaacggtgtgttagttgtactagcttataaaatgcccggcccatcacaacaggttaactttcttttttttttgttttgtttttttttggtcatccttgcaagatatcaaaagtttgttacaaagattgaaaaattgtcaactaaaatattattattgaatctgtttctccacatacatatatagaagaaaattgtcatcttccatatacaagcatatcaaattatagaggatacattgtcatcttccctcattgatcttggatccaagcattggcttaaagtcgctgtctctgggtgatatctcggagccaggcgccacaaggctcatggaatagcctgttgtgtctttgatttgaaatccgctgagagatgagcctgtggtgtcatcaa

SEQ ID NO: 32450 - DNA, 5084 bp, Arabidopsis thaliana landsberg
atcagcctttccaaatcctagccaattcaccaaaattcaagttccaactcttctctaaactcttagctctaagcaaattcatcccttgagcataactacaaatcttggaagcatacaaagcttgcctaacatcatcaaccaatctcttcttatcgattccactcgacgcagaaccaatctcttctttcaatccagcttccctcaacactttcgctgcattctccctctcatctttcaacccactcaaatacctacaatccaacgaagcagcaatcgtcggagctgcaacagacagttccgccgcttgctgcaccgtccatttcccagtacctttcataccagtcttatccagaatcttatcaactaactctccatcaccaaactcatccttaaccctaaatatatcagaagttatctcaaccaagaaactctcaagctcacctgaattccactcagtgaaaatctcagcaagctcctcgttgcttaatccaccaacgttcttcaacacatcataagcttcagagatcaattgcatatctccatactcaatcccattatgaaccatcttcacgaaatttccagatccaccttctccgatgtaagtaacacaaggtccatcttcaacttgagctgcgactttctccaaaatatctttgatgttatcataagcttgaaatgatccacctggcattaacgaaggaccgttacgagctccttcttcgccgccggagactcccatacctaaatagagcaatcctttttgctcagcttcggagatccgtcgctctgtgttctgataccattcgtttccaccgtcgataatgcaatctcctggctccatgtattcggagaaggcgtcgattgtttggtcaacgggagctccagctttgacgaggatgatgagagatctaggccgttggatcgagaggacgaaatcgcggggagagtattggccggagactgggaggtttccttcgagggcggctcgatctagggtttcgtcgactttggaagtggttcgattgtagactgagattgggaaacctttctcggcgatgtttaaggcgaggttttggcccatcacggcgagtccggcgagaccgattcgggatagtgcggcggactccattggagatagagagatgagcttaggattggttaggtagagagagaaaaatgaggtagtgggagtgatgagagagagtgggtggagatatttatactgtgaaaatgacggactcgtcgatggagccaagggacaaacgaaaacgatgatctctatgttttccaaaacggtatcgtctcgtctagaactccatgttaacaaacgttgccgtttttgtttcaaatatgattctaatgtttttgttaaattaaaaatgtttacaaatcacactctaacataaaaatttaatcatagcttaaggatttgcttgtcgttatatgcaaatggacttacgaaaattcatacaataacattcgtttaaattttttaatatccaactagtgggctgtttgatttattaatctctaatcatgtttcatatttaatatattttgtaacaacatattttaatactatcaatatggtagtgtccatgtcgaacttggactctacctcttctttttagtctctataagtttttcaattattttacatcaacttgatacattagccttctgacgatgttgaatggtcggacaactttccatctacgatctcaccattatactggattaccaagtatcttcattatatgatgataagagactaaaagtggatcaattaaacaagacagagtttatcaatgagatggtgtttatccttcataacactcgcacatataattacctttgtggccttgacaagacccacccataaaaccttgtgttttagtgttttacagtaactgtaacacacacttttttttgtccacaccgttaggatctgggcatcgtcttcccgatggattcatactttttgcattttttaactttatcattttgatgagaaaaaaggttagaggggttgatttactaaaccaagaaaagtagaaacaatgatttctatgaactcttggatgtgtaatgtaatgatgaataattccaagtaaaaatgaaaagacctgatgaatatttgattatacttatacggttattgaaagtgaaacatatgtaaaagaaattgatcacatgaggttaagagaacacataggcaaagaaccaaggagaaggagattttgttagacgccattttctttattgttgttcttttttgttccttcaaacaataacactatacattgtgtgaatttagccaagaaggaggagactttgaacccatataaataaataggcaattaggcatatagctaaaaataaatatggctatgtatatctaaaaaaagtatgtgaatttgatgaataagcaggagactttgaccatcctgtgacgctttctttcttgtaatcaaccatgtgtcacgaaggagaagttctaaatcttaggtaacaaaaagtgtgacaaaattaggataaaaagttgacaaaatgatgagcaacttactctaattattatcaatacaccaccaaaccaagcaaatattaatatcaattaacaacaaaaggccaatgcccattaacaaattacacataatttagaaaaaatggtgacaatagaaagaaatggataaatggagccacaaactttccttggttataaagttggagtcactcatcaagctgcaccaaccttgccgaagagcgactttcggatctacacacatttcaagaaaagatcatttagaataccatttcaaaagctttgaaaccaataagaagatataagcataggaatatggtactgtaaatataggagagcaaatggggactttttattaacctcgggaagtttattgcggaaggcaacctccaacctcgcatcgagcgtgttttcacacacgattttcccatcacgagaagccaacaccactcctcctgcactgttatatatccacaagtgtcatattggtattagagtttttggttcttttatagtttatagtgttttggtttgatgaaattttaccaggaaagagcatgaggatcatcatctgaaggagcaggaggaaggaaaatgtccttgtctacaataatctcaggagcatgaacctttgctttcttgcaatattcttcactagcatcatccagcatagactcaaccatgtcaagatcttcttcacgacaacggagtaacactgcaggctctttcaatctaagcaaacactacaacacataccccaaaaaaaaccaatataaagaacacatttcaaagaaacagacgagggagctagttgtgcttaagacagaacctgaacaatgagatctttcaagagatgcttatactgatggtgatgatgattgaaaaagccatgttggctaacttccaagagttgcttagctgcttcttctttcattgcattgacaatgtcatcttgcgcttgtagaactttgatcctcgatgcgttcagttgcattgagtaatcactttttacaaaacataataaacagagcaaactcacaattaacaagtggcctaaatcaacaagatctaaagaacgatatgagtcagctcaaaactagcatctaaacgctcaatgccattaaactaggaattaatgagccaaagaggaacagatctcaagaacaaaatcaaacagataagagagacatagagaagtgaaaagagctctcacatcttctttctgacatcgacctgtttctccttcttctcatactcttgcctaatcttcttcttctctgcttcaacaagctgcaatttctcaatgttgaattcctgtcacatcaaaagaccaatcggttttagactcagagccattttttcatgttcagaaataatctcacagaggatcttaagatccgaagatcaatgtaaaacaacagtcaacatattttcaaaagaacaaaccaaaatagtcacgcaattgtcaacagagtcacgtattcgtaaagatcgagatcaaaagagagtggatgtaatgtatggacttacttcttcggaggagatggagatctcgttagccttttcttcggcttcctggcggataaacctaaccatctgctggatctggatggaagcatcggcgtcgttcatcttcgagaaacaaaaaccaaagtctgaggatgaggatgaatggtttgatgaagaagccgtttcgtcttattttggtcaccaagcagcagttattatagtagacccagccaaatcatatttctttgtttttatccaatttgattgggtactagaaccatcccatcacacgtgtttctcgttttatgccaatagaaatattatttattgattttatacccaaaaaagagtttatatttatcattacattttttgaataatgtataatgttttatgttacatttaaagagttaattgtccagaaaaccacaaaatcttaaaaaattatagatttaggtactttcgatatgacttacggatttaggtacttttatttaaatgaaatgacgctattacccttgattcatcaccttagagaaaacaaataaaaattgtatgacttttatgtgttgtcgtcgtcgtcgttatcaaccctcatcatcatcatcaccaacgtaaccaccgacgccatcatcatcgccattaacaactggatctgtctccgtttccatcaaatctctttctctctctgcagatcaattgattttttacaacgtgattgaagcggggctagctccggtgacgatagttgattggttttgtcccttaagatgagctccttcaatggtaacgaacggcgtcggcggccgtgaatcatgagagagatggctcagtttctttttcttttctctgatcttcctctttatcatcagattctatcttagaaacttatcaatgtgcgtttgattttttttgcttgggttccctttataataatcattagggtttagtttttgaatggaattctcttccaataaacaaaatatcattaatggtgaatagtgaggacgcaaatgattattaaaagctttat

SEQ ID NO: 32451 - DNA, 1364 bp, Arabidopsis thaliana landsberg
  unsure (1)..(1364): unsure at all n locations
ctagatcgactgatttccactggttagtttaatcttccattcaaatcaacttccagattcaagtagaatcatcatctacgttaacatatgatgaccaattggtttccgaacactgattccaggcttcttagtatnnnnnnnnnnnnnnnnnnnnnnnnnnnnnnnnnnnnnnnnngtttagactatgaaaatggatttgtatatcttatgttgtgctagttcctagctgttagagctggaattgatctctggatacttagacatgttgttacatgagtggtggtgcgacattgatactgtttttgttgcaggagagagtgagagattcttgcagaaagcaatacaagaacaaggaagaggaagggtgttagacaccattaacgagattcaagaaaggcatgatgcggttaaagacattgagaagaatctcagggagcttcaccaggtgtttctagacatggccgtgctggtagagcaccagggagctcagcttgatgacatcgagagtcatgtgggtcgagctagctcctttatcagaggcggaactgaccagctacaaaccgctcgggtttaccagaagaacacgcgaaaatggacatgtattgccattattattctcatcatcatcataactgttgtggttcttgctgttttaaaaccgtggaacaacagcagtggcggcggcggcggtggtggtggtgggggtaccactggaggaagtcaaccaaattcagggacaccaccaaatcctcctcaggcaaggcgtctattgcgttgaagttgaagttgaagttgagtttcgttatttgcatatatattctttctttgaaaaaccttattatcaaaccagctttgtgttactactttctactgctggtttgttgttaatctcccgtttatttggtttttgtgaaagaatttaaaatgtgggttagatgagaaaattagtacaacattctcttgtatctatgtttgctatatgggttatatttacttgatgtgatttcagggtttatcgtttcttgttctatttggttgaagtatatgagccatttcaaaccaaacgaggtaataccaaccgataacacaaaaacttcattagtcttggcattttccaagttcgaatatgatactaaatctagactttgatgctatgatttgttctggggtgtactcttaacattttgttgacttttcagttgactgatatgttgatcctactgtgatacttagctttcttttttttttttttttttttaatcccaattctgattcagattactgaagttttcaagtctcaagaacagtaaagaagttctatatacgtacaagggttacatatttgttttttcattcatgaagac

SEQ ID NO: 32452 - DNA, 13966 bp, Arabidopsis thaliana landsberg
  unsure (1)..(13966): unsure at all n locations
taggaaattttgtaagggtactgcaaaaaccaagcactctcgcaaaaccatcgcaaaatttccgaggaagaagcgggatagttaatctgctacgaatttactacggattattcctctcccaaagtgcgagtgtttcgcgagatactttgttcctcgcaaaatttccgaggaattaactaccgcttccactttgcgacgcgcgttttgcgaggaaccggttttcctcgcaattccctcggtatacttgttttgcgagggattcgctatagattcttccgtcgcaaatgaccttttttttgtagttaacacaaacccaaaaattactgaaaaatcatatcaaaatgtagatctaaacaagataaacatctttgctcaaagaactaaatgtaaaaacgaaatagattaagagtaattaaggtttcaagattctaaaacacaaagcaaaactacaaaataaaagcttggtccttttgacaaatcccaaagaacctatttatactaaaatctcaaaaaccctagattcactagaagacaagagacttgaggcggtttggattgatgttcgatcttggggatctagtaaagagggtgctgcaaagtctgcgccttttcctccatgctctgagtgatcaattggtcgagtagatgcttcatcctctcctatccgtatgctcagatgtctggttgagtggggaatgaggaggatccgaagacgctttgatagcttcacaagtcttgtagagttggtcacccttggtcgagtaaatggatcgagtagtggatcgagtaggaggggcgagcagatcaatctgcaacctcctttgtagcatcctggatcgagtaaagaggtcgagtagaatgatacctctgctgtagctgcttggatcgagtgaatggatcgagtagagtcctttttagctccttctgcacctgaaaacacaccaaaacatgcaatgcgaatgcaagacgatcctagatgcctaagtatgcaaaataagctaaaatggtgcaaaatgatatgatagaatgagcaaatgcaaagctaaatgatgataaacatacacctaatctcttgcttgcccaaacttatctcttgcttgccctcaagtaaacaaaaaatcttaagttgaaggagaggtttgaaggtggggattcaaaaaccgaagcatgcctataaaatgggtaagctcaatgtccaggtagctaattctaggttgcaagatgatagacccttacttaaaaatgttagccatactcgtcacaatgcaacctaacaacttgccttaatctattcaagcattcacatcaaccaattccctttaacattcattaagcacggatagtggatcaaacaatgcaatggttatgaactcacttggttttgggcttaggccaagagacaaaaatggtccctctaatggtttggtcgagtaacaggggacccttagagaaaagattgagcttcagtagaatggtaaaggtaaaagccaacagacacatacaagaacagactcccatctacccaatgatatagtatgatagctcagaagatgatcccattcccatagatgtcctaactctaccctttttctcattctttctctctttttggttcatgttctaaggggttctcttgaaatgatttaagagtctagcgggtttggttttaaactttgacaaacttaaggcttttcttctaatcttcgcacatggggcaatttacccttttatttaaatcacaatgcctaacttctttgaattccaaaccctttactagacttaacacttttgtatcccccttaggactctaaactcttactctcatttttttatttttttcattctatttctcattcccattcattccatacacaatcccaatcccaaatacaagtctccacctagtcctagctaacccaaaaagtgtgggctaggtctacatgaaagactgttcttgtcggctcatacctaacacattataccaagctcaatcgaaaaagacctcacaatcacacacaaatgatctttggcttgaaataaggctaggctaagggtatgggaaactgctctaaaaatgagagtcagctacttggagtaacagagggtggtgaagtgaataagataatccaagtatgtatatggtagccatgagttcacaaacaatgcatagacatgataattgcaaattcagttcaggttgtaatagataggaaatggcatcagataagcgagtttcgaatcaaagcagtatagtcaagttacaaattcaaagcagggtgcagtcttacttcagagaaacaatcggttatgcaacagagaactaacaacctgcgcattgaacttacttcattgaatcaaaacatgcttaacggtttgaaatcatcattatcccatatgcaaatgagcaatcctaaatgcaaacacactatatacaatcctaaaatgaaatgcaatctacatgacactctatttttgtgaaatcattttctgaaattttttcaaattttatggttttttctattccttagatgatgcagactcataaatatacgcaatgcaacacacacttcttgagccctcccccaaacttaaatcacacagtccactgtgtgaataaacttggaagagagtactcagaacataacacatcacataaccaaaatataaacaagacatggtatagtacaatggtaaagtgaggcgcttacctcagtcaaagaatgaacggagttggtcgtcaatggctgcttgtgattgctcccagaccattgaagagttgccctgttcggtctcagctccagcatgtgggtactcgacctcattgcctttgtggcggccagcactgccatgagtatactcgacctccattcttctgctgcagtcagcaccgcagtcgagtgatctcctggcgtggataagctaaaacatggtcgagtatccttcattgctctgtggtcgagtatagtgttgtactcttagagccagaatccacttcactcagctctttatacttatctcctgaaaacactaaccaaatgcataaaaaacaacaaggaaaaataaagatatgtacaaagatagacatgggatttgctcccaagtgagcttgttttaagtctctaagcttgacttctcatactcattaggcttagggtgggttgtagagaggaaatgaggtctcctctccttctttagtagagtgatcatcatactcattagggtttcttgacaggtctgcaattgggtactcagtggccatgtcctcacagtaagcttcttttttatcaagatagtcttctcctctagaccattccgacgtgaattcacatccttctttgctgacaagtatagtggctccatcgtcaggggcgtccttgatgttgagtggtacttggttcgcttttccattgagctccttgatttgatcctttagctcttacacaatatgtgttagctcttgtatggctttgtcttgccatttagatctctccttgagttctaaccaatcatctgacatctgagtgcttgccttgagttgtttggtcgagcatgagctttcaggacaagttggaggctttttcgagttgttggtggaattagttgatcgagcatgtgttgaacttacttcattagctttcataacctttgtgtcagaccccatcaagcccttgtaaacctctgagccaactactgtcttgtgtgagtctaatgacttctcagaactcaaagtttcactaaggagaaacccacctttaccactattgatcaaaacagtttttcaattatttgcttctttaagctccactagaagttcatcaactagcagatccttttcctcaactaagaaggtttgtccttctattgtcggcttcttcatagcatcattgatgtcaaacttcattttaaaatccttccccatattaaaatcaatctttcctttcttaacatctatgattgcttcagctgtagccaaaaagggccttcctaagatcaagggatcttttggttcttcatccatgttcaacactatgaagtctgtaggcacctccacatttccaatcttgataggcaaatgttctaataacccatgaggttgtctaacagacccatcagccaaaatcaagaagatattgcaatatttatatttgttaaaacccaacctcttagctactgagagtggcattagacttactgatgctgctaggtcacaaaggcatttattgaatgtcaatgaacctagggagcatggtagagtgaatgaaccagggtctcctagcttctctggttcatctttctcctgtattatggcactacactaatggctcataactgttgttttctcaacctcttgaattctctccatgatcaagtctttcaggaatttttgggaatccgggatacgcgtgagagtatcaacaagaggtatcttggcttcaacttgttttatgttcttggcaaacatagctctgtacttatcttctaactctttcttgtgtcgaccaggaaatggaagtgggggcttgtaaggatgaggaatgaagactttttctttgtttttgacagcaactggtttcagagcagtttgtgaagttcctgggaaggtcggtcgagtaaagtggtcgagtgacagctcgagtgactggtcgagtggctgctcgagtgactggtcgagtggctgctcgagtgactggtcaagtggctgctcgagtggctgctcaagtgactggtcgagtggctgctcgagtgactggtcagcttgatctttattgagactgaaatcctccccatcttggtatgcgctgtcctcagtgactgacttgggtctctctctagtggataactcacttccactccttatgttgatagtatgaacattagcatacttcttgggattcttaattgacttccctggaagtcccataactttgggagcagaggtagatgcggattgtccttctaagtatctgactttggaatttaacgcctccactttggcattcaggtcattgtagctgcagtccatcttctggtgcaattcagataacttcttagcaatttccatggagctagatggttgtccctgtagcagctgttggactatctgtttcatttcagcatcaggtacaacaggaccttggtttgactgaggtgcaaacccaggtggtggttgctgctggtagttcctttgaaattgctccttgggaacaaaaccttgattgtagggaacaaaaggtttgttctgaccttgttgttgttgtggaggatacacttgatcccgaggattagaaccgttggtgctgcggtaagagaggttggggttgttcatcttgaagttgttgtaccctttgtagccaccttgattgttgatgtagctaacttcttctaactggttaccctccccatcttggacttgaaactgctcgtcatcgacaaggaagtgcacatgcttctgctggctaagaagaatcctgtccagcttgtcattcagcacattgatctccttcctgtgtttgtcatcagagtcagatgtgcctctgacggtcttatcgtagtcctcgttgtaattaccatctgattgagcaaagttctcaaccaattcccagccttcttcaacatctttgttctggaaatttccattgctagcggtatccagaagcataatctcgaagatgagaccactcttaatctcgaagttgttgttcaggatagcaggaggtgcaattcctttcctctgacggtgatcacgtggtgcatctccaccaccaatgttggcagggccattttgttgattctgttcgtcagccatttcgagtggttgcctaggtacaaagttaactgtatttctcctttctctgagttcgcgagctatgcggtcgatgttatcgttgaaaaggaggttctgattgcctgttgatcgagttcacatacagtagaggtgtacctggatcaagaagacaacaagaaaaacacacagttagcaatcggattgaaaattgaaaaagaacttgatttaagcaagtctgaaatctcaaatgtaacaaacaaacacccaattggtaacgacgccaaattgataataggtttttaagatcaattaatcctagagcactatcatatcgttgtagtattgaaggttgtcaatccaaatgggtgtgatgctaaaaatcaagatgtgatcagaagtcactaagtcaagccaagcaataacaggttttggtgtgttctagcagtcctaagtgaacatgcagaaaacagaaaatcaaacagaaacagtaaaacactcgaccaacacaactctttgcagagcactgggtgaggtcgagtgacaggtcgagtaacagaaagaaagtataacacagatactcgactgcaaagtctattgccagacatctgggtggtcgagtatgagatcgagtaacaagaaagaattgcagaaattaagcaacagacgataagatgtagtaaacaacagtagagtaaacaaataattcaatcagataaagaattcccgaggatggggtaattgagtagtttcgtttccttagtttacacgtgatcaacatgctcaataaattaaccctagacaacaagttcattaaccaattctaagtgccaccacaacagagactctcaagctaacctagtcccagactcaatcaccattgacgagagctaacctaacatgcattacgaatcaacaagttaaagccaaaacgctccctgcaatcaataccttggtacagggtcacgaatctctggaattagtggttcagacatttcatcgaacaccttttgggcgcggaaatgtctgggctcaaattccagttgatcagaaagcaataggcattaagaacaactaatccagaagggatctatcaaccaatactcaatcacctagcatactgagaattctacactactctaacccatcctcagaaacctattcattactcagacatcataacagaaagcataaacgtcgaacaagttgaaaacctgataacaacagtgtaacagcaagatgataacagaatgaacaacagtaatcgaaatcaagaacaaaagctgaatactgaatactgaatagataaagagaaatccggattacaaaaggtctaaaacacaaggtctgcggaaataaaacaagataaaaaacttcttgtctgcgaaaatgtgaagtacatgctacttatagccaaatattctgaaaccctaatactcaaaacgacgaagtatcgggacggattatgaactgtactcgactcatgtggtcgagtgggaggtcgagtgaatagctggagtcttcttttcttccttgtgctcgagtgtctggttgagtgcagaatgaagaagactctgaagcttgcaatcgagtatgtagtcgagtggtggtgatggtgatactcgacttcaaagttgagtggtgtggtagagtagtggtctggtaatggaggtgaagacactcgacctcgtggtcgagtgatgtgatcgagtggtggtcagaagatggagatgaagtcactcgacctgggggtcgagtgatgtgatagagtggtggtgtcttctactcgacctgggggtcgagtgacttccaggactcgaatgacgaatgtctagcagggacctgtgagactctctgctctctaagctcaggcctgtgcgaaggtcatcaaatctcctcgatggcatctccagaggaggctgtccctgtggaatagcagtggtggaggaggaacaactcagcttatctgtcagaagcttgatagccttgaaacacttggcgagcagcttgtcctgcttcttgcaccacttctgcaatttactgttattcttataagcttcaatcaagctcttgctctgcctcgctggaggtacatgttcaccaaagtgatacatgctagtgtcgaactccactgctctatcttcatccaacccatccgaagcagcttcttctagaagatcatcctcatccaatggcggagcgttctcatagtagaggcgtccaacctcaggccgaaaatcaatattatctccctttattatccgtgtaacctcaggccaaaaatcaatatgctagctctcctgtctgtagagtgctcaaacctgaacctgtggaagtcgtcaaccattgcaaactccaggaattcgtagtgacgtaggtgctcgatatccattgctcgcggctcgagtccagcagaaatgattgggactccacaagctatcagaatcggtgtcacaacaccaccgatgcatagagcacctcgtgctctcttgtggttattgctgacagcctagctcttgtatccacacaggtggatcagaagaagtacagagagaggtgtgtcattgatttcaccttcgagagacatgtttttcttagtttgacggagagtgcctttgagagccatagcgatcatcttgatatcagaactagtaacaatccctgtgatctctcgggagtagagtacattggctatagaacgccggaagtacctgatgacagggctacgtatcagattgctctttgacctagaagaattcaccggtacagagctgccaatggtgatccacaagtctttcaactcttctctatcatacttgggcatagtacccgttccactggggaaaccaaacaatccttccaagcgcttgattgataacctatactcatgaccatacacctagaatctcaagaatcccaatccttcacaattcaactcatcagaggtcataccttggtagagctccacttgcagtgtggagaggaattgaattgtctcttcttcatatgctactatggtataggtgttgaacatcctccaacaatccaagttgtgcaagcgtggtcgagcatggataccttgtgctacaaaactcatttaatttgaagagcctaatatattcctcagcgggcaatacatcaggtttgtgcagaagtttggtagctctgcgagcaagctcaggcatgtactcgtcttccagatcctcatctataagctcatacatctctgtcatacctctctgttattgcttcccacaggctatctcagcgtttcttctgaaactatcatattctctttgttctctctctggccttgaagacgatgactctttctcatccatgttgtagtcaggatcaactgaagaactgccactgtaattactcatgattatcatgcaaaagacttagaagtcaaaattccaatatcaataggttagtttcaaagagaacaataaagccaaaatcgttagcaacagacaatatagacctaaacggacaagtacaatcaagtactcgagtaaccttaaccctttccaagtttctctttcacgggttgaatagagtggcttagattgaatcaggctgaggtcgagtacaagaggtcgagtagagctccgtcggtcgagtaaaatgtcggtgaagttgagtggctctgttgcaggaggtcgagtgaaaacttgtggtcaagtgaaaatttgtgatcgagtacttcttcggcgagtcagaattggtgaggatggaaccacaatttggtggtcgactcttgcgtttgtaaccgagtagttcttgagacttcgacggtgaacgaggcggggaactcgattttggcagcgcagagaaggtcgagtgtggtgagaacaaagtgatggcgaagggcaaagtgaaacggtcgagtatagcgaggaactcgagtgaaattgagtcgagtaactctttggtgagagatggcgatacgtggtcgagtagaatgattggagagtcggttacgtagcggtcgagtgattcaggttgaaccggaatcggtagtcgagtgagtcgtggaactcgtctgagacggcagagaattctttcaggcggcgatcgagtgatttcagcgaagtcgagcgcggcttaggtttcagaggtcgagtgaagtttcaaaaggggtggtggagattgagtttgagattctctctccatcttatcctcagcgcgtggtccacactctattgactgggaaaactgcaggaaatctactgtaaacttgataaactccctgtaagactctgtagcttctgttggtcgagtaaaatgatgatttaaaaatttttgggttttaaacatcacacatactcgaccaatatactcgaatgcaaggtctccaggtgcaacagaagattttcaaaattttgtacttcaacgggctatacactcgatctccaggtcttctgtagagtaaaagttttgaatttttactctatctccacgttgttcctttgttccagagaaccacaatcacaactaagacaaatcaaaaataacaagaaaataaaaaaatttatttacagagatagtcatgggacttcctcccaagtgagcttgtttaaagtcatagcttgactcctttactcctttaatcatcaagaggttcctggagatgaaccgatgtcacctctggaaggatttggtctgctaagtatttcttgagcctttgaccatttactgtaaaatctccactcttactagctagagcgaatgctccataaggacggacctcagtgatacagaaggggccagaccatctggatttaagttttcctggaaagagtttcaagcgagagttgaatagcagcacctgatcaccaacctggaaatccttagtgatgatcttcttgtcatggaaaagcttggttctctccttgtagattttagaactctcataagcttctagatggatctcatcgaggtcactgagttggatcaatcgcttctcctcagcagtttntatgtcaaagttcagaagttttaccgcccacattgctttgtactcgagctcaacaggtaggtgacatgattttccatagagaagattgaaaggagttgtaccaatggaggtcttgaaggctgtcctgtaagcccataatgcgtcatcgagctttgcacaccagtctttccttgtaatcccaacagtttttttcagaattgtttttatctccctattggagatctcaacctgctcattcgtctgtggatgatagggagtggcaaccttgtgctttactccatgcttcttcaagagattctcaaaaactttgttgatgaaatgcttcccaccatcactgattactaccctgggaactccaaatctcgggaagattatgatcttgaacagcttcagcacaacttttgcatcgttggtaggactagcaatagcttcgaaccactttgatacgtaatctacggtgactactatatacttgttgccgtgtgaagatgggaatggacccataaaatcaatcccccatacatcaaagatctcaacttgcaagattggattctgaggcatctcatttcttctgctgatgttgccttttctctggcatgaatcacaatttgaaacaaactcctgagcgtccttaaacattgttggccaccaaaagcctgcttgaagaatcttggacactgtcttgaacgtcgcgaagtgaccaccatatgctgagccatggcaatgcagcatgataccttccacttcatcttctgagacacatctcctgtagatcttatctttacagagagtgtaaagataaggctcatcccagtagtaatggtgtatgtctctgaaaaacttcttcctttcataacttgtcaggttgggaggctctactccgcatgccatgtaattgacgttatcagcataccatggagattctccttcaccagcattcagttggtggaactttttcccactgtagctccttccgaagaactctacaaccatgagctgctcttctggcattgaatcgtctatcggaaagggttcttcaattctcatccttgacagatggtcaactgcaccattttcaatgcctttcttgtttactatttccttgtcaaactcttgcaataaaagtatccatctcaacagtcttggtttagtatccttcttggcatacagatgcctcaaagttgcatggtctgtatagacagtgaacttagatccaaccaaatagcttcttaacttctcaaatgcgaatacaacagctagaagctccttctcagttgttgcatatcttccttgagcttcatgcaacgtccgcctggcgtaatatatattacgtgaagcttcttgtctattctctggcctagtacagctcctacagcgtaatccgatgcatcgcacataatctcgaacagatagtcccaattaggagttcgaacaacaggagcagataccaaagcttccttgatggtgtgaaaagatttgaggcagtcctcatcgaattcgaactcggtctccttgcataatagtctagttaacagcttggctatcttggagaaatccttaataaacctcctgtagaacccatcatgaccaaagaaacttctaatgtctttgacagtttttggtggctgcaactgcatcatcacttcaatttttcccttgtcaacctctatacccttctctgatatcttgtgacccaacactatgccttccttcaccatgaaatgacacttttcctaattgagaacaagattagtctcttcgcacctggtcaataccctgccaagattcaacaaacatgaggagaaagaggggccatagactgaaaaattgtccatgaaaacctccaccatctcctcgattaagtctgaaaatatagaggtcatacacctctgaaatgttgcaggagcattgcataaaccaaatggcattctcttataagcaaaagttccataaggacatgtgaaagtgttttttttcttgatcattagggtgaattggtatttgaaagaaaccattgtatccatcaagaaagcaatagtatggatgattagctaaacgttcaagcatttggtcaatgaatggtaaaggaaaatgatctttcctagatgcagcatttaactttctataatcaatgcacattctatgacgagttatagttctagtagggatcagttcatccttttcatttttgacaacagtcattccaccctttttagggacgcaatgcattggagaaacccaagtaatatcagagataggatagatgacaccagcatcaagaagtttcaaaatttcttttttcactacttctttcaaattgggatttaacctcctctgtggttcaatgctagaataggattcgttttcaaggtggatcctatggttgcataaactaggtgaaattcttttaatgtcggataatgaataaccaattgctctcctatactttctaaactcaaataatagcaggttcacttcatcatcatttaactcaggattaatgatcacatggtaagtagagtttggaccaaggaatgcgtaccttagacctttaggaagtggttttagatcaacctttggcgccttcagttcagaccagtcatctgaagttgggatgatcggctccccaaattcgttggcagacaagatcgagtatttgctcgagtgtgcaggttgaactcgtgttgacccttcttcgctcattaccattacctccgttgctggtccattcaaatcctcaaagggttctgattcttccattgctttatgggagtctaacagcttctggtatcccaatgtttccaaatgcagaaacccatctcactacttttggttaaagcactgttcagatgatcttcttctgccagctcttccagtaactcatcagctaactgatccatttcttcgatccaaaagagttgcccttctatggtaggcttctttatcgcgtctttgacatcaaaggtcatcctaaaatccttgccaaggtttagatcaatcttccctttcttgacatcaatcatagctcctgcagttgctaagaaatgtctccctagaatcaactggtccttgggctcttcatccatctccaggactacaaagtcagttggtatctccacagctccgatcttgattggtaggttttcgagcaaaccatgagggatccttactgatctgtcagctaggatagaatatatgca

SEQ ID NO: 32453 - DNA, 891 bp, Arabidopsis thaliana landsberg
cacaattaaagtaaaatctattggccgaacaaaaaaaaaaggttttttctattaaaatatagataaggttctagagatgaaataaatctattaccaattctcaaaccgacataagtacgaccaaaaaaaagtttataaataaaagtcacaacgagcctcaacgcgtagaatcttcccgtactttacttttccggaggaatagaaaattgggggctagggttcgcaattgtagttttcgagcgaagaagatgatcgaggtggttctcaacgatcgtttagggaaaaaagttagggtgaagtgtaacgatgatgacacgatcggtgatctgaagaagcttgtcgcggcacaaaccggaacacgagccgagaagatcagaattcagaagtggtacaacatctacaaggatcacatcactctcaaggactatgagatccatgacggcatgggtcttgagctctactacaactaaatcctctggtacgtgattttatgtgtcttatttaatgagacttgagatttagggcatgatgcttccggaatttgagattatctgatttataagattacttgctttttatcctttttagtttgtttaaaagaattataagattgaaattgaaattgaaattgtttcttcatatgtacttgttttctttagttataagattacttgtttttcttaaaattgtttcatcatgtgaattgtagtggctgaaattgtaggtttttacatttgtaaaggaaataatagaaaaaggaattcataatttaagattgaagaacagaactagattcaaggcatcaaattctattcaataatgaaaagacgattgctataaagtgtaaaataattatcgttcaaacttgtacctatatgatttggtgttttg

SEQ ID NO: 32454 - DNA, 1147 bp, Arabidopsis thaliana landsberg
catttaaagatatatccatatggtatcattatccctgcaaactgaatctgttaaaagaatcagtttttcctagctaatatttgtagtcttgtagtacagctgatatagatatttattttggttctttttttttcattaataacttaggaatttcgatccaaaactcacactaattttttggataggtgccagtcattttatgtctatagtcgtaaaaaaaaacaatcgaacaatgatcttttactcgtaaatataaaattagtggaacatcatgattagttgatctttttccagaagatataaactactctctctgttcttagaacaatgatgttttgagtttttcacatagattatgtaaaataattttaatattatttttatgacttttttgttaatttaataatataagttttccttctcttttctctattggttactaatatgaatattaataagtattaaccttacatacgatcaagtatctctatggatacgaaaaagtagaaaatccaataacgatcacaacgttctatagtaacaaacggagctattgcattcagtcatagatgaaggtctcaacgtagtcataagcaattattgtggcctctctctatctagacaagttaggcagtaaatccctatcagtatactaaagttcacgaaacataagattaatgtgttataaaagtgatcattacgtactactatatgttaacaaaaaaaaaatcaaaattatcattatgcgtgtatgactaatataattgcaaataagacacactattgaccgatttcttaaacactaacctgcaatcttattggttacttaacaattaacatacttctgtgaaaaagaaagccgaccgactaaccgcaagaatcagttaccggttaaaaccgacgcgtattatacagcagtcgacagatcagccgggtaaatctaaaccattcaatgtgtcttcttcgttaatagacggtgacttttaactgatccactttttaaaacgttcttaatatttgcacattttcacacttaatattcttaaatgttctcttgaaccagattaaaagtacttaaatcacttaaatttgaaattgcgtcaatgaattttgacttcatcgtcgttaaggggagaagagagagaga

SEQ ID NO: 32455 - DNA, 1225 bp, Arabidopsis thaliana landsberg
atgaagaaggtaaacaaacggatccgtgtgacaaaaactcacacgttaagtgtgtagttaaaccaccgcttgcaacatctttatataaataagcctcaagaacatatataaacacatgcatatttacacaccagaagcaagaacagaacaggaaagagtattcttcaaataataatattgtacagtatatatggatgttgaaaatggcaagaacggtgaagggagtgtgtttcgcatgcctcttcattacccaagatactccaaagaagattaccaagacatgccagagtggaagctcgacagggttttagcagattacggtttgtctacttatggtgacttggctcataagcgtgactttgctattggagctttcctctggatttcaactcgtaatccaaagctttatcaagaaaagtccatcaactccaaactgaagaaagatacaaaatcagctcatgcataaggtttttactactactaagcttaggtgttggcgataaccaaattggtctatgttatgcttaccaatatgatgtaataaacatgtaaatcaagagtctcgtagagcaatggtttggaagcagttaataacaagggtcaaggaagttaagtggttattttttgccttgtgaaaacaatttcaaaggggtatatgtcttcattagaatatcgctcttgaacaaaccagaacagaaactacttgagggtgacaacagaaccgcaaggctggtcttgagagtctaaactaggagtttcagaatttttaggattttcgactataataatatatcaaactttcagactaattctcttaatgattcactaggacgatttgttcttggtctaattgtcttcagcgtcaccagttcaagcttttttctccctcatctgttccaagttttttctgcaattttattaaaaatgggaacaaaaagtattttgggttttcagggcccaagaagcagcacatactctaaccaaacccatcaatgatttacaaaattttattaaaagttgcaaaaatagacctacgcgtttataacctagtgaattaagaaaagttaaaagcatttctttacgaaacaaagctgatactcctttttagctttctcaattcttgacaacacaggcttcttaggtagttcttcatttacgctttgcattttacttatttaagatgaaaccgaatatatatgtgtatctataacaggattctccattt

SEQ ID NO: 32456 - DNA, 1652 bp, Arabidopsis thaliana landsberg
  unsure (1)..(1652): unsure at all n locations
catattcttcttaacctatgaacatagcacaaacaaacaaacaaagaattatggaaatgaattataataagagttgcatcgaatttataaggataatttcttgtttattacctcagctgatttgcttccaattcttgatcttataactcccatcgcacccgatagtttaccagcagcagatttaatcctagaaaataaaccttttctttctttggggggagcaatcattgtacccttgagttgctcgaagaagaccttgtattcctccttttgtggacacttcttttcgaggttcattatgaatgtcgaaacatctttggacgtctcttcctcgacttgtgtcactgttacaccactgctctgactagcggaactttcttctttagtagcgcttgtagagcttccaccagcactttttgaagacgaagtctcactttctcttttagcggaagtcttactttcacctttagcggatgtctcactttcatctttagcggaactctcactttctttaccagagcttttgctgttttcgctggaagcttctatcccaacactagactcttcactggaagaagcagagttggttgtgctcgataccattgtgtttgtgatccgagtaatgattgtttcccatcttaagatcccttctttgatttctttttgttgttctgctgttagcttcattgattcctcactctcctcctttttgcggcttcccacaattttagtcgcaagaaatctcataaacttaaaggtattaatgacttccattttatcctcttgaatctccttttttatctgttatacatatgcaaggtaaagtaaattaaatagttcatcaacaataatatatcttcaagttgaagaaacatttacctttccaatcgcaaaagaagatatgacttggaagaggcctccggccttggccttcatgtctcggtcgtaatctacttggtcttttctttttattgggcagacatacttggcgaatgccctaagtttctcaaagaaagccttgaatttatttgtcttgggacattctttctcgaggtcgacacaaagactatcactactttaacggtgtaaggttcaacatccttcaacgtttgtggaggttcaatctgaggcaaagttggcttaagcttcaaatgagctgaaacgatgtccagaagagtcactgatgcaaaaagaatggtaaagcataaaaatagctgaactcttgccattgttatatatcttgttagaaataaaagttgaagaatgaaggaattgaaatgggatttttttgtatacttttatagttatgtttagtgttctatgtttaggattactgatcccctgaccattggtaaattggtggattaaagtcataaataatagtaaagagcttcatggttcttacgtttcacaaatctattgatggtgaagtcttttgcgtttgatgttttttgtattagttttataaaaattgactttttatatagaaggtttatagaatgaatacatatgaaggctggttctggttggttcccctatctttgacttctacttgattttatcacaaactgtgtgtggtatcattcgccgccatattcattctctatattcgactaataccggtgntttgataagcaagtcgcaacacactc

SEQ ID NO: 32457 - DNA, 1942 bp, Arabidopsis thaliana landsberg
tgttgaagaaactgtgactctatctagtgttagagataagaaacttgcagtgttatttcagccatgtagtgcatctaccgtgaagatatggattagtcgcaagatcgagcccaatgcagtgtcgtggaggaaggttttcttagcggttgatatgaaaccactcactggttttcagtttgacattaacgctgcaagtttctttgttgacgagaagaaaaaggtcgcaatggttcttgataaagataggttcagttataaattaactcgcaacatagcttacatcattgggaagaaggggtatttcgaaaaagtggatcttggagaatctacagtttcaagttgtgcctcacttgtgtgctcttacgttccaagctcagtaaaaatctagcaagcttcaccacgaggcaaccagaacacaccctaatctattcactttgtttacttatttattttctcgtctttggttaataatttgtagattgacaattgttggtttctcaaaaggctctgctttctttatcatgttcatccttttatatccaatggatagcgattttttgtttaattaaataacacagaatttttactcactttataagagtatgaatctaataaccccaaatatgaaaaattttagacaacttttcacaaatcttaaatgaataatacaaaactttaatatacttataaaaaatctttattaaataacacgagattttacatgacactttaagtcactaaaactcttttaaaatcataaaccaataataccccctaaaacataatatcatgtcaaaattttaaagatttgattttgtaattagttaagggagttgcaattatggtagaagaaaattcatttcaaaattgtagtttaatatgtagtaatttcaaagtttaatgactatttttctaaatatttaatatatctattaataaattattttagtcaaactacaattaatgataagtacatgtgtcatcaaagtagagtgccaaatgtcgcattagtaagcaaagttaaaaaaaaccttctcttattatataagattttttataaaaaaattgagccaagacagttatgacaaatatctttaaaaaaataaagtttccataaagaaaattccctactgtactaatcatcgatccagtaagcaaatatatcaaagattatttacattagcatatatgcaccctcaagaacactccatgaacactttagtaaagccattgtgcatgtattcatatttacagcatgagatgtgattcgaagttgcaatgaagaaaagtggaggaagacgataaatatgcccttgttctacctagttcatcactcttgattgttatctggtaatttcgtggctgtttggtgcttaacgaatgtcaaactacagtgaataattgtaatgctgttgttgaccagataaacatgaattttaaagttgtctaaaagtggtaatgatcttctcattcaataaattaaaacaaatctgtgagagcctgttaattcaagtacaccggattaagacaatgaaaggaaaacacttccacaaacataatcacaaaaaacaaaaatatcgtattcacatttctataaaataataagaaaatgtaacatattgttaacgaagagctgaagaagaagtgagatcggaatcaattagagtcttgagggatttagctttccttcctgtaacgttaccagcttctttcaagagttgggccagcctcctcttctcgtcttccgttacaggattcgctgtcccgagcttttcctcccgaaccccaaccacatgtcctagcagcttaatcgcatcatccaacctataaccacaaacttgtttgaggtctgtacgaggatgttaaaaaaagataaattaacatgcacaagttcatacctgccaattgcatcataagctcctgcaaggttcctggacaatcc

SEQ ID NO: 32458 - DNA, 5718 bp, Arabidopsis thaliana landsberg
tcatattaattgcatgagaattaaaatgttacatgaccatcaaggcctagttagctaaatatcccaacaccatacaaaagaagaagccaatttgaaaaaagcaagcccacccatgggatcattagaataagagaagtcttgcctgccaagcgatttccggagaggtttccgatttgtctgatctcgccaatgtcgtcgtctccagagaagaagaggaggaagaaactgtcaccagaatcgaactcacttccgaatgatttgatagtgaccatcttagcccgcctctcgcgatcatattaccctaagctctccttagtctccaaaaccttcagagcaatccttgcttcaccggagctttaccagactcgaatcctcttaagccgcactgagacatttctctatgtttgcttaagctttcctggtgaacctaaccctggctggttcactctctaccggaaacctaatcaaacccttaccactaagaagaagaaaaatagtgttcatcttttggctccaatcctcaactctcctcctgtggaattcccaagtctcatcgctgttggttcttatctttatgcctttagagcagccattgaagaaggttctccattctctaacctctggtttcttgactgtcgaactcacacttggcttgaagccccaagaatgcgactagctctcaccaatagtgaccttgatgggtatatgtatctagcaggaacctctgattctctgaactgtgttgaagtgtacaacacagacactcaaacttggattcctgtgccgcccaacaaacggatattcaaactccaacatatgaaaggaatgctttacatgaacgttagtaaacttttgagctttgctgcacaggatgctgaggagcttgcgcctttatttccgaagcttcggtcattactttctacggaggttgtggcttttaagccaaaggtttcggaaggatatgaagtgttaggattttcggtcaatacagatttaggtcgaggttctttttgcatggggagattacctatcattatgaccccagtgtaaagtttagatggagaagaagacagggaggagtttggagatcattagtgggattagaagggctacctaagtttgctagatatagtagtgttaagttggcggattgtggtggtaagctggttgttttgtggcacaagtatgtgcctgcaagtgggtatgaggagaagatggtttggtgcgcagaaatttcccttgaaaagcgcagcaagaaagagatttgggggaagatcgagtggttcgatgcagttcttagagtccctaagtattaccaattcgttggcgctaaatctgctactgtttgacaggtttgagcgcttataaatatgatctgcagtcacttgctttgtaggatgatggtttaagcttatttagtgagttctttttcttttagtgcctgacattgtttttgcttataaatatgatctgcagtcacttgctttgtaggatgatggtttaagcttatttagtgagttattttagtgcctgacattgtttttgcttataaatatctggcattgacttgcttgtagatgattaagcttatttcgggacttgtctgtctctttgattaaccctttgatgacaaactcggtctgctactgtttgatgaatgatgcatgagactagcgggtaatgtccgtttttagttctgaatatgtgttgcaaatgcaaacgaaattaaacataggcactgtcttcagttagaaacttgaaaagggtcacttcttattattaatttctgtgggtaactgatacaaacaaacttatctctaggaaactggagaaactacatttgataccaatacaacaaaaataaatcattttttgtccgtataaatagtaaccgaaaactatatcaaaaccgtaacaaaatgtggtttctgtctcttttcactgtgtcttatctctctgctcactcttccatgaattcttagctgcatctgctgaaatagtcgtgcctccattaccatcgctgctgccatcttctccgggctttggtttggagaagaacgggtcccacacatggccccctgcttcccgttggccttcctccagcaacgcatacttccagctgttctcctccacgaagtagtcatactcggttcggccctcgatcatgttcttccttaaccgagtcaccttgtctatcacagcctgtaccgagacatcaaatgcatctttctgcgtctccagttctgatctcgggtctgcgtagatcagccttgggatgaggttgatgacattctctctcattatcttgacctgctcggctggaatctggaggagtcgctcctcgatgcttatgtttctcttccgaacatcatcctcggggatgaataccgagtaggttgtgtagttcttgggtagatgccacgtgtattgagtgtaagctgaacccggatggaagaacaccggtatacaaccggcaagcattgagtcaaatgccgatcttcgggtgtaagagtctccctgtggctgcaggcagaagagagagctttgaaacatttgcataatgctgcttggtgcatggcatttgctctccccaaaatcgcattctaataatttgccaacatttgagtttcgacattgatcaatgatctgccctctgatagatttcggattgtcaggtcgtggggctcctgcaaacgagaaaagccacttcctttccaggtttctcatccggtcttgccattcaaaaacctctgagtcctttgctgggtggaagtaggttgggtacgggatcccaaaatcattagcattccatgggctcgactcaaccacaagcatagacatgttcttggcagccggtaagaagagaagcttgttgccccaatcagtttcttcttcagacaatctcctaaaatcccacgttatcctacccgccacaaggaaatgatcttttcctctcattatatcccactcaggccgcttcatgagccaatcgaccaactcaagcgaagcagcatcccttctcgagatattgtatccccacaggtacctagcaatgtcgaatccagcatagaacggcacaaagatggcagcagcaagggaagaatcatttgtcaaacatttgtactgcttcatccggttgctgaatatcacatcaacagcaaactgattagtcgcataccaaccttcatcagagaagacaccttcaacattctcaagcggcggcccaaggccagcattggttgtgaacttacacatgttagtccagagactaagcttcttacagtctctaagcatatcctcattgaactttgagggtagattgtgaacataaatgtacttccctccacaagggtcactcttgttgtctactgtcttcaaggctcttataaacgaaaactcctgtttcttcccgctctcaacaattctaggtggcttaaaggtggaactagaattggctactggtgcaggagggagtattggcttatcgatagtaactaaaggctctttgggaggtggtttcgatggagctgcatgaggctctatagggaatttatcaacacgaagagagactgatgatggctgagattgagcataactaggttgcaattggagctgtttatcaatgttaccagtccctaagacaacaaaatggaagtacaagcaacaatgcccagaaaaagagtgacaaagcaaccaacaaacagattcgattagtctgattttttccatttcccttctccattggctctgtaggagaaacttcagcagagcgacgcctcatagaaacccttggaaacatatatagagtgtacgaagatcacaacatctatacaataaagatcaaactcaaacaaaaccctaaagagtaaaaccaactcctatcaaagcttatcaaagcttctagaagtgatttttacacgagatcgaagtaattgaagctgaaccgtagctcaggagcaactccagaaaggaatcagatttgagaatgtagaagtgtaccgacaaggatccgcaagagaaggagctacgaggaagaaagaaagattacagcttttgattgatccttctatggaagatctagagatgtgtgaaagtaaagatttttaacattgatgaggccaggattgatggattttgccctggctttgagctggtcttcatcaccgtcaatgaaagaaagagagacttctgtataatgtaattgaaagcgcacgttagtcggacggctaaatctgcgccggcagttttttcttgtagttgtcggtgaccagtgggaccttgccacgtgtgaaaacatgtcggtttcaagtgtcgatgacgtcagatataaacctcttggactctttgactcagtttcgcgcgtaacgtgcgatttcgacgagcgtgtgagtatgattccacgtgtaatcatgtgagtggtttatagcatgatgtacgttggaaataacacaaaatcgcagaatttgatggtaagcactaagcataaaccaaaacacgttgtaacatgattacttcaagttcaagctcattgtttaacgtctctctgctaattaattagtatttcaataagtacataagttttgactgccttagtttgaatgttgtgtagaaataggttaatatttctgttgagaccaaatctcgtgcatgatgtccaactaatgatgacggattgacagtaagcataaagcagatgactagcctttttgcaaacctaattacataaataattaagtctaaacaaagaccaaaaatgctccaaaatgactttgtttgtatgaaactattgatgtaggtcgaataagagaaaagagacattagaatgcaaaacaaaatgcactgctttgttttattgatgagtaaaattttgttagccagttgaagatttaagttttgttttcgtttgtttaaattcaaaattagagatagtttattgaatactggtgtctaatttatggtggtaaatccgtaaatggttccatagtaggtaataaatatgctcgtattgaaaacaattttctacaagtctaaagtagataaatatctaaattaaaattgaatagtataaaattcaaaaacaggtcaaagcgaattaggagaattacattcgaacttagaaaaaatgtttgtcgtctaagtcgggattagtagtgtaaatgttgaagtgttcaagggggagactccacttccatacactcataaataacaaaccaaaaagagcgaaaattaaaaaacttagaaactttaagcgacaaacgtggcttgtgggagtggggaagtttgtgctccccaatgtataactcacatggataccacaaaaggacttgcaaaaaaacttacttactcctcctttaaataattgaagagagttatggactagcattaagtatttcccaacaataagtattaaaaaagaaatcacttttgattctttaattatttgttacaattggtgaacatgtaagggtgatttggaaaagtggggtggggattaattattgaacaaattcataattaagaattatattctcttgaaatgctcttgaatcagtgaacacaaatgagatcgtggtcttctaatcatcatcatctaatgggagggtgggaaaatgcatggaaagaaaatttctagctaattgatagatctgtattcgtcaaatcgccaaatcggtacttgtagttataatccggaggctgagaatcttgagattgtaattg

SEQ ID NO: 32459 - DNA, 687 bp, Arabidopsis thaliana landsberg
  unsure (1)..(687): unsure at all n locations
aatgagtcaatgactcaatgcactacaaataattgctccttttttttttgagaataagggttcttattataatgcgtatgagctttaaatataaaaataaataatgtacaacattattttaagtttgatattaacgacatatttatatatttatatatttatatccaagttgttcaaaataaaaataaatatatatatttatatccgatgattgaatttctaatattggaagtttattccggaacaggaaagcagacgtgggatatacacataccgcatccgatgatttatattaaaaaaatatatgtatacatcattagaggaatcataaatcggcggtgtgtgtaacttcaactcacgtttttcatttctctccaaagtccttcaatagntactaattctctctgatctctcatttcttctcttctccggtgacattttttttctcccccgcgaaagctaaaccgtgtttgtttactcatcgattgaatagtttgtttgacagagattatctagggctgggagcaagggtttctcccagaactgtgaacgaggaaactagcgacgatacatgtaattcatcgtgaacatcttccatcatgatcagatgattgcgtttttcatctgactcatagatgctactaatttaggaagctctttcttggttgattgtacaggaagcgtata

SEQ ID NO: 32460 - DNA, 1335 bp, Arabidopsis thaliana landsberg
cgatgctcttttaaacagtggagaatagagttgagatttcgaaactataccttgcgactcactctgtttctctaggatggtaagatatacggacccccagttctcacagtcaatattgtcaccctttctaaccagcaagatgcaagctttaaagctaaaagatgtaggaagacgcctctcattcaacttaattgtcaatgaacctcctctcgctcggtgagtgaagtacacaggcacatctttaccaggtaagagtgcttgtttagtaggtgtgtgcatgattaggtttcatgattcttgattaagtttaaagcgctagccaaacaatagagttatctttggattgtgaaaggagcaatctagtctctccaaggctcccaatcttcagcgtcaatccgttttaaagaatctggaatctgtgggagtgatacctcctttctgtaccccttgagtatgagtgtctgaacacgagatattctcttgatcagtgaaggaacctcttgtatttctttgccgctcaagtccagatttgtgatgatgtcaagaacatgagggaattccgctagattatcaaagtatgacatcagcaattcatcaagacggggccatgacctgatcgagagaggcacttcttctattgcggttccacagagatagagagctctaacgttagtagagatctcaggaaaccttttcaacatggagcaatcattgagcacaagtatgtccaaagattccaagttgatgttgatgggaagatcctctagcttagagcatccttttaaaatcaattcctgcaacttctgaaggtttcctatagaaagaggaagctccaccagatttgagcaattactaaggttcatgtacactaaattagtggcattcccaatagacgaggggagctccaacagacttgagcaatcgtcaagaagcaggttttggagattaatggcattctcaatagaagacgggagctcctttagacttgagcatccgtttagatacaatgattggagattagtgatattccaaatagatgagggaagctccagtagattcgagcatccatcaagatacaatgtatcgagattagtggcattctcaatagtgaaggggagttccattagacttgagcaatcactgagatacaatgattggagattaataacattcccaatagaggggagcttcaccagacttaagcatccactgagattcaaatcttcgagacgagttaaatttaacatagaagaagggcattccatcaaactcgagcaattcagtagatgcaattccttgagattagtgttatttcccatagaggaacccagttgc

SEQ ID NO: 32461 - DNA, 2247 bp, Arabidopsis thaliana landsberg
aaacgaagatcttattgcgtgaaacaatcaacagagaaggtaatcagtatttgtatttgtatatagagattatatatatacagttagtgacttagtgtattcttgggtgacaaagaaaaaaaaaggttaatagactcttaatattagttctttgagtccatacacacagctcaagatccttgtgaaggcatacctagagatagcaaagtgggcacggacgggtcatgtatcaacctttgatgagtacatgaaggttggatatatctcaggtgcaatggatgattttgcagcatacagctttattggtatggaagatttacatgagaaataaaaaaagttctgttttctatgccaagtgataaatcgcccggtccagatggttacacaactgagttctataaagaagcttgggaagctgttggaagtgaattcataatagcgatccaatctttttttgctaaaggttttctgccaaaaggggtgaactctactattttagcgctcattccaaagaagaaagaatccaaggagatgcgggactaccgacctatctcatgttgtaatgtcctatacaaagtgatttctaagataattgcaaataggctgaagaggattttaccaaagttcatctcggggaatcagtcggcgtttgtaaaagatagacttctcattgaaaatgtacttctagcaacggaattggtcaaggattatcataagagtaacgtttcaacacgttgtgccatgaaaattgatatctcgaaagctttcgattctcttcaatggtccttccttatcaatgctttatctgctatgaatttccctggagagtttattcactagatatctcgttgcattactacagcatctttttcagttcaggtcaatggtgagttagcaggttatttcagaagtgcaagaggaatccgacaaggatgcgcgctatctccatatttgtttgtcatcagtatggacgttctctcaaagatgttagatcaggcagcgggagcaaaacggtttggttttcacccgaaatgcaaaaaccttggactcactcatctctgttttgccgatgacctcatgatacttactgatggtaaagtccgttcagtagatggcattgtcgaagttatgaacctatttgctaaacgttcagggttacaaatcaatatggagaaaacaacattgtacacagctggagtctctgatcacaatcgttacatgatgatcagtcgctacccatttggtttgggtcagctcccggttagatatctcggtctcccactagtaaccaaacgactcaccaaagaagacctctcccccctttttgagcagatacgcaatcgaattggaacatggacctcacgttatctctcttttgcaggtcgtttaaatcttataagttctgttttatggagtacaatgaacttttggatgagtgcatttcgattaccaagtgcatgcctaaaagagataaacagtatttgttcagcatttttgtggtcaggaccagagctaaatcgtcgaaaggcgaaggtatcatgggatgacatttgcaaaccaaaacaagaaggaggacttggtctgcggtctttaacagaggcgaatgtggtgagtgttttaaagttgatatggagagtaacctcgaatgatgattcattgtgggtcaaatggtcaaaaatgaatctgcttaaacaagagtctttttggtctctaaagcccaactcaagcttaggatcttggatgtggaaaaaaatgttgaagtatagagaaacagcgaagccgtttagcagagtagaggtgaataatggagctcggacttcgttctggtttgataactggtcgggaatgggccatttgatggatgtaacaggacagagggggcaaatagaccttggaataagccggaacaaaacagtggcagaggcttggagtaatagaaggagaaggaaacatcgaacagaacagctaaatgatattgaggcagccttaaaccagaaatatcagacacgcaatttgcttcgagaagatgcaactttatggagaggtaagggggacgtttttaagacaagtttttccaccaaagacacatggaatcaggttcgtaaaaaatcaaacgaggtggcttggtataaaggggtatggttcagtcactctactccgaaatatcagttctgtacttggcttgctttgcgtaataggttaacaacgggatatcgaatgcagctttggaataatggctccgatgtg

SEQ ID NO: 32462 - DNA, 2794 bp, Arabidopsis thaliana landsberg
taacaaatatttgctcattcagacgctcttcaaaagagcaggatgatcgaaattttgacaactttaacaagatctggtccagtcaactcccaaaaccgctgtagaacaacgctgtcataccatccgaacccggtgctttgtccagattaagcgagaaaagagcgcgcttaacttcttctgggaaatctctctagtgagtctctgattcatatcttcagatatcattactggcacatcccgaagagtggaatggaagttttatggctctgaggtgataaacaaatctttaaagtaatcaatcgcaagcctttccaagtccacctccttgtctatccaaagatcgtcttggttcaataaacaaataatcttcttccttgctctcttttgtttggtaatagcatgaaaatattttgtgtttttatcaccctctttcagccacaactcccgactttttagacgccagaatatctcctcttctctataagcatcacaaagcttccactttagagctaatagatcttcagcggagatagactcatcttcttgagcaaggtcgatcttattttgaagatccaaaatcctcttctcagaatttgaggaattagatttcttccaaatagaaattgattttttacaatttctaactttttgtgaaaaaagaactccttcttgtgaagagacatcccaacctccaataactaattctttaaacccccgtttatcaagccatcttttatcaaaaataaaaggtttaaataatcgttgtggggtattgtggattgatgctaggaggggtttgtgatcacaactccataattttaaatattccacattagtgtgggaaaagatagtatgccattcctcattagctatagctctatctaatcttgattaaatgatcttaagaactctacggcccgtaactccacaactatgtcgccccacccatgaaaactaattgccgtgtgatggcacttcgatcattccacaattttcaatcatacaacagaaagtgagaaaagaggattccgacctacttttaccaccttttttctcgtgatttcctataatctcattaaagtcactaatcataaaccatggatccgagcgtgtgagagcaatacgagtcaaacgttcccaaactaattctcggtgttgaactaccggatcaccagaaacaaaagtaataaaaactcggtttccatcaataatagtttcaatatcaataagccgatcactctcaaaaacaaacttaaccggatagtctttcgaatacataagtgcaagaccaccactgttacctattggttcaacaattttaagggaatcaaaacccaaggatacttgcatattttgaagatacaaaaagtcatttttagtttccgataaaaaaaaaacctggagagaacatacgacacatgtcctttagtcgacgggaattgagtgatgctcccgccccttgacagtttccaagctaagatcctcatgtgttggtatcggggaggtttggtgacctcaccggaccaacaattgaaatcgtaggcttgatcttgctagatggatagacctcgctcttcggagttgaagcggacctcctagaactcctcgacctggaagggccaggcttgtatattgcgcgcttactcggggaccggcctctgatgttctagatcttcttagaggctgagttggttagatgggccgagctgagaatcaattgtcgggcctaggcaccacctttctttttggaatccttcttttttttccttgggcctacatgggcccagattcttatccagcgaaacggtgagtggtgacggctcctcttcagtcgcgattatcttctttaggtcattggaaaggttcttcaccttattcgctacatccgttactccagcagcctctgtcaaacgagaattcatctcatcatgcagctcctcccccagcagatcatcctcctcagcgttaaagtcctcggctgagaggtgaggtgattccaaagagttgtatgctgcctcatcctccggagtccagtctaaatcaagagcttccgacactgaattaggatttccaatccaatctgctgccactccgctcgagccttgaggcaaagcttgacgacggagagtctcgccaggattagcaaagctgacgcaattagagaattgcttggccaggaaagtttcaggatcctcatttctttcaatttcttcctcttccacagtgatctcataccagcttttttctttctccagaaggctacccgtaacaagagggacatccgattctggaatggcattctccttcaacgctggctcttgggaatcaaaattcaaggctttctttgccgagcttcctatctccgaggagtccccgggaagatgatcagagggattcactgcctttcctttgcctttctctgacgtggtaaacttcttagctaaattcagacgaaaaggtcggtcatgaactcgagaaggtgacaaattgccttgtttcgctctagggggaaacagaaggggctcagagattgtcatctgagagtcggagatactagagacaacaggtcccacttccctctcatctcttccacgtgcactgctcggtattctttgtgagagtaagcacccctctcatgtcttgttggttcagtgacgttctttgggttggaggagtcaacaaattttctcttttgtccatctgttgacatgttctctttcgggtcttggggaacagagcgttttcccgagatatgagagcgagaaccatttgaatctctattttggttatggcg

SEQ ID NO: 32463 - DNA, 1515 bp, Arabidopsis thaliana landsberg
aaccagttatattatgatatatggtttgatacggtttgatccggttatctttggttattgtaaccatggtttaatgtatttatatgatgtatatataaaggatgtctgtagctggcagatctacagcccaagatcaggtggggctcgtgccctatactcttttttaataattaaacaattgactacagtgatatgaatatatgttaccttttattttctttgaatataggttaccttaattggtaagagtgctccacattaaatctaggcagcatggttcgattcccattacatacaactttctaattttattatttatcttcttttttttgccgtcaaaatttattatttattacaaattatgagaactgtttcatagacgattctaccacggacaattccttctgacccttattagatccacgacagacgacacttccttctccttctccatgcgcttgatggacaccttcaatatcttctctgcgtagaatcttggcgaacgactataattgtacatcgttgtagatctcatgcacacttgcctccattaatctgcaaatctgctaataaatcgcaatagctgagactcgaacctcagacctcttggtgtataagcattaatgaacccttggtcaatcattgggtcaagggggcttcaacaaatttagatactcttatagaatattttagataattagaataatgtaatctagatattatataagcaccctctagacttaagattaaaatattttagatattttgtagtttggaggctataaatacatcctccccctcttaaatgttgtaaaattgtcttcaagtttaaaagcaaagtaataaatgttctatttcctaaaactctctctcaaaacactttaacactttcttgattacctctaaaagaattttactctaaacaatttttttactcaaattaaagacttgtttttgctcaacaataattcagaggttgagtagaaaaatatataatgatttacaaaaaggaaaaacaaaacacaagatgcttgatgcttcagtttaagtgaaaatggtataagatttgtgtaagatccagggattaaagtttctggaaactcttgaccaatatagctagatggttagatgaaacctagctcgcttgcttttttccttttcgaaggttgcaagaaggaatccaacccaatagctccggttaaatcagccaagacagccagtgcaccgattcatagaccgccaaaagctgcagccgggttaatatatgggttcagttccttttgaaggtctctaggtgacaagacaatatcggctaaaaaaatgtctctaaattcatattaactgctttaacacttttgcaaatattgtttatgatatatttagaagatattttctctgatatatgttcaactagtaaaataagtgcatgtgcaaaactatcagcaaaaaggtatgttttaaaaagtttctagctactacatctatagtaatggtcattccaccttcaaaatgagt

SEQ ID NO: 32464 - DNA, 910 bp, Arabidopsis thaliana landsberg
gctgccagttcactggcaactactctcggtatatattttcataaactcttttgttttcgtgtgaagctccgatctgagtttttagcaatggcgaaactaaaccctaaattcatctctttgattcttttcgctctcgtggtgatcgtctctgctgaagttatcttcgaggagaaattcgaaggtatctacatttctctctcaatctcttatctagattcttagtttcaatttgatcgatgcattgttttatgattccatttgtgatcaattcgatgaaattttcttgatatcgttatgattgtgatagatctatagaatttttcgattctggatttactttgattcttcgatttcgaaattctgatcgatgacgatcaagcaatggccgctagattgtgttggcgttcgtgtaattacgaaattttttacgtgcttgatactagtatgattgcttatcgaatgatcaagcctttgaatccatatcatttgcaatcgtacctgtgagaagttttgaattccgatttctcgtctgatatatctattgttctgtgtcctttgttgtatccatgttctaaagatggatgggagaagagatgggtaaaatctgactggaagaaagatgataatactgctggggaatggaaacacacagctggaaattggtctggtgatgctaacgataaaggtatgtttcatgaccagtgatgatgttgattcactgattcatattctcatgtcaattataactctcttcaggtatccaaactagcgaggactacagattctacgctatatcagctgaattccctgagtttagcaacaaggataagaccttagtcttccaattctctgtcaagcatgagcagaagcttgtctgtggtggtggctacatgaagttgctaagtgatga

SEQ ID NO: 32465 - DNA, 921 bp, Arabidopsis thaliana landsberg
tggattccattcaatgggcatttatatgttctcggcccgttcttatcatatcttattcctcctgtaaaactattttcaagatttactgttcggattaaagtatatcacaattccattattcgaataaggactatcaaattttatctcttttttatatttttatatgtaaattttgaagaattattttatatttatatatagagtaagccatagaagttttgtaggactaatcatgggccgtgaccaaaacaaaccttcttataggcctataaatatactggactttatctgaaactaaatttaaacccaaaataaaacgatttgatgtgaataattttaaagctcaataaagaaaagatttggaatcaaaagatcataagcacgcacatactaattgctatcctactatattatttgggaagtacattttaaatgtaatcttaatttttgtaattaattacataataatatcattagaaaaatttaatcaaaaacaaaatcctttaatgatgtcattaaggttaccaaaattatttaactacaatatttatttcttaattatagggcttattggatctaaagacgggtcatcaaagatttcctaaactgaagcaaaatataccgaatattcaaatatctatctattaccaaattataaacaaataagttcgtaaaataatttaatattttatatacaaaatcaattaaatcttaatcacataaaaattagcacaaaaaaaaaagtattcaacaattaaaaatttatcaattctctgtgatatatgagtttttatactatattcgaataaagtgtaatatatattttcaatttgtattctttaactaatttaagctaactaatatatttgttaatcttatacctatcaaaatcaactattgtttcttatctctagagtatct

SEQ ID NO: 32466 - DNA, 2425 bp, Arabidopsis thaliana landsberg
ggttattcctaacgatacaaaactatggataagtttttgtctggtatcattacgtcctttcaaatgagttgatttttttattcttcatttcagggattttaatctaattagatttatatcaatttttggctggttctttatggatcggatcaggtcaaatatagccagtgatgtaaagttttgagtctcacttttttattagtttagtgcaaaacatttaatgtcgtctagacacatatgggtttgaaacttgaacgcgtgttataatactacgtcgactctaataccattgtgcttacaagctcccctccggtttagtgtaattaggtttaacggatataaacattctttcactttcaacaaccttaaaccaacaaatacaagaccaaaccctgatattccactcttactaacaggtttaataaaaaaataacatttgtcatgtcaacatggcaggttcctttgaagagcttggaatttaaccgctccatcgaagctcgtggggttaagttttccgatttagcttgcatcacaccgtttgccggatggtttggatcggaggaagaaggacgttgagttttatgagttcaatgtttcacgatacaaggcactaccaattattttatgagaccactcgaaggtctctatgtaacggtcgacctagacaaattggaggttatcaagatcatcgataaaggcccaattccaattcccaaagcctccggtacagaataccggtttggtgttcagaataaaccggtgcatatggatcgtattaacccgatttcgatggaacaaccagatggtcctagttttagggtcgaagatgggcatttggttaagtgggctaattgggttttccatgttaaagcagaccaacgagccggtatgatcatatctcaggccacggttcgtgactccgaaacaggtataatatagcaccataattcaagtattttaggttaaatggttcatttaataatattttttttttgatgaaatttgcctaccatcttttttcgaataacgtacgtctcacgcatgatgtttatttatgtggagagagcaggtaaaccaagaagtgtgatgtacaaaggattcccatcagagttgtttgtaccgtacatggaccctgaggaaggatggtactacaaaggttatatggatgcaggcgagctcggtttaggacccacggcaatgccgctcgtgcctctcaacgattgccctcgaaatgcttactatatagacggtgttttcgcctctccagacggcaaacccattgttcaacctaatatgatatgcttgtttgaacgctatgcaggcgatatcagctggcgacattctgagatcctttttgccaatgccgatgtatgtcctttgtttttttatttacttaagttttatgaactaagggtattagatctttttaaggtatagttcggatttttcggttttaagaaaagctaccaaatcggatatagtacgtataggtttaatatgattgagtttacggtttaggctttgtttttagtataagataactttttcttaaaaaacaagttttagttcaatttgtttccctttctaaccaatctaaatagacaaaaagtataactataataagcatataagggttaatttggttttcggtccctattttctggtttgattcggactggtttttatttgctttttggtttgaatgataattgattcataaattgacgacttaacagataagagagtcaaggccaaaagttacattggtagctcgaatggcaacttcggttggaaattacgactatatttttgattgggagtttcagactgatggtttgatccgtgttacggtatgtgaacacatttttttctgtatatgaatatttattttttaatcaagtttcctaagtttaatgctattgttaggtcgcggcttcgggaatgttaatggtgaaagggacaccttacgataatgtagatgacttaggtgatagggaggatgatgctggaccgttgatctctgagaatgtgattggagtcgttcatgatcatttcataacgtttcatctagacatggatattgatggaccgatgaataattctttggttaaggttcatctagagaagcagagagttccaacaggaaaatcgccaaggaagagttacttgaaggtcaagaaatatatagccaagactgagaaagatgctcagatcaagttgagcctctatgacccatatgaattccacattgtgaacccgaaccgaaaatctcgggtaggaaactcggctggttacaggatcataccgggtggtaatgcagcgagtttgcttgatcacgatgatcctcctcaaattcgaggtgcattcaccaataatcaggtattttaaatttagactatgcttttatatatcggtttatcactta

SEQ ID NO: 32467 - DNA, 2519 bp, Arabidopsis thaliana landsberg
aagcaaagagtgacatcataagtttaggggacttatttaggaaataatgataggatgaaataatgataggattggttctaccattcgaagaaccaaaaagaacctattacaagcatttgatatctaaggtgtagttgtacagacacattaatccgtgaagctataggttagtctagttttgatatctttcacacagggtttccctatgactacgtttctaaatggaagcagcactctcacaataataccacagtcataaccaaattaaaggcaaaatcaagctgttccaatgaatcatgcggatgaaaaatctgagtagaaaataggagctaatatggataaagaaccttgtaaatatcagcatattctctgtatctctgcacatgttgaggtctgacaggaaatccgtatgcatccctgttgacaaagaaaaaaggcgatatgagttcccactgatatattaaaagcccatccagagctcagacgaaaccttactatatccaatgacaaaattgcatctctcatcagtttgttttcaagaaattgaacaacagaaacaactcgaatttgctatcaaagactaccttcactaacgattatgccacattgagaacaatagtcaccactggacaaaaatcagcattcaaatccaaatcactaggatgtacttcaaatcaagaccaataatcatcaaaatcccaactaaattgttaagaaaatgcaaaattacgctaacaacaagacggattaaaactctcgtaatcggagatacaacatttcgctcagcgagtctagcaaaaagctaaagagagaagaagcgcaagttcaaaccaaaaaagaggaagcagaaatgtacaggggaaagggggaaaaacgcgaaacctcttgtgctcaaaggcgacgagaggattagaaggcttagaagcagcagcagcagcagcggcggcggcggcaacgctcctcattcgttagcgggaaaaaaagagatctaaccggtgaagagttggtgagaggacgaagaagaagatccaaatctctacgctagttcatcattacccgaatgaagttgaagcaggaggaggaagttgcagtagagagagagaggaagtggagaaatcacatggaaagggcgagattgtcgaccaaggtttattacatgtgtgactctctctctctctctctattttgactgcgtttcgattccttgacactgagtccaaaaggtctctttcatctttctctcatttttatatatcttttttactcctatctttttaactacttactgattttgtatgtaaatgtgaatttcacagttgtcttccaatattttgctatgtcaattttatcttcagataatttgattgagttaattatcttatttgtaagaccaaaatgacaatttgatgaaagaaaaatcatatccttatatctaatttttgtgtggttgtgcgagtctatatcaacctactttgaaagatagacaaagttgttattagatatgggattaaggacatctacgtcatgtatcatccttataagattcagtttaaagtacgaacgttattaatttgatgtatgtgtaacaagcgtgaacgtatggtttaccataccgtattcaatttgtagcgcgaccatggttggtctttaattattaacctcaaatagtcgaacttcaaaaaaaaactaaacacatttaccaaaatctttgattgatgagattcatttttaaccctaaaaagatagatatgcaagaaaataattgtggggattgtaatggttgtcgatttgtcggtaaaggaccaattgctttaggagttggtaaaggacttttctagggaattaaatatgtctttaattttttttttatttttttttaataagtttttcttagatttgctaaatccataatctaagtattcaccatattaaatttaatcaagtgggaaatttctatcatatattaattagaattcttattttagttactaattgtttgactctaatagaactttcatatatgtagttaatagtctcactcttttttcctttcaatcacacttggcaaacttaagagaggtttacataattgtgttaagagttttaggtgcaaaatcaatagaagatgaaacaaatatgaaaatccagatttgagaaattatgaagaatatccaccaatggctagttgaatatatacacagttataactttagtcaattcaatggtttaaatattataatctactatttcgtgtactgtatatttatttacctatatacgtacgtgtataatttggagttttgtttaggggctagtaaggagcttaaattcttgtttctataatactctcacgttctcaaacacttgtttacaaaaccaaatattcgtcggtttgggtaaaccaacacaaatgattatatggttgttcattatcacaatgattatctttcaaatgtgcaccaagttttttgttagtgttttagattcaatcatggaagtatggaaccacaaacgtacgt

SEQ ID NO: 32468 - DNA, 5926 bp, Arabidopsis thaliana landsberg
  unsure (1)..(5926): unsure at all n locations
ctatgggtagatagatgaagaattggtaaaaaatctatgaattgattttacatgactaacttgaacttgggtgcaacactaatctagatcttggtccaatatacgttctactaaatgagaaacaaaacattaaaacatttgaaacacataatttacaagcaagaggaaaataaaatgttggtaacctaaaccacccaaccttgtgtcaacgactcaacgtacacaaatacaattcctcttggctttaatctattatattacacattcctaagacaataataaatattttctttaaaacggaaacagaccgaccaaataaacgaaataataaatctcatacaatgcgatccatttgctatggcctcttgtgacgtatttgaagttcatttaacacagacggtagaaatttattgtcttcttcatggcttacctaatactattttaaaatagatatctttcattgcttaacaaatttataccaatactattttaaaatagatatctttcattgcttaacaaatttataccattcttcttttattcggcacaaatctatgttttgctatcatttgctttgttcggatacaaatgtaaaagagatagttatgtagtaaactaaatgtagtaaacttttaaataagaaaattatgaaataaactcaaatcagcattttcttgatactttctaatagtcttaaatatacacaagaacaaaacataagtatataaccataaattgaagttagctaaagagaacataaatctaaagatggtaaaggaataatatttcttgatttggcctgcgaatatattgagaaaaaagtttccaacaagttaaatgtatcttatataaagcattaagaatggtatatattaatttaaatataacctagaaaactatgcaaaagatttgtttgggtttgaagattatccacttaaatttggcaattaaattcaagaaactattggtaaattatatatgccaaaaactaaactggcaaaaaatattgaaatctccggagataaccgaaaaacctaagttttatcgattaaatctagtcatattctctagattttctctgaaattaaaaattattctgatgtctataaaaaatcacacattccatantaaaattcctgtaatcatatatttttggtttggttaattttttttttttccaaaacttganatanaactntatataataatactatgcaatagatttggtcgggttagaagattatccatctaaatttagcaactaaattcaaaaaacaattggtaagcataatatatctctgtagactatatatgccaacataaaaaatatttttttctgcaaaataaactggcaaaaattattgaaatcttcgaaaatgaccgaaaaactgaagttttatcgattaaatcttgtcatattctctatatcttctctctgaaatagaaattgttttgatgtctataaaaaatcacaaatttcatataaaatttctacagtattcaattttttttttgttttggtaaataaaaaaacttggttctaaaactggaaataaaacttgaaataaaactttgtataatactacaatgagaagcattgggaaataatatagcggaaaaaacaagagtggggggatgaaatgaggtagctgaggaacaagtacggcgcctcctaacaaaaagggatcgaaaaaaaacaatggagaaggtgtggagtgtggcggaggcagagaccacgtgctctctcttctcttcttctccttcatcttcttcctctcttcatcatctcccattattaactcttctgaccccactttccttctcctcttctaactccaacctaccctcttctctcttccctctctttaaaccctttctctctccctcattctcttccatgtcctcctctctgttattctttagctaaacacccacaattctggccttctctgatgcctctttaagccaatttgtatctctgcttccttacaaggtttaaagttttctgcttttgctgattttgttatttgggtgttttaaagttttgatttttatggtttagcaatcggaatttggacttgtttttgtgattttttacttgttgttggagttgggttttgttgagtttttgttatttgggtgttttaaagttttgatttttatggtttagcaatgagaatttgcacttgtttttgtgattttaacttcttgttgaagttgggttttgttgagttttcgacttcaatattgtagaattttagtgggtttggggagtttataatcattagttctgagatctctcagatttctaaaggaactcattattattgggtaatgatgctttcttacttgcaagatctttgcttatgattgcgttttgctttttctatactctttttttcttcatgtgattacgcaaaagcattgctgtcatctttgttaattccaccttgtaatctgaagcatctttgtttgttagattaagcaaccagattaggaattgttttaatattcctgttatgttctttcaagtcattttggtagatagcatcagtttctttgtaaagtgattcagtatgtgtttatggctgttttgtagatatatgcggaagcttgaagggcagtgacaatggctgcctcggttaacgggaatcatagtgctgtaagacctgttataaattatgagacggtgtctcaagtggatgagctctgtaaagcacttaaagggaaaaggccgatccatagtattttgatagctaacaatggaatggcggctgtgaagcttatacgtcgcgtcagaacatgggcttatgaaacatttggtacggaaaaagccatatcgttggtggcgatggcaacccctgaagacatgccgatcaatgcggagcatatcacaatcgctgatcagcctgttgaggttcccggaggaactaacattaacaattatgctacgttcagctgattgtggaggtgaatccaacttttgggaactactattatctgaattatcgtgttttactgtacagaacacatgtattaagctcaatttcagcaatgaagttttggtctttggagttatttttcattcatctgaacatctttgtctacaacctgtgtgcagatggctgaagtaacacgcgtggatgcagtttggcctggttggggtcatgcatctgaaaaccccgaattacctgatgccctagatgcaaaaggaatcatatttcttggtcctccagcatcttcaatggcagcactgggagataagattggttcttcgttgattgcacaagctgctgatgtacccactctgccatggagtggctcccatgtaagtaaatctactcttgttaagcttagcttgtgtaccagaggtatatattttcatttttatatactgaattcctatgttttcaggttaaaatacctcctaatagcaacttggtaaccatcccagaggagatctaccggcaagcatgtgtctacacaactgaagaagcgattgctagctgtcaagttgtcggttacccagcaatgatcaaagcatcgtggggtggtggtggtaaaggaatcaggaaggtcagcttctgtagatatgccttttgattgtggactaagccgattactatataagtacttattctggttttaaatttataggttcataatgatgatgaggttagggctctattcaagcaagttcagggtgaggtcccaggctcaccaatattcataatgaaggttgcgtcacaggtatggctccttaactatatctcttgatcgaagcttagctgagttcttatctggttactttactagagaatttaaagtagtaatgcattgcttttctttacatttcattttttctaattttttttttgtatagagtcggcatctagaggtccagctgctctgtgacaagcatggaaatgtttcagctctgcatagccgtgattgtagcgtccagagaagacatcaaaaggtttgttagtggttgattctggatttttaattgtctggttagtggttatatagaaaaacattctgtccatttattcttatatagttatatacatcaatttttgttctccaactgagttatagtcccttttagcgattgcaaattattgcatgagctcttaccttatcgtttgtatcgtagatcatagaggagggtccaattactgtggctccgccagaaactgtcaagaaacttgaacaagcagctagaaggttggctaagagtgttaactatgttggagctgctactgttgagtatctctacagtatggacactggggagtactacttcttagagcttaaccctcgcttacaggttggtttcatactgcagctttttgcgttgaaatatattgaaggtccggacttgaaaattgaatgacttgtttaacttgatgtttgaggtcaggttgagcatcctgtcactgagtggattgccgagataaatctttctgctgcccaagttgctgtggggatgggaattcctctctggcaaatccctggtataatctacgtccttatttcttacaggcagcggttcctcttctttatccatgcacacgaataatgtactgtctgtttctctttaatttcgtagagataagacggttctatggaatagaacatggtggaggttatgattcttggcgaaaaacatctgttgtagccttcccttttgattttgataaagctcaatctataaggccaaaaggtcattgtgtggctgtacgtgtgacaagtgaggatcctgatgacgggttcaaaccaaccagcggtagagttcaggtaatgtgatatctgtggaatgcaaagtgaaagttcattcactgagaactctgtgggtaacacttgtatgaacttgcaacaggagttgagttttaagagcaagccaaatgtgtgggcgtacttctctgtcaaggtaattatatctatagagactctgctatataagtgtttcacaatgttttaaattttacgactacttttttacagtctggtggaggcatccacgagttctcggattcccagtttggtaagttgaatgaaataaatgtatttgggctgctaggttcttttcttgagtttacaaaaattgaaacttcctttaatcttccattcaggacatgtttttgcatttggggaatccagagccctggcgatagcgaatatggttcttgggctaaaagaaattcagatccgtggagaaattaggactaacgttgactacacgatcgaccttttacatgtacgtttcttcttgcacacaaacttacactctgtgtatgcaataccctgacaagatcatttcaattgtcaaccaggcttctgattaccgtgataacaaaattcacactggttggttggatagtaggattgctatgcgggtcagagcagagagacctccatggtatctctctgtagtcggtggggctctttatgtaagaccctctttctcagagctctgtttgtcttgaaaagtttttatctggtgactagatgttgtctttgtccagaaagcatctacgaccagttctgctgtagtttcggattacgttggctatctagaaaaggggcaaattcccccaaaggtactccaatatcagcgctctcttttgtctttcttgtaatgttcttgtagcttacttttctctctcttaacttgcagcatatatctcttgtgcattctcaagtgtctctgaatattgaaggaagtaaatatacggtatgcgtctcctgtcaaaagtttacttctcttcatttttttttttttttttttccctttaccatattatctctgcactgaagatgttgtacccgaggctcactaattgaacatacctgtgtctagattgatgtagtccggggtggatcaggaacctacaggctaagaatgaacaactcagaagtt

SEQ ID NO: 32469 - DNA, 607 bp, Arabidopsis thaliana landsberg
taaagcatgtacgaagatgaggaaaagcattactctagttgctgcaactacgtcaacaaagaaatgcaagacgtggcatatctggtttgcaactggaatcttgttgagttggatgattgcactccacaagctaaggtggcttatacttcacctgtttctcaagacaacaacgcatggtacttcgacatcgggtgttctcgtcacatgactagtgaacaatttgttctaaattattttactgtcatcaccaatgggaaggtcacctttggagatggtggaaaaggaagcattaaagtgaaagggaagatcgagatagatgatcaaccgcacgtgtcaaatgtgtattttgttgagggacccactgctaatctgataagcatcagtcaagtgtgtgatgatgacttaactgttacgtttacaaagactgtatgtgttgcacttgatattcctggaaccaatgttctatctggagttcgttcaggcaacaactgctatatgtggaaagattatgaaatctgtttgttatcattcacttctaatctagatctgtggcaccaacgacttggacacatgaatactcagagcttagtcaagattgtgaatgctg

SEQ ID NO: 32470 - DNA, 9981 bp, Arabidopsis thaliana landsberg
acatttccgttgcatttttaaaatgttccaagcagaagaattaaagcaacttttcatcagtttatgccatttggtaagatgagcaaacttaatattaaatgagttataattatatgttctaaagcttggagagtgatgaccagaaaatactttatgaactaccgttcaccttctttaatatatctaaacttgttgaagttgtaaaatacagaaaaagataatataaaaccaaacaaaaaaaaacaaataaccattgtatccacgagaatcatgttttttttttgccatccttcatattgtcaaaattgtaaagattgagaatcttcacacttacaatcgcatatgtgaaacatccctacttttcttatttatgccaaaataaacagttcttttaaaaagagattaggtaaaagtccgcgttatgccactggtatttgttttgaaaatgtgtttatatctctaacaattttaaaactgttgatatatcattaaaactattaaaactattgatacatcaattttaaaactattgaaaatgtgtttagtacatgaatgcgtgtagaaggttcttgaatcctaacttgattgatgagacccagcgatgaaagcctaatagatataattgtggaatttggtatgaaatttaggatgttgtgtaagcgtgcagagaattacatggtggttaggacttgattagaactgttaagtgcatggatttggtttgaatgatcaaggtaatatgttagaaagatcaggagtttctacgttttcaaacccctcccacaggttaagtttattgtttcgcttgagggcaagcaaaagctaagtctgagaaagttgatatatcatgattttttactgatttctaacatagttttgggatagttttagagtctacctagtctctttagtatgccgtgtagtcattagaggcgcatatatacttttgagagctatagagcataatagggaactttggaagcttttcagcaaagaagaccagcaaaaacgttattcatgcgatggtgtcgatcgacacccttattcgacaaagaaaatccccacgttttaccaagtcttaaagaagtcccataagtttttcttatttgcaaaatagaccatgcacgtttttagtaacgtatatatatatatatatatatatatttttaaggtcattgtttagacctaagaaagttttgtgtaagagacatacttttggagagaagaatcatatccatttagagaacattctgaactccttttactctatttcatattataattcaatgcaatttattcaaatcaagatttgtgattctttgatcatgtctaagtagtcactttgttgagtttagggtgtctcactagggatttggatgaattagtagatcgaaaaccctgttaggataatatttttagaattcttcatcttagattgttcttaatgctagttttagagtaactaactagaacttgattttaggataataggtatgcccaccataggtatctattactggaactatcttagatgagcctactatttagatgcgtgctagctttgattacttaggtgaacttatcaaacctgattataatgcttgcttagttctagggatttacaagagagttgggatcaatactattaagcatattgagtttcatagaacaccaccggttactttatattagtgatttgtgttctagaatggttcgttaataatcctactttattgctagatcaactattctgatattttcttagaattttcctaaacccgacgtcttaatcatctgaatctacaaccaattttaattgctttcttgtcttttacttttataatattttctgtttagctttattcaaaactgttaatctattgtgtgatccgagaactttgtggaatttgatccctaagtgttataacaacctctttatttgagagagtagttatttgggtaatttgactcatattaaatttggcgcatttgccggggatttttcttcgattcaccattagattaggtgtagaatttagtctaagcttttcttttcttttgttacttacgcgtttttatttctttttcttcttgggtttcagaagtttacggaattcaaacgcaactcaagatgctgatagtaatacttgatgctgctggagtgttatgcgatagagcttgtcaagcataaacgaaaaggatcagaaaatagataaacagggaaacgtgagatcaaaaatcgttgagggtgtcgatcgacaccaacgaaaaatcagtgcagatagtcgttggatgactcttgctgactacaacagactagatctcttctattccaatcagtctgcaatccgaccacctacatttgaaagaagcgatttcgagataaaacctgcattctttacgcttgtgagtatgcaccctttccatggtctagcacaagaacacccgatggatcatattgagcgacgtgaagactcggtttcgagtattaaggtagattgtgtttcttatgactacctttcttacaagctctccccatattatcttgctgggaaagcagcttcttggcttaagcagttgaagcctcgatcattgacaacttgaaaagaaataaaagttgcttttgtgaacaacttttataatgatgcaaggtccaaggagaccttctcttaagaagcagctgaagcatttaaagccgcttggattaggttcatagaatataagagagattgcccgcatcatggtttcagtgaggtgcaactgttaggtatcttcttcagaggagttgattggtgttatcagatggttctagactcatcgagcaatggtaacttcaacaccacgtatcatgcagatgctaccactttgacagagaatcttgcatgtaacaatagtacgtagaatgcagacttcaagatgaagaagatagcaggagttgttccaagaaaccagatggttgaggtaaatgctaagcttgatccagaacatagcctacttatagggaagaagcaagttcactttgttgtagaagcagagactatcgcatcactgtttcaacaaggtgcaactcctaggtacctgatatgatttcacaaacttcctatcttaaactcacatataataatatgagactatgtcaatcgacacccttatttcggctgaggaaatttccgctttctgccaagtctttgagaagtcgtgaagtttcccttatttgcaaaatagtccctggacatttctattgacttatacctaattatttggtcattggtgatacctaagttttgttaagttttgttttattattgagagacacttgtggagagaagaatccaatccctacagagaggattctgaactccttttactctatttctaattcatcaatgcaaactattgagattatgatttgtgtttttgttatcatgtctgagtaataaccttgttgggtttagggagtctcaatagggatttagatggattagtatatcgaaaaccccttagggtcatttttagggttcttcatcttgattattcttactgctagttttagattgatcacctagaacttgatattagataataggtatgcccaccatagctacttgttatttgaacaatcattgatgagcctaggcatttaagaaagaacaggtatgctcatagaagggctttggtttagatactaggtgaactaatcaaacttgataataatgcatgctttagtataggatttctcggcttctacgattatcttagctctaagtatagagagtttcgcggtacaccaccggtcactctaaaattatagtttgagtttgagaacggtgcgataacaatcctaatattagctagatctacaatttatctatctcccgagacaattccttagacccgacgctttaatcacttgaatctacacctcgtttacttgcttatttgtcttttacatccaattgttttctttagcttattaaataacatgataagtctattgtgtgaacatcgagagctcagtggaatttgacccttaagtgctaacgacgatctcttatttgagggagtaagcttaaggcaatttgagctatatcaaggagctcccgatgaatcaccattagatcatttggaagtcttcaaagacatagtgtcctctatcaaagcagaaggtgtaccagctgattaccttctttgcaaactcttcccccactctctcgcgagcagagaaacatcatggttgcgtcaactggaaccaggttccctaaccaatcggactgatacaaagaatgcattcatgaatcatttcttcgatgagtcctgttacagaggcaattcgtttgcaaatttcttcgttcacacaagctccagtagagtcccttagagcatcttggctccgattcaggtcttatcagcgtgaatgtccacaacatggcttacaagagatccaactcatcaacatattctacaaaggaatagacaagcaataccagaatcaacttgatgcagcaagctcctgtaacttcatgacaagaaccactagtgaagcattacttgtcatcaccaatgcattaacttgtctttcgacgcagggatttgacaaagaacaaagaatttcagctgagatagctaccgcgagcaaagagactcctatttcagcaatttctgctccaatccaagcccccccccctacaaaaatcacaatcaaatacattatcagtttgagaatcacgtttccatggcagactttcacctgcaaaaaccagacggctacaataggcgattttaaaagaactgatctcttctacacaaaccgatcagcattcaagctcctccttttgaaagagatgactttgctatacaccctgcctattatgatcttgtatctagaggaaagtttagaggagctcctgataaatcactattagatcatttggaagtcttcgaagacatcgtttcctctattaaagaagaaggtgtaccagctgattaccttctttgcaaactcttcccccactctctcgcgagaagaagaacatcatggttgcgcaactggaaccaggttgttaaccaattggactgatacgaagaatgcattcatgaatcacttcttcgatgaatccgtgacaggggcaattcgtttgcaaatttcttcgttctcccaagctccagtagagtcccttagagcatcttggctccgattcaggtcttatcagcgtgaatgtccccaacatggcttccaagagatccaactcatcaacatattctacaaaggaatagacaagcaataccagaatcaacttgatgcagcaagctcctgtaacttcatgacaagaaccactagtgaagctttacttgtcatcaccaatgcattaacttgtctttcgacgcagggatttgacaaagaacaaagaatttcagctgagatagctaccgcgagcaaagagactcctatttcagcaatttctgctccaatccaagcccccccccctacaaaaatcacaatcaaatacattatcagtttgagaatcacgtttccatggcagactttcacctgcaaaaaccagacggctacaataggcgattttaaaagaactgatctcttctacacaaaccgatcagcattcaagctcctccttttgaaagagatgactttgctatacaccctgcctattatgatcttgtatctagaggaaagtttagaggagctcctgataaatcactattagatcatttggaagtcttcgaagacatcgtacctctattaaagaagaaggtgtaccagctgattaccttctttgcaaactcttcccctactctctcgcgagaagaggaacatcatggttgcgtcaactggaaccaggttccttaaccaattggactgatacgaagaatgcattcatgaatcacttcttcgatgattccgtgacaggggcaattcgtttgcaaatttcttcgttctcccaagctccagtagagtccctgagagcatcttggctccgattcaggtcttatcagcgtgaatgtccccaacatggcttccaagagatccaactcatcaacatattctacaaaggaatagacaagcaataccagaatcaacttgatgcagcaagctcctgtaacttcatgacaagaaccattagtgaagctttacttctcatcaccaatgcattaacttgtctttcaacgcagggatttgacaaagaacaaagaatttcagctgagatagctaccgcgagcaaagagactcctatttcagcaatttctgctccaatccaagccccccccccctccacccaaatcagaaaccagaatggagtctatgtttacgcagcttcttgcaggcctcacaaaaaaccagaatggagtctatgcttgcgcagcttcttgcaggcctaaccaagcttgatagcaaatatgattctctctccacagatctccataccaaatatgattctctctccacagatctccataccaaatatgacaatctacgctctcatatctccgagctatcacctccattagcctctatcaatgcagtcacactacgcagcggaaagcaactcaatccaatacttcagcgcgaaagttcagctcggacttcatctattccagttgtaggaaatgtctcagtgttaatcgatacatcagggtgtcgatcgacaccaattaatcttgacgactctgttttgactttgtcgagtggaatcgataatttcgtagaggaggcactaattctcgatggtatcgaacgacacccacctcatgtcgatcacaccaacaccaaacagacaggccagtgttgacatttgacagagcatgattgattccagacagtggtgtcgttcgacactcacctagtgtcgatcgacaatggactcagacaccacctatatgccttgcatctccacctgtcactagacaagtctacacaccacaagttccttgtctactgccttgagtgtctaaggatgagattcctgagatgcattgcatgggtatcatggatgagactctacttcagttgcctccggttgatatagataagttatcaccccctctttagagtgatatgctacgagatgatgctccagagaattaagatgacaagacaaagataatggttgtctcagaacaggtactcaacaacaccaagcgtccacatgaagcaagctccagattcgttgttgagaatcgatctgtagagatggctgagccggagttctttgttagagctagttttcgggttgagtttagtgatgatactccaggcactacagccacgtctcccaccgcacctctaccctttgctccacctctgaaacggcaaagctactcacctccccctcctaagcctcctgatttcatcaataagactttaaaatctccaaacacagttttacggttaagcaagccacaagtttctcgtcgagcgcttgttctttcttttgatgattgtgcaggaaagcggagtataccagccatacctttgtcctgccctactgacattcctcacttccttggtagaccgcacacaccgactgcttatacgccaccttggatgatgtgaggatctactaggaagtatttacttcctccatctgatccacctcatccccaaactccaccaaattcaaggtattgactctaaacaagcgcttagtgggaggcaacccactggtatggttttctttttctttttcttttatttttcgtttttcttttatttttcttgcttactctggatttgaatgctactgggaacaatgtcgtttaagtctaggggaggcgcttacgaactacgttttttctttttctttttgagtcttattcttattcttatttttctttttgagtcgttttattgagtcaaaattttgttaggaattatgatctctattctttagattattgcctgggtgattaatgttgcatgttcgactcaatccgacgattggaaaatctagatggcaaaccaacagacttgaggatatcctagttttccaacacaaccactaaggccgaagctaatctcactgctcttccttttacctcttcaaacggttaacattcatagatattgactgctagttcataactgatattgagaccaatatgataataagaatatgttcctctccccttataaaatataatgagagattgaaaagaatttcagatagtgtataggggtaggaatgtttccaatgaccccattattatacattatttagaatgatcaattacaaaggttggaaaaaataccgatggtgtcaatccagtatccgagttcccctttgtttactctcgaaaaaaaataagtctgtaggagagaaagaacaccaaagaaaaagaaaaaaatatataaagaaaggtcgatttatcaaggtatattacaggaatgagtctagaaggatcttgaatgttagcttgtttgatgagacccaacgatgaaagcctcgtggatatagttgtggaacttaggtatggaatctagaaagttgtgtaagcttgtagagaagtagatgttggttaggatttgattagacttgttaggcatgtggatttagtttggatgatcatggcaaaaggctacagagtgtgggagttcctttgttttcaaaacctcttccacgggttcggcttttgtgttttgcttgagggcaagcaaaagctaagtctgggggagttgatataacccaatttttaccgattttatctatgttttaggtataggattttgagtctttatgttatttctcgagtctttttagtgtcttttcaggtattctatgcaatgggacaacaatggagataaggagacattttggagcaaaatctaaggagaaggaagctaaggacgattttggttcaggaatcagtcgacgagtgtcgatcgacacacttttggtgtcgatcgacaccagtttcggcccagcagaagtccatgatgctttcaagtttacagaaaaggaaatttgccctagaagacttccctatttgctttattagtccctggatgttttatagggttcttatatagttgtttagacctaagtttcttttatgaagttctttgcaaatccctattttcagagacataagctattcatcccttgttctcgagagattcattcagttttcaatacagtgaagacatcccttcttactctaatcttatttgatgtgtttatgcttttttactcaattatgttgcttgtttcattcaatatgtctgagtagtcctcttgttgggtttagggattctcattaggaattcatatggtttagtagatcgaaaaccctgttaggataatatatttagaattcttcatctttgattgttcttaatgctagatctagagtaattaactagatcttgaatctagacaatagatatgcccaccataggtatctgtagttggatctattatttgactagcctagtttataggtgtgtaataagaatcagcctatctactaaggtaaagaattgaactcggttagaatgcatgtttaagttaaagttcttagctataggcatagagagtttcacggaacgccaccggttattccataattagagtttgagtttaagaatggttctataacaacctagctataattagatctactaaccaatagtttcctgagaataccctactcttagctctttattttaatcgttttacatcaaatcaatctgctgttttcttattttgtttacttttaatttcactcattccctgcaagcttaatcttgacattcaattcattgtgtgaacaaaaaaaatttgaggaaatttgacccttaaatactgcaaccgatctcttacttgagagagtaggaaggcaatttgaaccatatcataattgttaaaatcaagttcgttatttttacaaagataaagacattgtgcttttatgtctttgtatttcaggtacccaacacaactttatagactcatctctggtaggtct

SEQ ID NO: 32471 - DNA, 819 bp, Arabidopsis thaliana landsberg
tacaatgttcccttcatttctaaccttggcaacagtccgagtactcatcaccaagagcatctagaaacggtcttgtgatttcctcggtttcttcctatcataatgagaataagaaactggtaagcgtcgatagattttggtcaaagaacaaacaggtggaaagcattactctgttcagaccttttctgcatcaggaagatcatcaatatacaagaaatagtcctctactggtgatgctaccaccaagtctctgccagagatcaaagcatattgtgggtaaattcattgtaaatgtaagagtataaacaggagttgacgactcttacaggttattcagctcaaacatgccgatgatattcccatagatttcgagggagaacacttatcagcgtcaaggaatgaccctctatgagtaaaaaatagaagtaggaaacgatggtacagataatatatcaaactgactaggggggatacgggcttcacattctttgtcaaatatggctatcttcaggagctccaaagactggagataaaacaatataattcaggtggcaaaacagtttggattttaaattgatgcactggcgattgtgatgggtacagaaaacacggaatgtgaactcaaccttcaaaggatactatgcaactgaaacacctaccagacacgctaggttgattatgtgcatgctgaaggctacttcatcagtaggatcaacattgtctgggcttgcagtgcagtaccaccatctactagagagtttgagacaagtatatgtggtgtatgtatatcaccggaaagctcactatgtgtgatcatga

SEQ ID NO: 32472 - DNA, 262 bp, Arabidopsis thaliana landsberg
accttttcgcattttctcccaatcgctgcgcccctttgccttcgtgcttccctgctccacgcccgtgccgccgcacctgccatggcttctcttggtcatcctgaccgttttcagtctaaggaagcgcttaacctggtgcgcgacctgcttgggtggagcgcgccggggctcgccagaagaatccgtgccagcgctgcccccctcgacgatctcgccgtcggggagttcgttctgttcacttgctacatctcctacgggttgg

SEQ ID NO: 32473 - DNA, 639 bp, Arabidopsis thaliana landsberg
  unsure (1)..(639): unsure at all n locations
caaatgtgcaactggaattagttaaaaaaattaaatttatatggtttttataaaattatagtaaaatatgtcgcatatcagagcaaatgctgtaattatacaaaatttatgatattttcgatcacttaaataattctgaattaaaatctaatcacgctctttattatattgatattttcgaaagcattttaaaataaccttttataacatttttttttgaaaatgtctccaaatgttgtccattttcaatcaaatcactcttacaaaattttataaaatttgaataaggaaataaacagatttcgtttatttcaaaaaatcgtaaaatacttgataatttggatttcagataatcaaacataaacttagatgtaaatataagaagacaatttagcatgaacaaagtgaaaaaaattatgtacccagccactctcaagcaagaacaaaatgctcatcttattaaatctataaaaacaatttcaaagtccaaccaacatacatatcgccatagatattaagagacattntcatcaaattaagttaatccaataaaattagtattttaatatgctattctttngatttagttagattcttctaaacatttctagacattntaccgagttnnttttttttttt

SEQ ID NO: 32474 - DNA, 564 bp, Arabidopsis thaliana landsberg
  unsure (1)..(564): unsure at all n locations
gctggacgtgctcgatttgacaatctaaatgtggaaagttatggggattctcaaggctcagattctgaagtggttttggtcagtattgatggacatatactaacagcccctgtgtcagttgctgagcaggaggctgagaatttacggttaaatactcctcagtttcatttggcccctggtgatgggactgagttttgtgaaggtaatactgagtttgcttcatcagannnnnnnnnnnnnnnnnnnnnnnnnnnnnnngtggaggagtcatctgatactgctaatattgcatctgataaagtagatgccattaatgatgagcgtaatgatttggattcccattctcgtgataatgccgaaaaagattctcatgatgctgaaagagatcttcttgggagctgtctggagcagtcagagctgaccaaaactagtgagaatgtgaagtctgaggaaccaggtcctacttttgaggatcggaatctaaaagaaggtgagtttccacttcgcaccattaccggaaatgatagaagtgaagatgaagttactattgaatcaatagatact

SEQ ID NO: 32475 - DNA, 584 bp, Arabidopsis thaliana landsberg
  unsure (1)..(584): unsure at all n locations
agacttagttttcagagtgcgatggagataattaatgattagtcattcataattataagctttagattacatagaattatatagtaaaagaattttctatctataatggatagaaatatataaataataaatataaaatattcttatcaaaatctttcaagatatttcttgtcaaaatctttcaagatttataaataataaatatagattacataaaattatataattaaggattttctaagatttttctttatttttattttttaataacttctagcaaaatctagactcttaaatgaccaaggaaatttgttaaaaaatgaaaaaaagttaccaatgaactttactttttacacaaagcttgcacctctcacacaaacttccacctttctcaatgtcaaacacaagacannnnnnnnnnnnnnnnnnnnnttagaagatatgcaaataattatgcaagagattaatgaaagagaaagctaaaatgtaatccttgatgtacacacatctcaatgtcttttaagaacttcaaacatttcctccatcaaagtagtgatgaaataatccctgatgtacacacatct

SEQ ID NO: 32476 - DNA, 1348 bp, Arabidopsis thaliana landsberg
  unsure (1)..(1348): unsure at all n locations
gggcttttaattatgttatccataagctggattacacacccagatggagaggaaggttgcgtatattaaaagcaaagaaaaaaagtgacagggtcaatgaatcatcgctaatcctcaatgaagagataggagaaaggtgagaattggtttcgggttcttacacattctaaccgataaatattttcttcatgaaggaggatcctagcgttttcataatataccgagtcaaataccctcccaggtctccgggaattctcatactcatacaactgaagaagcttattgtccatgtcgtcagctacaacagcttgaagctgcaacagatgaaacaaagtcagatttgagaaggattataatgtttgaaaaggaaacatgatcaacctaaaaccaataaagagagtgaatattacctgtttaaccaatttgtatatcagtttttccaaagtgaataaaacatatgactggtttccaataatagctcggcattcatcctcaaacttggaattttcagctgagccattaagcagactaaacagagcattcataaacctgcagaacatacaaatacgagggtttataaattttactgaagtgaataaagaacctgcatagtctacataaaagcaatggaccaattgtatatctacattggttaaggaatgtaccttgcataaggatctggtgaacaagtatctttagtgtttctcagtttcatttcactgccggagcaatatgttttcgcagacagaattctctcgtacaggatctggnaattaaaagccattaaaaagaatttactaatattttcaagggtaaaagtactttttcagattaacgtgagaaagcaaatcataagaatcaattgcactcactcgatgaagcctgaaaaggacataaaagtcgtcattcccatagaatactctggaatccttctttttctcatcaaccaaagccgctgcagctatatgttttgacagaggcttaactgataatagaacacgttctgatgacggaaacaaccctttgtcttctataagatgtgactccattccctctgcctctccttcactttcagctttaccatcaatctcatcatgctcaccctcttcctcaacgccattatcgtcctgtgaacattcgtcaccaatagattcagttcccgaagcatcctcaccagcttcggaagcatcatcaccatcctcatcgtcagcgtcctcatcattttctccttcagcttcaactgaatgttctgttttcgcagtagccttcaactcacgatcttcgtgaacaacaaagaatgtcttcggaatcaccaacaggtgataattcaccttcctcctgccaattt

SEQ ID NO: 32477 - DNA, 919 bp, Arabidopsis thaliana landsberg
taaaaatagagatggagactcagctaatatatgttgtacgctgtgaacagcaaattgttccccacaaaaaaaaaagtccagccgtacaacggtacaagaagatacggccatgttgagaccttttgttctagaccccattttaatacacctataactataagtctctcgtcgttactacaagatatttgctactttatactatatttttttcgaattatcatatcttcaattaataagtacaaaaattcaattaaaaaatatgtgtaatctttatagtggatttacatcttttcatagtggattatccacgcaagactcacatcgcatcatatatctgaacttttcaatcaattaaatgttaggtgttgggacgatatcatggatatataattcatattgacttcaaatttaaaataattcattattattatatagttgataatgatccgtagtacggtacgtgaaataacttgtattttgtcacttcaattttatttcacagtactaattaaattgataactttgagataaaatcgaaaaaacaattttcatatccaaatcatcaagacgaatttctccgatcactcaaataaaaaagcagaagatcgaagaacaaaaaaaaacagaatcatcatcatctactctgtagatacatcttcaccagataacgatgcaatgagctccgatgtatcatcagcgatgccagatcggagagactctacaacctgctcgaacacgaatacgttacaaggaatatgaagaactcctttctgagtgtatccgtattcttgagctgatcgattcagcaatccaacgaaaacaggatgattcagcagctctgcactcaccacgaacctctccttatcttcgcctacgttgacgggaacgtgaccggaaggaacaccgacttagagaacgg

SEQ ID NO: 32478 - DNA, 1119 bp, Arabidopsis thaliana landsberg
acccgatgatcgaaaaaaccttaatgttgtaacctttgataaaactagattgaattgatgattgtcagaattataaagatacctagatttaacataatgttgcatttatttatcatctttttattttatttcgatatagaaaagtaaaatataaaaaaaatgagcaaaacaaatgtaaaatataagcaaaacataagggaatgtatatttatgtgggtctttgtttttatggtagatagatgagatcatctgagcggcatatcataacttttctattaacatgtctagagtttcaattgcttaaataaattgaaatacaagaaatataggcacacataaatatacatttaatacaagtttcacttgagttttcatcttcccttatagtattttgttaatacaatacatcctgtaagttaagaataaaaaaaaattgaaatacaagatataaaaaaagattattattatcacttttttacctacaaaattatactagtcatggaacaagaaatcatgttttacgttcattagtattttgaaacgcggcaacaacaaaatacttttaaatcgagccaacaaaattgatcaaaagattaatttatcgagattttcgttccataaatgcaacatcactgtaaattatgaccttacctcagtcataggaaatgtaaaaacgactctggaacgtccttggcgtgcactatcaactttggactatggggtatactaaaatataggttcaagagaggatacaaagagaagatggggagggatataaaataatcacggaacctaatgaagctgcatgttatactcttgacaaacttatacaaggaaactgtagattaactctagtggagttccctacgaattaagactatgactattttatcttgatgtgatcttgcccattaacagaaaacctatgaaaaaatatatacggaatttctaaaaaaaatataataatgggtatcttaatcaaaaaaaaaaaaaaatgttgaaaaccccaatctaacaaacataaaacttttcaaaaattataatataggtatattgtaaatatacttttttggtaactcactaaaaacaagggttaattaaaccttttaatgaacccac

SEQ ID NO: 32479 - DNA, 2210 bp, Arabidopsis thaliana landsberg
aaaactttttctcttttccgattccaatcttctctcgtctgttttcctcaaaggtacgttttatcttccttctgagagcttccgaagaatcaatctagggttaggtatttcaattctgatcggattttctctcttcagtgttctctaatctaatgggaatttcacatgttttctccaggttttttcatcactttatgcttcacaagcgagctagtgaagctaacgataagaacgataataccatcatcggttccgatttagcatcatctaagaaacgccgtatcgatttcactgaatcttcgtctgataagtcttcttcgattttagcttctggtagtagcaggggttttcacggcgatagcgtcgttcagcaaatcgacatggcttttggtaattcgaaccgtcaggagattgatgaagatctgcacagtcgccagctcgccgtctatggtcgtgagactatgaggcgtctctttgcttccaatgttctcatctcggggatgcacggtcttggtgccgagattggtatgtacttcattggttttatgttgagattgtggtctccctcgtctctttggtttttgaaacttgtagaaacactgttttcgtatgcgtcgttattagaagctgtgaataattgtgtcatcttcaaagattttactctttagttgttttgttttggttctcctgatctgtgattgctggtattcttcaacatccaaatcttagtagcttcctgatgttcttagttgttcgatatctttgttattggggtttcgttatatgccagttttctaagatgcatggtaaatgtgaactgttaatgatactttttagtcgattgctttctcattcagtttttgttttatttgttgattttcttcagccaagaatcttatacttgctggtgtgaagtctgtgaccttgcatgatgaaagagttgtagagctatgggacttatcaagcaactttgttttctcggaggatgatgttggcaagaatagagcagatgcttctgttcagaagttacaggatcttaacaatgctgtggttgtctctagcttgaccaaaagcttaaacaaagaggatctttctggcttccaggtttgtagacaactcatttgtcttgttattggttctatatggtctgagtcttttgtgtactgtatcgttctgtagattacttgtgagtttatgataacactgtaactgaatgagtaacataagagtgggttgttctattttcgttgcatataagagatgggttttgtctcatttagtgttaggctatttctagtgtttattgatattgatatggaagattggtgtacacttttctcattggtgtgtgtttcttgttggcgggttttacgctgatacatctacttttgtgccaaacaggttgttgtattctctgacataagcatggaaagagcaatcgaatttgatgactattgtcacagccatcagcctcctatcgcttttgtcaaggctgatgtcaggggtcttttcggctctgtcttttgtgattttgggcctgaatttgcggttcttgatgttgatggagaggaaccccatacaggcatcattgcgtctatctctaatgagaaccaggcatttatttcctgtgtcgacgatgagaggcttgagtttgaagatggtgacctagttgttttctcagaagttgagggtatgacagaattgaatgatgggaaaccaaggaagataaaaagtacacggccatattcattcacccttgatgaggacactactaactatggaacatatgtgaagggtggtattgtcactcaagtgaaacagccaaagttactgaatttcaagccattgagggaagcgcttaaggatccaggggattttctatttagtgatttctctaagtttgatcggcctccactccttcacttagcattccaggcacttgatcattctaaagctgaagctggcagatttcctgttgctggctcaaataggacgctcaaactatatcattgccacagccatcaatccggcagggtgatttaaaagggaaagctatcaaacttctagacactttcctttgagccaaggctgcctgaatcctatggctgcatgttggcagcttgttgacggagttgctaagcttgcttggaaaatttatccttcttcaagtaagttctttttatgactgtgaaacacatattatctttcat

SEQ ID NO: 32480 - DNA, 917 bp, Arabidopsis thaliana landsberg
  unsure (1)..(917): unsure at all n locations
tatccatatgatcatttaacctatacaaaatataatggttcatttttgatttcaacagataaaaataaaaaattatttggggtgaaagattgattaagagagtccaccattgtggggattaatttgtagaaacttctcatggaatctatttcccaccttattcttcgtcgacttatgatatagcacattcatttctttagaatatatatataacctgatattgatattttggtctctctactaattaaccaataaagaatgtatatatttcatctttttaccggaaattccgacctcagccaaatatatatatctgcagattttttgacggtgaagtgaagctaaatcatatcaaaatagatctgataaattgatatattccaacaaaaaaagagaggtcgcaaagcaaagcaagctgaaatgaaacagtaatgaagcatattccacgtcaatctcttctttaattttgattgcgttttatcttctccaaatctagtaagattcgccgtataacaataataaaaaacattgggatataagaataaaaatcacttgcaattcttatttcggcggataaatttgatattccacccacatacnnnnnnnnnnnnnnnnnnnnnnnnnnnnnnnnnnnnnnnnnnnnnnatatatgtcgatatctagtgaacataatttttatctaaacagatgaagaacagatatggctttcacatgttaacaaacagaaaaagaggacagatatagtgcgtgcttagtgtattcttatccactttgttggaccaacttcttatatgcttttatgtcgtatgttgtttaggtttcatcttaatgcagaacatattagttatagctcacgagtttaaaagtgtgtacatattgtaggtgtatactgttgtgaaccgctcattagtagttat

SEQ ID NO: 32481 - DNA, 1628 bp, Arabidopsis thaliana landsberg
acgagaggttcgttgggattttgatatatggatgaaaaaacttagggtacaaacctacttaacatgttaataatacaattgacgatataaacaaattaccagctattgaaccaacgatttgatttcaaagattgtataattatgggacgatgataacattattattaaaaggtaaccaaatatttaacgtcaaaaacaaatatggtataaggatataaaggtattttcatgataaagagaaggttgaacagtagttttttctgacacttaatttgtaatcttctatgtatatagagtgcaatttcccttatatatatatatcttatcaaaacgcccacacatatggcaactagtgcgttagttgggggagacgaaaaatcaaaagatctttgtagtttatgtaaagacgttgatatttattttctttgaaaagaaaaggaaatttttttcggaaacccaccaacccaaatgataaggatggacgtcaatcggatatcctgaaattttgtggtattttaatttactaagtttcgtagcctttcagacttcagatttcagatttcatgatttaggttatagttgtgtaatataactagattttatcccgcggtataccgcgggtgacaatttatctttttaaagttagtataatttttttttttgcaacttgtatctatctataatatatttttattttatagtttacaattgttattaagtaacgtcctgccaaacccgtcccgccaaacccgtcccgtaaaaaaaccatttatttatattaatgttgatcttatttatgatatgtttataaatcattgtctaaatatttttgtcaatgcgggacgttgaacccacaaatgttttgctaattggttaatatatgttcattttttaaattttgaatcataaaatatgacggaaaaaattaagatttttttaaactctatatattatataatgatgttaaaaattgtgatagatcaaattttttataagtttaaatattaataatgttttataaattttaaatatataaataataatatttaaaaaattaatatgtttgttcataaggtaatgacataataactctaaaagaaaagatttagaagatttaaatctttaattaaatattttcattaataaatcattaatgtcagtgacatgacattgtaaataagttcaaatacaaaatttatttatttaaacaaaaacgtttagtaagaataatatttatttaacaaaaaactttgttttaaaatattgttaacaaatatgtttatgccaattttaagggattgatttgaagtttgttgggattaaatttgattgataatgtgattgacaatttaaataaagaatttaaagtaaaattaattattttggaaaaaagatttaatgttgatggcattagatcgtaaataagttaaagtttaggatttatttgctaaaatgactgcaaaaatgtatatatagatttgctaactgaccaatcaaacatttttaggtaataataacaattatggttaatctgtatcttctatgcaataaataaaagcttttgaggaaaaaattacgatgtaattagaaaaattatgtaatatattttttataaagcactaaaaata

SEQ ID NO: 32482 - DNA, 973 bp, Arabidopsis thaliana landsberg
atccccactatccggtgtgccagccacgtcaccaaaccgttaggtctcgaacgcaaacgaccgttggagctttgtcttcttgtggcaccggacagtccggtacactggacaggtactgttcactgtccggtgcgcctctggcgctagctctgacttctgcgtgaactgttcgcgcactgtagcatttgcaggtgtccgttgcagttgaccgttgtgctggtagccgttgctctgcttggtgcaccggacagtctggtgaattatagcggacgctggcctcagaaacccgaaggtggcaagttcgcagctgtacggtcctggtgcaccggacactgtccgtcgccaggccagggcacacttgggtttctttgctcctttcttttgaacctttctttattcttttattggtttgtgttgaacctttatacacctgtagaatatataatctagagcaaactagttagtccaattatttgtgttgggcatcaaccactaaaattatttataggaaatggttaaccctatttctctttcacaagcacaggcatcgcctctcggcatgacggtccacgcgtgccaccagatcggtatgtgaccaagcagagactccaactcactattctaagtggtttttcgaatttgtttttgctctaactttttcgtggacttaagtgagatacctagcactagttctatgcttgtgtgctctatcatactatatgagacaagtctaggtcaagttactcatctaaaatccccctttatattacagctaaaaataaataacatgcatatttgtaatccaagtgtttgacaactccttggacacttataactagcaatccttgaccctttagacatcattccttagccatcgcattgatttacatcgttcgaaatgttttgttaaagtcaacttcctgtattgtgacttaacttaccgtgtagtctcaaaacatacgctagtcacaat

SEQ ID NO: 32483 - DNA, 468 bp, Arabidopsis thaliana landsberg
gggttcgaattggaagggggttggtttttacaatgaagctggacgtaatgagctgaataagtataaagtggagtatcaggcttctcttgtaaaaggtggtcaatcgttgaaagagaatgatgggcatcatcagccatgtgatacagaatctaatgcagatgattcgactgattctcatgatactcaaggggatgaatatgttgacatggggcatgatggggatgaaaatgaagaatctcacaaagataatcataagcacaatgaggatggtgcttttaactcacacaaagatagtcataggctcaatgaggatggtgctgaagaatctcacaaagagactgcatctgtgtttcttcattccacgaccaagcatcagaaaattgaaaagggacatggagctacttctaaaaggtcacgtgggaagtcttctcttcttagtggtaagtcggagaaagcatcgccggcctt

SEQ ID NO: 32484 - DNA, 4205 bp, Arabidopsis thaliana landsberg
tggtaattgtggattactactgttcaccaattatatttggctacattagaatttgttcgcatattcgtctttactataattgtattaaactctctctttatattattatttttttactttacattatatgttttatgtagccaaataacgcatctggttcgaaaaaacaatgggttatgttcccaagcttagactaactttccaagttagaggagatgacgattctatgttcatgggttggttgaatcagaataaggtcaattcgcttgctaagaatctcacgtatgctgaaattccaggttattttacttggagccaatcgggaaaacggtttaaaggaaagagaagaggatttgaagttgggaggattggtcatgttccccgtgagatgggagaatttttttttttggagaatccttctagtcctagatatagtgagagggccgacatgtgatgaggatttgagaagttacgaaggtgttgtgtatgaaacataccgaaaagcatgttcggctcatggcattttagaaggatgattagttattgcttttgttttcatttattatattgaaatgaaattcaattgttaacaattatgtgttggttttttgttttttaaagtgatgttaatacacatatatttgttaacccagttcgcggccacaactgctacgtctggggaaagtcggggctctcaatatccaataaatgttatcggaaaacacatctgaggtggtgtacacgtaaatttctgccctacagatttttacaattctggttagataatagataaagaatagaaggggaaaagaagggagctcttgaaaaatgaagaaataactttttcactaagctatatgtaatcgcagacgtgaagaagacaaatcgtgaccaaaactttaaacttttggcttttaccttcttctaatcaagacgtgtgttttctcttcattttttccatcttgcatttagtatgatatatggtggggaacttgaaaaatatatagtgacatgtaaatgttatatactgtgaattttgcatataaaaataattagattataaggatactttttttttccctcagtatgttaagatactttgaaaggtatattaaaggatctttgagagtcttcctcatgtaagtgttgttacgcctgcaaagaaaaaggctttcttgctgttacgtctaaaactctagaacaaccacaaatccttgttggatatcatgaaataatgcagctggtcttaagaataaaggattatagtaaaaagagagggagatattactggcattacaaagcatcatcgtcatcaataagaagaaataagcctttgtttgatttcttaggtcaatcaaatatctgatggaatttagtaacagcttgtgatccccatcagagctggaaataacgtgtgtggataaaatcaatgcgttaaacttcctaactgcatgcaggatagcaacagtgatatcatacttcaattaccccatgtaactatagttccttcactgtcaaacgcaaaagattcatgaaatagattacattagaatatgaagaaagaatcctaagatcagttgcgtcaaatcagactggttcagagaatcccataatattcaattaggtataattaagaaagtaagggatagtaggggttatacctttttacaattgcccatgactgaaaactggtttaggcaaatataaaccaactgtttccaagctttgtccttgacttttattaatttgaacggccacttattatcaggtggagatagtattatccttgggatgacgaccttcttgccatctcttgtagcagttcttttggattgtatagaagacagttggttttataacagaagaaatatgactttaatcgcattaaaatagagtttcgatcattatggaatttacggtcgtgtattggttttagaccccataattatttggagttacgtatttgatttaatgcattcaatatttagagctaattaagacgatttgacattccatatggactggagttacgtatttgaaacatattaaggagagtatttggaacatgtgtgattgattgtattatcatttaacactcttgagatttccttacttgaaacggaagttataacacaaaatcaaattagtaaacaacaccttaatattcattccaaacggactgaattaaattagaaaattattatgaattcgattaaatcctttgtgtgatgtattatcattattgtgtgtagacaaattttgaaatggatcaatgttcttagtttaacgaaattcattagaataatcattataattaaatcatttaatgggataatcaaataaatatatttgagtcatttaatacgtattattttgtttactaccaaatcggtttgacaaatttagaaatttaatgatgggttttaccaaacaaatttaaataccagagagataaaaggagttgcggtaaaaacaggaggacaggtgtcagctttataagtgccacgtgtcagcttgtagaagaatgcttttgtgaggaacccttctttattatataagataaaagtaataattatacctaaattatccttgttttcctttgcagaggaaaataatattacagaaatgtcattactatttaaatatcactatggcaataaaaccatatttatttacgaaaatgcaatcgtcgtttttggtaaatttgtggctcttgtagcgacgaatttgttatcgattacaaattttttggtcaaccacagattttttacaactgacttgttttgtacaacagactttactatgttatgttacgccagatttttattttttcgcatatttttttaccgtgattgatttgtttgatatattctctaccgattttatttaaatttcaaaattaagaatgttgaaaccaaatctgtcactgatttgttttccataccgcagatttttctttatggtggcaacacattttctatttgtacccaaaaatctgttgtgttataacagatttgttaacctagaaaaatgttatatagtcatgacagagttgttttgtgtaatcacagatttaattaacttgttaacaaatctggtgttttacggcatatttttgtaaaaaaataaaattactaaacagtcacatagtgataacagatttgtttttaggagaagatattggataattgaatttaaaagaattaaaatgaatagaaaagtgaaagattttaatgtatttgacaaattctatccaaatcacaccataatagttgggatttgtttcttcacgtttttgtctttgaagtgttttaaattctaatcaaatcacattgccaataaaacagttttaatgttgaataacagtataatttaaaagaattctaaaatcaacaaattgaataacagtagaatttagtaaaattctaaaaccaatcaattgaataacactagatttaaatagaattctaaattctttcatattcaattaaaatcctaccttcaataacccccctagtaataacagttttgtttttcagtgtcaaagcataacagatttactcatgtcaatgttctggccgatttgtttatgactagaataacctttttagtaataacagaatctttttggcatatttgtttttaaaatttcaaaattttttgttataagagatttattagctagccctcaattaaattatttccgatttcatattgtattttaaatccggtttgattctttttttttgttttttaaacgttacgacagacttttattagccggcagattttttcaaaatattgccatatttgaatttaatgcattaaatatccaattatgagtcaaggtatatcctccaggggcggacccactcaaggggaagggggttcacttgacccccctaaaataatgatatatatatttttgtatgtaaaatgtctgaaagttccagcagttcagttggcaatttttaagtgttgacaccccaaactcacgttcaaatctcaaagctgaccctcttagtatttttttttctgatttaactcaaatacatgtcttttgctttatatattaacttaatctttaaaaaaacatagcatttttatattacttttttaattggttatgaatattctctcttatagtgcgtgtattaaactaatataaaattaattatatcatttaatttataaaaaatattgac

SEQ ID NO: 32485 - DNA, 608 bp, Arabidopsis thaliana landsberg
gttctttaaacgatttctgcaaatttgaatttttatccacctcagttttcaggcttgcttcaagatatttcttttcttgctaaaatttttctgactgttggagcaattcattctttaagttgttattctcagtttggacttcagccaaagaaccctccaatagtctgaataacaaaatctttcttttctaatgcaccttcgtgctctttaaccatgatttcaaggtcctggatggcgaagtctttctttttcagattagcttcgtaattttcaactttttcagccaaatcttggatgacggctttgttcttctcttcttcgagatcttgttgcatttttagaaccttacttaataatagtgctatgttgaaacgatcttcgttagaaaacgacctaaaagataataataatagtaataaagtaacaaaaatatttgttaccttgaagttagcataaagtaagcttccggcgatatggtgtcgttggtaacggcagaggtccgcatccagcttcggcaagccactgtttatagacagggttctaccacttttagcttcgtcgcggtttcgaccacatctaagatgtacttcgatatcccctacatatag

SEQ ID NO: 32486 - DNA, 853 bp, Arabidopsis thaliana landsberg
ctctggatttacacagtcaaatcaggttattggctactcactcatgaccctagatataatcaagtttatcttcccattccgcatgcatctacgacaatgaaaagaaaaatatggaaagtacccattctccctaaaattaaacattttctatggcgcattttatccaaggctctagctacgtgtgtttggctacgtgtgttcggctgaacacaagaggtaatgcacatcgatccaaaatgtcttaaatatcaaaatgaagatgaaacaatcaaccatgcttgatttacatgtccattttctactatgacttggaggctttccaatacacgtgttttttatggtcatactagatctgatgatttagaggccagcatagctaaactcattgatggttttcaatcaccaagttcaacatatgagcataaagttcttcctttttggatcctttggcggatgtggaataatctgggttttaataactatagagaatcatgttcgaaagtggtattgaaagctcaagcagaaacaaagaagtggattttcagtaatggcacaaccgactcttcccgaaagagtacaagcacgctaccaagagaaattcttcattggtcaaaaccgaaaatcccctatgtaaaatgcaattttgatgcaagttttgatgagacatcttctcaagctcgtcgtgggtggataatacgagacaaagatggaatggcaaaggcatggagatcaagtgatcctaatggcgcaacatctccgttaatagctgaaacaaaggcgctccttgtcgcaatgcaacaaacatggatacgaggatgtaaggtggtaattcttgaaggagataatgaagtcg

SEQ ID NO: 32487 - DNA, 4593 bp, Arabidopsis thaliana landsberg
aatttatagtaattataatctaccaaccatcatccgggtctccaagcgccatgtcttgctaatctcaaatacacgttccaactctgtaaccaatggaccaacagacgttgctactcctatttcattccagaaatctttgtaatcagtttcaccagtgtcagactcgtcaaacatatcgcaattgaggcctgttatgttctcaaactcgtagagcgaaaatcttattggcctgcgatcaatcaaacaccacatctcatgcatgttgtcgactcgcaactgattcgtgaggaagaaatgaactgtctgggcagcccatataaatccactttcagtaaactttataaaaagaccaagtcagacctgattgagagaaactgtgtttacctataacgaatgtaaacacagtttctctagtgaatgtaaatccacttttacatcaatcaaaatctaaatgtgtttacctataacgaatgttgagaagagaaactgccaccacgagaggagagaaaccgtcagacctgattgagagaaacacaattcgccgccgtttgtgttgccggagaagaagaacatgtagatctacaacaacccaaaaccaattttcattagtcagagtcgatttcacaatcttaaatctgaaaagaggatgaatctaaagctgatttcacatctgattgactctgaatttacctatatcgaatccaattaaaaaaagaacccaacagttttcggcagtgaatgggaagaactctaaaccatcggacacgaacgcccaccgctgttcaccgccgcaggtcaaaccggagaagaggcgaactcctcaatgccgtttgtgcagccgaaacccacaacgcagtcaccaccggagaagaagtatccctcgtttgagagagaagaagcagcaacgccaccgccggagaagagatatcttctagacgagcagcgaccaccggagaaaggagccgaagaaccctaaaccatcggacacgaacgcccaccgctgttcaccgccgcaggtcaaaccggacaagaggcgaactcctcaatgccgtttgtgcagccgaaacccacagcgcagtcaccaccggagaagaagtatccctcgtttgagagagaagaagcagcaacgccaccgccggagaagagatatcttctagacgagcagcgaccaccggagaaaggagccaccaccggagaagagtagtcggcgttacgaggagccaccaccggagatttgttagggtttcgatttgaaatcaaagaagaagaagagacatgcaatataatttttgggtttcgatttcgagagtcggggaaaacccttttgcttttttttatttatttattctttatttctttatttaatccattcttttattaatgattttatttatttttaatcaaagtcacatttttagtataattctggttataaaactgattagggttaaaatgtctttagatttaaaatgtgagtcattctagtcagccatcaattacaagagtcatttaagttattaatcctaaattatgagtcaatctgagcaaaattcagtcttttgaaccacaatcctctagatcaatcttttcttgctagtcacctagggaagacttcttcttttgacactttgctcttttctaagtttatctttgttcccaaatacttttagcttcttttcttttggggaactagcttgatattaaactttctctttacacttagagatttagagctttcttatttataacctattccctagagactcctataaaaccattcatcacacctttcttttcattcattccttttttttttttttttttcaatcccaatcccaagtattcaatcaaactgtcacaactgtctccctcaacattgagacggcgtgctttcaccttacttatatctttcttatattccactttcttaattcaaatacaaaattgtcttaaaaataatcttaaatcattgaaaactctttaataaatcgtataataaaataacaaataaaaaaaataaaccgagattcccaaaatacaccataagcgagcacagacttgcgcgactactcacgattctcacaatgacctggggaaaaagggaaaaaaaggagtgagtaaagaattactcagtgagaggatcctttccgtccactggaaatacgatacacgattccacctttaaaccacactcaacaatcacatagaaatagacacaacactcatatagtccgcatcactatgcaaagctataacacacaactcattcttgcttaagcaagatctccacatcatttccaagttcgttcatctccttgacctttgaacctatctagttccactggactcgttagtctttgagctacaaagaatccgtcaattcaatgtagaccatttccactgttccactttttctcttttccactgttccacttttcatcatctcaaaagttggtgattccactttctcatataacacatataattacttgttctgacaagtacaataattcaatcatcctatattactagaacagtcatcatatcatcaatcctaaataacaattcattattactaagcaatcagatctattcctatgcaatgaatcatgaagcataaaaatagaaacttgtaatcgaatctccgcagatcacaccctcaccttggccacttgctgatgtagaacacttgtttcagctgcctcaaagacgccttaataactcttcagtgaaccgttaatgttttaatccctctgttgattatctagccagtagtaccatgaagctcgccaccaaatttcgtcccgatcggcatagtttcagacctctaaacgtcgcctcgaagaagccaatacaaaatagatttctgggattccaagttaaccagactctgcagttactgtggattcatggaactgtgacctttccaaagacgtcttattcaccatctaacgttttctcgtatgacgagaatcagcctcgcaaaaccccaacttgaaactgcacttttcccatcatcttcttccttctttgattctgttttgctttgccccaacctagaatgttttgatcttcttcttcgtcaatcccccttactgttatgaaccatatcttcccttctcaatgtttttcctttccggttatgttgatcccatctctccgtcacgtctcgccttcttctccggtttcttcttcttctttgcaacaaattctcttctccttggtcatatcacgtcctctttgttagatgtggctcacgatctccttccaatttaggttttgcgttttcttttgacggctttcatgaagaaggtgatacatacaccaatatatactcacacgtttagggttttaagttattaggagagatgggccattgatgggctaaagtacggagttgggtctcacatttcgttttagttttagtttcaacaatcactttttttttttttctgattctattcctctatatttctttcatacaattccaactagttaccgttttcataagtttgttaacagaaaatatgaataaaagagattttttcagttactgttttcctaagtttgcttcttatatagcaataatttcctgtatttaagatcaaattattgattaaattcaaaatacttatttgatgggtctgaatagtatattcttctaatttttaaaaatgcaaaaaaaaaaattaaatatcattatatctaaacaataaattgataacgattaagtttcctttggtttgtacatagttttaaacaataataaattgccgattcattgacatcgttttaaaaataaatcgtgttgagtctcttttgtgttattctcaacttttctcaatcagacaaaaaatcgcttaagtctttcaatttcaatggagtctatgcaacatctttctgatttagatgttcggtatattaactagagggcttatgttaagatacaagctttgtaccaccataatccaacccttaacgatgatgaaatgactatgctactggttgaggaatatgtgcgtttataccctaatgttatacatagttttctgtctcaaaattagtctgtatatttctgtaaaatcgagtgacaatctaaagttttttttttagggcacctatatcgatacaaaaattccagaaggctcatacctccacaagttttgggaagcactgagagtcagtttgtggcactacatgtttaactttcaagtgattttgtcttaaagtgaagtcaaatacgccctcagatctatttaaatcaagtgtatgttacaaagaaaaatgtggcctattcctcctaggtcaggtagaaacttctttgactttgtggctcctgatgaagtgaaatatccttcagatgaccaactgaactgcgtgacaaggaactatcctgatctggttttctaatatctttacataattttataaatggatattcagtttctactattaattttcatatctttgatcgttagacgctatttgtgtgatttccaaagtgtatactattcggaggttcccatttatatgtcgtcaaggcgagacagactacgattcaagatatgtcgctttcaagatagaaacaatatg

SEQ ID NO: 32488 - DNA, 686 bp, Arabidopsis thaliana landsberg
tttaagatatgaaaagtatttatatttacaaattgatcttagttcaaactcatgatgacatctcagtgatctcactttaatcattttctccactataaatataatatcgaaaatgctatttaagggataaaaatatatgatagataagggagatatgatttttaaaaactgaaaaacaacaagcactcatagtcttagatttactcaattccaacagctagatatacatgcattgaaattaatttcaaaaagatagcttatgaaggaattgcttcttgaatttgctatatagctttgatcatgatttcttgaatattaagggataggaactaaggacacactatgattacactcttacacacatactcaaatccatatagtaaataaagcaagtccttaaatcaatatatatccataactcttaaatacttatgtttctttttttgtttttgaataagaagatactggcagttgttttagcaacaataggagctatactgtctttaagaacattggagaactcttttgacaacaaccatcaaagacttggtttggctctttatgctgccatgtggctccaattcttgacaggtgtcttcaagccctcaaggtacatatatacacgtaacatatacatcttttttatgtacctatatatttacaaatgcatcacccttgttgcgatt

SEQ ID NO: 32489 - DNA, 536 bp, Arabidopsis thaliana landsberg
ggttcgaggcgttcgaggcgtcataggcgttcaaggggttcggcccaaggccagccgcggcgaaactcacctggatcccgggtcccgtcccggcggaaggggccgaagtcgaccgggatcgcacgaaccaggccgcgagcaccaccgccacggcgaggatcgcgagcacgcgcagttccggacggaacttccgctcgttcataccggaacgctaccgaggacctgcgagtacacggaatcgcgctcccgcgccctggcgcggacgacgcctacacaccaggcaactccgaaacttcatataccgggcattcaccccaccgaggggggcctccggaaggcgcgaacaccgaaggcttattgctaagggtgatttttacatgcactatgcatgcaaaagtcaccattagcgcgtgggacgagggttgagcggcgctgcccccgggcagcgaggggtgattcgaaaaaattcgcgagatccaggcgggcacggcaacagggaaagaggcgggcgcggcaacagggaagaggcgggcgcg

SEQ ID NO: 32490 - DNA, 844 bp, Arabidopsis thaliana landsberg
atacaaactttatatagacacccgaatatatttacgtcatctgtgtatatagatgttatatatgttatttagttgagctgtctgttagtatttgaaaaccaagttgaaatcggcaaaataaataaaacttgagaacatttcttaagagttttgacctatttttatgttccagcgggaaacaattggtacttgaagaacgggcaattacaaaatatttacaacatgcatttgatatttaatttttctaaaacatgctaacaagttaggaaattcatgtccaatgccaattagattttgatattagctatacacaatttgaggccttattttaccaaagaaataaaaaggagaataagttgaggccttgtgatctaagttggcgcaaatcaataacgatgcatcagtcagtacaccataaactcttatgaaaaatacttggcttcatccctagaaccttatattcatcctttttattttagccaattaaaatttgacatctaataataataaaaagaatttaatttaattataaaatctaatttgccactaaaacgaaattatgtatcggcttggatttattagaaaaggtcagggtttagattttatgattaaacgaggttaaatatcggcttgagtatagaaagtacgattagggtttagattttatgattaaacgggctaaatattggtttagctttataaacagatttagattttacaattaaacaaggttaaatgtctgtttggatttagaaaatacgattagggtttagttttttttacgattaaatgagtgtaaatgacggtttacgtttacataggagaattaatgtgtaaattttgt

SEQ ID NO: 32491 - DNA, 1505 bp, Arabidopsis thaliana landsberg
agctaatccaacaaaggctttctcctagcctgtttaatagtcttataaaagactcaccctgattattgaggttgtcattgcaacgtgtccaattctaaagaaggctctcgaccatgtcattggactagtaagttgcgagtggcatgcgcatgaggattgtatctctttagctcttccatattattcatgaacacttcttcaatgtagcttcaaattgtttttcaaagagacattgtagttctatctcatggttgtctctcttccaattgtccattatatgccttgaacattgtcgatgctcaacttctggaagtatggtattgatagctttgactagaccctgtaaaataacacaaaaacataagcgtaaacccttcataaaagacattaaactgaagcaaaagatgataaaattaactgattatttatctgaaatgatagctagatgttgcatttcacagtcccaaactagtagagagctgtctcaaaaaccagtcccaattatcattgttatctatctcgacaactgcccaagctataggaacaatcctcttatctccatctcttccaactacagctaaaaggtgaccttttacatcccattttagaaaacccatctattcctatcacaggtctacaagttcgcttccaagaatccttttgagatttaaagctgatataatccgctggtggagctcgaacaacatctttggtgtcatcttcgcctcgtggtggagcttcatcattgtctaatttgccttccattgatacaatctaggactccaaggatacaaattcaagatgaaatcaaataaaaatcgcgatttcgccaaagtaagaattagggatttggtttttggaaattagggattttgaaatcaaaatgggaatttctgtttcagtttatgaaacgacattgttttaggcattaacagaaaaaattaacgtctgctaacaggggttatcggatccgttaatgcaagttaacgtctcggggattttggtcaggtcaactttatgttttgtgttaaatggcgggtcaacgtctttatcatgttttatttggccgacctaaaagttcacgtataaaatggccgacctaaaagttcacgtataaaatggccacttttgaaagttcacgtataaaacgacatttttcccttttcaaaaacctaatttatttcgcataattattgttcgttttgaaaagtaggttttgatttaatattaaatttattcggggaaaaagaattatacatttacaaataggaaaaatgggtaaaaaaaacctcacctttcccaaatacatttaaaaaaccctcaactttttgtaggtttttaaaccctcacctttttaaaaatggtaaaataacaattagcattattaaaccaaataaatacaaattaaatactaaataaactaatatattaagacataaaaaacaacataatttataatctatcttttccaaatttgagtttaggattttttttcttctaggatt

SEQ ID NO: 32492 - DNA, 841 bp, Arabidopsis thaliana landsberg
aaagagcctacgcttgctgggatgcaatcttacaagatgggatggggctaaaagaagaaatcattgattactaccaacccaactagggccattgagagaggccttggtcccactagctcattggaacgcactgcccatcggtgataaaaaacactgtccaacttaggtcttgtgatgattattggtcaaaagagacgccccacgaatcacttcacatattgccaccactatacaccttaaacctactggagagataaccaatctcttgtatgggctgagaagcaaagaaacaacaacttcgaagatggcattaaggttttagaagtgaccgcggtggagatccatgctattgtgaaaaatatataccctagccagatcctactaaatgatggacactactgactcgaacactattctgatgcattagaacatttatatgctatcttaaaggtataacagcttctctgcagaaggaatttggtgatgaactcaaccatagtaataatatatgtcttattccaatgcgtccttaaccgcaaaatacaaaatatgcttagacagattattgccagtaatagttttggtgcagaatatcaattttaagaatttgatggatacatttcagagagttcttaccaactaaacctttaaacacggtttctacagatattaaacgtttgacggtcagaaacgacctatattctgtctaatttgattaaatatttaagagagaattatgattgagattattaataaggtctgatctactcgtttcacattctgtctaaattggtcttgacagaatccatattctgtgtgtaattaattcttagtatcacct

SEQ ID NO: 32493 - DNA, 503 bp, Arabidopsis thaliana landsberg
aggccaacgccacctccaaagaaccaagtggatatatcgagtattatttacctttctgtcaagctctcagatcaatatggtcaggcaaggggatggatgaccttgaagctgccattcagaaggcagagagggctgtgagcaacaccacagaagaccatcccatgtttgcaagcaggttaactgaactgtctgccatgctctctattcaattcacccacacgggaaagatggattgcctagaaagagctatttaccacgcatgcagagcagttgatattaccccagaagaccatccggaccttgcaggccggttgtctatacttgccaacagtatgtcagatcgatacgagcaaactggaaagatggaagacctggaagaagctattcagaaggcatggaaagcagttaatgccaccccagaagatcatccagatctcgcgagccggctatataacctggctatcatgttctcatgccgacatactgaaacaggcaagatggat

SEQ ID NO: 32494 - DNA, 1358 bp, Arabidopsis thaliana landsberg
  unsure (1)..(1358): unsure at all n locations
aaaaaaaccaaacaaataaactaagatggatgtagtatgccacacgtccaattttaatttttatctttgtaatatataaggatacaatgattgtggttattttttaaaaatgtatatctttataaatcaattttaaatctcttgaggttttgctaatttaggttattataagtaaataaatataactatttttaagctactatgttactattttttattttccttattagtgaaatttgtaggattttcacacatgttaagagaacatattaaaaaaatatatttttgtgatttacaatttgcaataactctaaattaatagtactcaaatattttttttcaaaatttataactcatcaataatagctaataaatattgcatagaaaacttaaaatatttttttggaaactaatttttttttttagaaaataaaataataaggaacaaagagagtataaattatgaactattgaagataatgatatcaataacaaatcataatgataaacagctcatctaaaaaaaatctcatatccaccttctcttcaatgtttactatatgtatagtgatgatatatgtgacgtgctatgaaaagtttcaacaagatggagaaccattttcaatcagaggtcctcttacgacaatcaaggtacaaaacaataatgactatttgcttggaatccactgtaaatctaaagatgatgatctcggtttccacatttatgtcaatctaggagattcaacactatttctgtggatttagctaaggacgagataataaaggcgtgttcaaaaatttataattccaaaatatatttttatagatgtaaaaattgtacatgggaagcaaaaaaagatggtttatatggttatagcaacttgcctcagacagttatatggttttttaagtggttaaagtagtattaaattgtattattgattcaaatataaataaaagaatgagttaagaactgtataatatttgcatatgatgttttaacctggaaataaagaattattgtgaagtatattagagcaaattttagtaagagagcgaataagagacgtgagcttataactcaacatttagaaccttgaaccgtaactcaacattttttagttaagttgaagaaaataaaaagggccggagagggatgcttaagaaaacaaattcttcggaggaatggattttcttcttgtggatgataaggtacaattggnattaaaaattgtgagtatcttcaaagttatttagtggaaacatctactcttttatatnataattaatgggtattccaaaatattaattttaagaaagataaaatttggagtacatagtggtttaggagaaaaaat

SEQ ID NO: 32495 - DNA, 499 bp, Arabidopsis thaliana landsberg
acgacgttcgaagaaactccagtggtctcttcattttcttttttgtaaactggtaaaaattggtggtctcttctttgtctccgagtatggagaaaatgagagggaagcgaatcagaccaagagattccggcgagttagtcgaagatgggagatctgaaaacgagcataagacgaggaagaaagagaatgatgttgtgagcaaaagaagaatcggaagaggaagaggagaggtttcgaagcgatctattgaaatagacatttctgatgccgagaaggttaattcctttctataattgcttcattcaaattgatagatgaatctcttgttacctgaattctcatgattctgtggagttgttaaaaattcctttctcatgcaattatttagctgcaaaatttgtctgaatgttgttcatttcgatttggtaaattttatttgttcggatgtgatgagaatatgtttttggaaccctaattctcccaggatattgagtctccg

SEQ ID NO: 32496 - DNA, 6699 bp, Arabidopsis thaliana landsberg
  unsure (1)..(6699): unsure at all n locations
acaccaactcatacgacagaaaccccgactcctcctcttcaacactctccatctgtgtctgaacaaccaccgcttgttcgtcgaaagcaactgcctgctcttcgtcaacatcaggttcctcctcttcaagaacagcctgttgagactccaatcccggagcaacaattcataccattgcatcaaaaccctaactacgaagaggaagatgaggtggacgatggggaagaagttggtgacaaagttggtgattaagtcggggaagaagaggatgaggaagtcgaggaagaagaacaaaaccctaatgtcgattaccaagaactattggatcgattacttgccctgccaaggagacaatatctttcgattctgtctaaggagccaatcccaggagtcgagactctctggtaatatctccctttttctcgagtattgagacaggtaggattttttgactggtaattgagctgagttttttttgccttttggatatgtttttgtcattgatcatgtgtggctctaatgctgatttggtcttcagtctttgttttaggatcatgtgtggctctaaagccttatggtagctcattaattcatgttttatagccttatgttagtgtatttcgttcttgaactctctgttgagattctgtatttgatctagtgttgatatggtctttagtcaaactattttgtattcgacttgaagattaaaggcctatttcagctcattggttcttgtttcatgaatgctaatactctattggttgcatcagtttaagtcgattatgtttatatttgcaatggcttggtgtttaccattagctcaacttaatacttagttggatatttttacaggtttaaccggcacaatggaaagctgtctagagtgatttctggaatatttcggaggaagtttgatggaccttacatcagttggaaggttactccaatagccacgcaagagagatacttcagaaattttgcggtaatgtcaacgatcacacttatcattctgtaattgtttaatttggctgactcttagtatctttgctaacttagctgcttatttattatgtagcggaagtattattgggatcaaggcgttactgagctcgtcaaagaaggatcattggttattgccaagaaaaggatgaaaggaattgtcagtcaagcaaagaagagtggtgaacaaccaccgtggattggtgatacactttggaaacagatgtgggtgcattggaacactgaagatgctcagctgaagagtgagacaacttcaaactgtagaaactcagatcgtggaggtcttggagtgcacaaacacttagccgatcagaaatcgtttgtgcaagttcatcaagaaatggtaagagtctttgtctttccattcaaacagtcacttaacagctttctattataacctccacataagcttgtctttgtctgtctgatttgttttggcaggaggaacgttttaagcgtcatgtatcatatggggaagtgtttatgcaaacacatacaagggctgatggatcttttgtagatcagagatcttagaatgttggtgaggcttatgtgaagatgctggaagagaggatgtctcaaatggacgaggatggtcctcaagtgtctgacaattcctcgcaacattcaactcatcgtacgctcagcattgatgaaaagaatgagattttccttaaggtaattcatttctgtttttattttgcttacaatctgcttgtctttgtttgcttggaatataattgattatgagcaatggatagttagagtaattatgaatgtctttggtgattgtatttgtcttcttgtttcagtgtactcatacagatggcaaagggaacccttttggccttggatctcttgtggagacactgaacaaaagaagaaggaaagagagttatgcgagctcgtctacatcaactgttgcgcagcttcagagcagctgcagctcaagatatctgaacaagaggagcaaaatgcaaaacgtgatgaggagcatcgccaatcnnnnnnnnnnnnnnnnnnnnnnnnnnnnnncgtcctctttatgaatgacaaagatcctgagttggctacttatttgtcaactgattctactgaacttgaaccagccacacatccaaccaccacaactccatccacacttccaaccaccgcagccaccgcaccagccatcacagttgtaggcaccacacccttactctccacttcagctactatttctaacacttcttctaaccattaaacatgatcttttgttgttttggttgaaacttgtttaggatgatgtatgactatgattttctgaatagaattagtttatggatgatttgtatttgtcttctctctgtctttcaatgttatcaggatgattattggtttttgaatcgttattaatcaggttttacattccaaacaaagaccaatttgtgactaaaccaaaacaatacatgggactattttgtgaccaaacgaattatataactgtgaccactttgtgaccaaacttattcaaaatatgtgacaataatgtgaccgacccattacaaaacagtgaccaatttgtgactaaatcaaatcgaacaaaattattaaatagtcgcaaactcgttgctaaaacgatgctaatttgcgattacgttacatggcgtcgtaatttagtcacaacagggaaagactactgtgcgactatattgtaacgtatgtacctaagtgtacaacgttgcagtctagtcgcatatctgccacttgttaatgtcgtcgcaaagctgtcgcttatttacgaccattcttgtatgtccgaaatttctcgctaatatgcgaccaatttgggactgcaatattttgcgacggttttttagcgaccgtttaatatcgtcgttaagtagtcgtaaacacctagtttgcgaccattttgagaccaatatgggaattgcaaatggtaggttttcttgtagtatatcgccttagtgagtacttgataaaagaagtctataaaaatgaccctgttagtccatgcatctttataaaaagatttgagaaaggatttgttataattgcagtttatgttgatgatttaaatattatgggaactcctgcaaagatttccttcacaatagaatatttaaagaacaaattcgagatgaaagatcttggaaaaataaaattttgtttgggactacaaatcgaacacctaaagaatggaattctggtgcatcaagagacatatacagaaaagtttctcaaaagattctatatggatggagcacaccccttgagtagcccaatggttgtaagatcacttgatgtggataaagatccattccaccctcgggaaaacaatgaagaagttcttagtcctgaagtaccatacttaagtgcaataggagcactgatgtatcttgctagtcatacaagacctgatatatcatttgcggtgaatttattagcaaggtttagctcatgcccaactcgaaggcattggaatgaattaaacatatacttcgttaccttcaaggtacaaaagacatgggtctgttttttcctaaccaatccaaggaagatttaattggttttgcagatgcaggatacttatctgatccccataatggtagatcgcaaacaggatatgtcttcacatgcgggggtacagctatttcttggcgctctatgaagcaaactattgcagccacatcttccaatcatgcagagattttagcaattcatgaagctagccgcgagtgtgtatggctaagatctgtagttcaccatatacaagaagattgtggtatgtatgcagggaaaaagactccaacaattatgtacgaagacaatgcagcatgcatcgcacaactcaaagacggatacatcaaaggcgatagaacaaagcacatcctaccaaaattcttctacacacacgatctacaaaagagcggcgatgtacgagttctacagatccgttcgaatgataatctggctgacttattcaccaaggcgctatctactgctactttcaagaagttagtctatcgtagcggattacgctgtttcaaagatctcgacgaatatactcataagggggtgtaattgtgtgttgcactctttttcccataaccatggtttttcccattgggttttcctggtaaggtttttaatgaggcaacatttcaaatattttaggagttatggtactataatggtcatcaagggggagtgatatgaataatagatggatgcccattataaggcccatcatctagatgtctctagggttttacctttctcttgtactcctatataaaggaccctttattcgatggaataacacactcatttcttctatctctttctcttgttacaacaatattattattttcatactcacgatctcacaacaaaaataaaattccaattttatctttatcatctcaattaactattaagttttagatgatatgatgaaaaatttataattttggataaaaattaaagttattaacattttagtttatggtgtctcataatttaaaatttaaattttattataattattttattttaaaattgaacataaaaattagagaaaatcaaaaatattttaaaatagtcattttacaatcttattttatcgttgcaatatcaaagagacgtttgctctttaagaaaatctagaatcgaagattaatcttattcgttgagattcgggttgagattggctattttgcaactaaaaccaaaattagccatttttgtgaattgataaatcttgagaaagacgatgggattttgattgagagtttgtcgaaactagtttgattcgtgaagaacataaaattgaataaagagtttctcaccacgaacaatgtttaccggccattttaaaatatttttaattttttctaatttttatgttaaattttaaaataaaataattataagaaaaatgaaattttaaaattttagacaccataaactaaaatgttaataaaattaatttttatccaaaattataaaatttatattatatcatctaaaatttaatagttaattgagatggtaagggtaaaactggaattgtatttttgttgtgagatcgtgagcactagaatcacaacattgtggtgacaagacacagagatagaataaatgagtgtgttattccatctaataaagggtcctttatataggagtacaagagaaaggtaaaaccctagagacatctagatgattggccttataatgggcatccatctattattcataacactcccccttgatgaccattatagtatcataactcgtaaagtatttgaaatgttgcctcattaaaaaccttaacaggaaaacccaatgggaaaaaccatatggttaagggaaaaagagtgcaacacacaattactcccccttatgagtatattcgtcgagatctttgagacggcgtaatccgatacgatgaataagtagcagtaggtagcgccttggtgaataagtcagccagattatcattcgaacggatctgtagaacttgtacatcgccgctcttttgtagatcgtgcgtgaagaagaattttggtaggatgtgctttgttctatcgcctttgatgtatcagtcttagagttgtgcgatgcatgctgcattgtcttcgtacataattgttggagtctttttccctgcatacataccacagtcttcttgtatatggtgaactatggatcttagccatacacactcgcggctagcttcatgaattggtaaaatctctgcatgattagaagatgtggcagagaataaacagtatttgagaataagtctgccaattcttctcttgaacaaatttctggataaagtacaacgccatttttctgctgctcatgaatcttttagatgattcatcttgaccatcttatttatttctctaaatatcattagtgtataatattcatttggatgattgatagaatttcataatattcatcaagtgtattatctgcgtgttctttaatgtctcgttaaaaaccttgtcatagaaaaatcatgtgggataaaaactatgataaggaaaaagggtacatccacgcatatcattcaatctccccctcggaaacatcttcttcaggagatgattttcaatcaaatacaatatctcgttggaattaataaccataatcttaatgatcaaaattatatggttttcatatagacttataaatatcattatctagtgatattttatcatatattattgtcatcgtattacttatgataactctgtaggagttttaatgattttcaaaacaaatattagtttgatcaatatcttttgacaaacttaacataaatattagtatgattatatgtcatgttacatatttcttttttttttcttttattcgatcgagtagaattctagagaacataattctcatataattaatccttcagagattatatctttcaagaatttcatataaatgtcatatccagtgttccgtctcttattgccagactttagatacttaaaaaaaaaaatattacatccaccacaagagaatatatctcttcataatacatttcttatcattaatttcactattctttcacataaagactcatttattttccactggttttacacatcatgtgcatagactactagtccaaatatctctactagagat

SEQ ID NO: 32497 - DNA, 359 bp, Arabidopsis thaliana landsberg
acactttcattacaaatcatttttcatctatgtactttattctttttataaaaggggtagtgctgtctttcttcttataatacaacacatttgtaaaatgaccaacttaaccttttactcttttttcaggttttatcaaaaccttttactcttttcatttgctcagagaaagatcccacagtaacattttaatttgattttgatataaatcatcctaaaatatttaccatagtgacattttaaaatactgatccgtaggttgtgaatctaaagaacctatttttgctatatatttgcagatatcatatgtttcgatttctgctgtagctcaattcagcggtgtgcaacatcatataaaa

SEQ ID NO: 32498 - DNA, 499 bp, Arabidopsis thaliana landsberg
ggtaatgagaagctttctagaaacgtggtgaagagtagtgtaggagagtaaaataatttaaggatgggttagttcgatgattccatgaacaaaattattgctttcttgcctgggttagtacccttttattattatggttgagaataataaaggataaattatacagaatatgttgcaaaaaggaatggaatataatatgaagaagaaaggtagagaaacttttgttagaaaccaaagaaggtggggaacaaaattaagaccacaaagtgaaaattttagagttgtaaagatgtagtgatgtacatcgtaataactttaggcactgggacacatatatagggtaaattaatgttatacttaaaaggaaaagcttgttcactaaataaaaggggaggttcagaattttagttagacacattccactgcatccattgaattatgcaacccccaatttggtaaatgggttttggctaggcgtaagaagtcacaagaaaaaaga

SEQ ID NO: 32499 - DNA, 498 bp, Arabidopsis thaliana landsberg
gatgtctgtgacaatcgaaaagcatttcatgattggtttgcgcaaccctttcaaaaagaaggtcctgcgcataatatagaagatgactggctggagactgaaaaaaaggtcatagtcattcacagacttcatcaaattttagagccattcatgctcagacgccgtgttgaggatgtggaagggtcacttcctgctaaggtaggatctatcttatatttttgctgttattttccgtctagatatttcctctgattatgcttttgggttgcagatttctgtagtcttacgatgtagaatgtctgctattcagagtgccgtttatgattggattaaagcgactggaactcttagagttgatccagacgatgaaaaacttagggctcaaaagaatccgatataccaagccaagatatatagaactttaaataataggtgcatggagttgaggaaaagcctgcatcatcctttgctcaattatccatatttcaatgacttttt

SEQ ID NO: 32500 - DNA, 1005 bp, Arabidopsis thaliana landsberg
  unsure (1)..(1005): unsure at all n locations
tagtaattgggtacgcaatatgtttttccatatatcagaaagctcgttaaacttttgaattaattccttaaatgttaagtaaaaggaatcaaattttcatcaaaacataactatgaaattaagctaatttttggcaattcacttatattcttatataattgtacaaatataatttcattttacatttaggttttcaattgaactccatcacataatagttaaacttgtccttcatgtgctttccatatatagatttggaagaaaacaaataattcttcaattattagaaatctaaaattttaatgtatacatgaaagaaaataataaccaaatctcttataataaatctgaagatttacaactaatagagtttgtatataaagatgataaatgcattaatgtaaagtttaattatcatataatctgacatagtccaatgttatccctaactataatatattaattcgtgaaacataccaaataaataaataaagccttcattttgtaagtttccttcctcttgtagaaatgacgtagtactatttccacgcaccctcacgagcttgcatttcatccgacatagttcaaaacttcaaatgtttatccctaactatataatctacgtatcatttggcaacctcgactcttttttgggcataccaaagaatgacttaagttttttaattctgtctccctcattgttctctcgagtacaatttaaactatgtaggttaacttttctttgatgggtattatcaaaacgttgattctagcctataattctaagacttgagatacaatcttctttaatgaaaatatttcactataaaatgaaaacgatatggaagcaaataataattagttcatcaatatcactaanaagcataattngggtacatgaagcttgtagttacgtaaaaaaaatattgatacatngagaaattataatagtgaactaaacacatactgtcaccattaaaaattattaaatattcataaaaaaag

SEQ ID NO: 32501 - DNA, 1975 bp, Arabidopsis thaliana landsberg
attgttctcaatagtagcccacaaatccttaagctcttccctgtcaaacctgggtttggttccctttccactagggaaaccaaacagttcttccaacttcttgatcgaaagctgataccgctattcatccactaagaacgtcaagaaccctaaccccatggtatccagctcaaagtccgtgagaccctcatacatctccacttgcagtgtggaaagaaactcaattgtctcctccttatacgtaaggttaagacatgagtgtctccagataacacttctcgaacaaatgatgcacgtcctccagtaacccaactcggctaaagtctcatagcagggataccttgttcccaagaagtcattcatctcgaagaatctgatatactcctccactgtaacctcgtcgggtttgttcagcagcttcgtctccctgcgccatgacggtggctcatactcagtctcgatatcctcatcaatcagctcatatctacttgacatcgccctctttcctctggcgatttcagctcttctctgattatgtcgggctgtagagcgttcgagctcatccctgaaactctggtaaatatgttgctctctcggtctagcggaccaggactcagcttcatccacgttgtaatcagggtccatagaggattctccactgtagttagtcatgatgaaacatgaaaacaaatgaaactcaaaaataaacgttaatacgttagttccaataaaaccaaaaacacaatacagcagagtaaaccgttaaagtgaacctatcggttttgaagatttttttcttttttctttttcggtctgtggattgtgatcgagtgattttgtaaggtcgagtgaaactagtttcgtggttagagtgaagcggttgttgatggtggcgtcttccttcttcttctcgtttgatttgggaacgagttgatttgagaatgagatgatgtcgagtgaactaatggagcttgagcggtggaaagcagtggagaagtcgagtgaatgattcggtgagaagagaaagtggtggtagcttggtcgagtgaatgtggcaaagcggtggaaacgatgaggctatgtaggagctgcggtcgagtgttgttggtggcatgataaggtgagaagtggcgatggagaggcggaggtgctcttgtcgagaggtcgagtgaatgagagtatgattgagaagacgtaaagtggcggtcgagtgaatcaaatggtgaggtcgagttgtttccttggagagagggagcaggcggtgatgatggagaggcgatgagagttgtggtcgagtaaaacggagacgaatgagaggtggtggtggcgaagagtggtcgagtggttatgagcgagaagtggttaaggcgaattggtgattgagatcgagtgtttggtgagcttgagagtgagggttgatgagagaagtgagagtcgagtgttgttgggatgaaggtgaaagggagaagtcgagtgtttatgatggaaggagaaggcggagaggtcgagtgatgggggggggggggggtaaggttacgatgaggtcgactggtggagagggggtgtgaagagattccttgtctcttggtcttttgcatggaagacatgggcatcagcgggggttcctcaatgtcttcttgtctttattttgtactctcttttactttctcagtctcatatccttctcctgggatcactccatcatctccagaggttttttcatcttcttttgactcttgtggagttttgttgatgtcgaactgcaacttgatgtgctttccaaggttgagacttattttctcttccctgacatctatcactgctcggaagggtcttcccaagattaggggatccttatgctctacttctatatccagcaccacgaagtctgtaggcacttccactccattaatcatgactggtagatctttcatcatgccgaagggttttcttgaagatctatcctgcaaggatc

SEQ ID NO: 32502 - DNA, 2109 bp, Arabidopsis thaliana landsberg
aatctatgcatatataataatttagtaaaaatatatagtcaaagtatagatattcttaatacttttgaaaaatgatgtacgtacatcttttcatgagttaaaattgttgagatatatttattgatacaataataaaccaatattgacgatggtgagagtatattctactatagtcctactagagatgaagacattgttatttacaatattgacgaatttttgtaatgtttggtatctacgatggtgcagacggcgagttagctaaatgttatgtatttagtacgatatatatgatattttttgttttgatgttgttgtttctatttaattgttattttgagattctttagtaagcgtaatgttatacgatattatttgttgagaataggtaagatttaaaactaaacccgtagacgtacacgataatattgagatacacgtacacgtgtatgacctctccaaacatttatatcctaaaaatgcctaaatcacataagtcttatactatgtacgtacacaaaaatatttattggagcgtacatggtataacacttaaatgagtttaaaaattctctaaccattgtctacgaagaaattttatttttattgttttgacattcaaattaagttattatgtaagttatatttatgcctgtatattttaatatagattatgcatatataatatttcaaagaatcgtactctctttcaggtaaaaccgatattccaatagtaaattgcacaccattacaatttatttcacatctaccatgcctatatgtattcgcgtatgtaaaacattcacatttacataattcaccaggtacatagttagtagtgtacatacatattctttgataaatgtacgtactagtgtacgttaacttcgattttataattgcaatttgggtaattgaatataaaagtctaaatataatttatgttacgtatataactatattttggatatccattcgattctctgtttgctttggataaaattttggtttttcaactatggttcaggttattcaggtatagaaatttaatacctttcgaataatttgttagttctgggtttagttcttatttttcgaataggttcgtttgattattatgttttaatgtatttttcaagtgtaattagtacatggattgaatgttttgtttttatattcaaaaattattttaaacttaaatatacaaattattttgatgtttatgtacatatatgaacacaaattacaaccgcgtacgtacaggatattgttaatcttgaattatctgtaatgtaaaaattaataaattaattaataaaaataaaaatatgaaagtgagtcttaaatgatagaaaaaatgaattttaacaaaaagtacaaaaataataaatatttataaaatagtagaaaaaaaaaaactataaaaactagtgagaatgaaaaatattacttttaattttcaataagctaactatacactttatgtccatttgatcctaactaactctccgaccgcattatacaccattagatagtccatgggcattttcgtccaaatttggctaaatggctaaatggtggaagacatagcccactttgtcaaatcctgcaataaaaacatggtcaatcggctaccgtgtataatttaccctttattaaaacacaactctcagatataatgatcttcatcaaatgttttaaactgttaacataaaagaaaatttgacatctatttcaatataacgaagtttgtgaaaatttaaacttcttaaatcagccagttctaataaataagtaaataacagccacaagccgacaacaaatcaacaatttaagtttaagaatctcactaatgggcctactaagcataatttgtttggaccaaactgccaatgaaaagctaagtcttcatttaaattctgaattggattatataaaaagggcaagtctatctatgtctatcagtactgatgggccttttcacaatagttattaaaaaaattcagagtggtagaaaaatatgttttcttctcactacaataatatcaaggaatttgcagaaaagtgatttaaaaatttgctaatgtacggatgccagtaaaagtgact

SEQ ID NO: 32503 - DNA, 3238 bp, Arabidopsis thaliana landsberg
  unsure (1)..(3238): unsure at all n locations
tcgtcttgtacatctccgtattcccttttagaatcggtatccgtcaatagatttgagtagctgtttacacatttctttgtttcttccctgtagaggcacattgttgtctcctggacctggaccatcaatatcttctttcttctccttattatgctctaccgcgcaattctgcactttcttaagtaatttctcattttgagccctaaaatcacttacaagctcctccatttcgtttaattcgtgagctttcctcgaaagctccaaagccattatctctttctccttccctaaacttgaacacatcatttgaagactctttcttgcagccatactcgcgcttaactcttttctcagtttctgaatatcttcaggatcgttctgtggtggctttgttggactcttggttagatcaggactccgtttcagatcggtgtagcatcgtctaagctcttttttcccagatgatgattgttgttgagctttctggattcgtgtctttagatcatcgagaatcgtcatcatagtgttgactctctgaactttccaatcatcgtggtgcctcgatgttgcttcgttgtgatcttgaacgagtttcagcagtagcttcacgttcgtagtgattccttaaaacagaaacaagaacacgtttaacatatttcttgccatgcaagtcacaagttgttttcttgcccaaaacggaaaatgaaacatgtcttaaatcgatctttatgagatgaatgtgattgatctaccttccaaaccagaatcttcataagattggtgctctatggttcttgttggtgatgatgtaatagatccagaatctgaagggactaaatccggcgcagaaaatgctcggagacggctcatgttttccggttcagaaacgccgcctggagagaatcaatcagacaaaaaaatgatcaccagaggaagatgttggaaatttggacaaataacagattaaggttgttgtatttttgcaacttccatgttttgtgaggcgtaattagtggacagattatgcctttttcaactaaatttgcctgtcttacctcatttcacgctctaactttttttcctattaaaaattaacattgaatgttaaccatgtaaatgtgtgagataaaaacataatgggccttcggcccaatatatcactagaatatttgttttgttatactatgaggactaaattgtaaatttgtggagaagccgaaaggtcggaaactttactacacttcttctcatttaacttgacttgacgtttgaggtactcagaaaatggattcttcctcctcttcgcctatgaagtacgaggacaaaccgagaaactgggcggagcttctgccggaactaacggcgtccatcctccaccgtcttggcgtggttgagatacttgaaaacgctcagaaagtgtgcagaccatggcgtcgcgtctgcaaagacccttcaatgtggcggaannnnnnnnnnnnnnnnnnnnnnnnnnnnnnnnnnnnnnnnnnnnnnnnnnnnnnnnnnnnnnnnnattttaacgccgatgaactcctcactttcgtcgcctataggttatgttttgtacttctgtctctctagactccatatataactcgcaaatactcttttgaattttgttttgagaagttgtgttgttttaatcccacttgcttgtaacagtgtgctgattctaggtctgaattaaatttgttgtccttcatgtcttagaccatgttttttgtaaactatttttcagatcaagtattctgaaacgccttggacgtatgatgtgtcatgccgttgatctcagccaaggtggcttgctagagattaacattgaacacttcgtgagcgattctctcctcagttacatcgtcgataggttctctctctctcttagttaaactaagttattatgtcttttttcttttaccagacctcaggatctgctaagaatgaactttagatattcattgattgaaagtttagtttcatgtactactacgtttgcggttggatatgcacagatatgatggctaatttttcatgccttaaatagagttttagagttaatgttttcgattcttttcatgccttaatagtgttttagagtaaatgccttattattgttttagatatcaaggctaatttccatcctatgacgctgttataaatttagaatagtcctttgttctcacaatattgtttctagtcctgtttcgtttcatagttcacaacgttattactctatcatcatatacaactttacttgtaattgttgaaaaaccccagtagttaggttattagcatatataagaatgtcattagcttataaaactcatatgatagctttgattcaagcatatcattacagtttgattttttaagccatggactttggatattcatttacttttggtcatttacacgagaatatgtgcatagatatgattagatatgcatatatatatgaaggcaaattttcatgccttgataatattttagagtaaatgttctcaaattttcttttcaagtaattgttgctagctatgacgctgttatatatttataatggtcctttgttctcacattgttctagtcttgttttgtttgacactattactctcatcatacttaattaattacatatattttgtcatggttaaagaaaacaagtagttaggttattggcatatataagaatatcattatcttatagcactctcgtcaagacttgcttaaagcatacagtttgattttttttaagccatatgtactcaaaggcattggtctgtgacatgttatgctttgttcttcatattttacatgcttctgagttgattagtagttagtactataagaatttataattgtgttgttcctttttttttcaataacaaattgttgttactcttcttaatgatttaactcttcacgtaattatttgcagatcaagtaatctgaaaagtcttggaatttcaatctatgaaccaatgacgaacaaaggagtaatgaacggaatcgagaaacttccattgcttgaaactctcgtgatcttccactcctcgtttaaactggatttaaaagcaataggtcacgcttgcccacacctgaagacattgaagctaaactccttaggctcagggctggcccatgacataagccaggtaggctacattccccttctcgaatgtgatgatgatgctctagcaatcgctgaaaacatgcccaaactacg

SEQ ID NO: 32504 - DNA, 2984 bp, Arabidopsis thaliana landsberg
tgtgtattatatatttgttttcaaataattgttttcgctaggggatcaattattttgtattaaatatggaccaaccaaagtaatcagtctacccctatatttacgttccctatccattatcgacaaaaagcaatcactcctcaagcaaatcactcctcacaccacagaaaaacaaataattgaagaaatgaagtcaatagtcttcttcttcctcctcctgctctttgccgtagcaacctccgataacgtgataaatggttggtataatctcacagccgtccatgacgatgaagtgatttggagttcttttgcggcgccaatgatgaaaggtggttcgtcgtacataacctatccggtcttgcgacctcagcaggcatgtaatccttgtagtggaaccgttaaatatgccaataagaagaattgtcttgtctacaccagatgcaaacgcggtcttaagggcatgtaacatactccttatatattctctatgtttcagtttgtgtcgttctaagcgtttgggaaataacttgcttgtaacaaaatgtacggtgtcttttgttgccaaattatcgagtgttgtttcttaataattttccttaaagtcagcgaagtaattattctataaaaactaagagttgctctatctagatatatatacaattgtggactacttctttaaaaattaaataaattggtaaagtttaaaggtacgtctcccaagcagaaactgaactaaagaattcaggaccaaactcctttgaagggaaacactcaaaaaacaaaaacaaaaaaaagattcatttggtaaacataataatagtgaagaaaatataatatgccaaaagtgggttttgaactcatgtccttatggaagtgcaagtttacgtattaatgtattattcaagtgtactaatcgcaagtaagaaaggacgagaagttcagaagctgtgttcgggatttgttgcttttccttcagtgtctctagtctgttttagttctcggatttttattggtttatgtctaagtgttgtacgtagtctacttattctaattttagatcgtgttgttttagtgtttcttgctagtctccgaagtttctttattcggctttttctcctgagataccaaagtatattttaatatgtatatgttggctttgttttattcgtgttcttcggtcctttgatgtatgttctcagcctttcgacaacaaatccaatatataacttagatgacaaagaaaagaaataaaaaaccccatatccttatatactatctgaaactagccatttaaacaaccttcgctatttattttacttaagcgatgaatggtaattgatgtacaaaatcagacaagtagtaaacttaggggtttttagtaagcttagttcgtatcgagaatcaatggacgtaactttgaggtttaactctcctccttaacactttttatgatatatcaaatcaaatatatttttttactaagattggtgttcttcaattaatgtttcatctcttttaggttctttgcacaataagtttttcatgagctatctaagttcttagcttattgttacaaacataattttcctctttcaatcattgttataaacataattttcctcttttaaaataaacgtatatgtaaataagtaatatattcacaaataaatataaaacttttaaactaagatactgaaaaatatttttgatagttttataattaaaaatcaatctctttttatatctcaattgtaaaaaacactgcaaaacaaacctcaatataaacaatattagttattttccacaaccaaattttacattacaaatttacaattatatcttctaggcttgctaagtctaactaactgaagctcatagcatgtggtttgattttaacctatttactggaaccctctaaaatgaacccaaagctctaaaagagtcgagcttttttgggtttgagtctgaggcgtagactaaaacaacaaatgagtcaatttgcgtcatcttttaattcttggaccttaggcaaattgaccccacggaagaaaaacttcatcgataccttcttgttttgcttgacctgaaaagtcaatggttgaccaagtgagtcactcaccacccattagtctcttatcttctcaaaattcttcaattctcttctcgttttttttttttatcaattccaatgatctgtcacgttttagtaattttcactattctcgtttccgccgtcgtcgacgcaacggcgtcgtatgagcccactgatgtctttctcatcaattgcggcgatacctccaacaacgtggactacagtggccggaactggacggcggagaatcggaaatttatgtcatcgaatgcagttgacgacgcgtcgttcacttcatctgcgtcataccaagaatcagggattcctcaagtgccgtacttgaaagctaggattttccgatatgatttcacttacagttttccagtctctcccggctggaaattcctccggttatacttttatccgacccgttacggatccgatttcgacgccgttaaatccttcttctccgtcaacgtcaaccgtttcactctcttgcataacttcagtgtaaaagcttccataccggagtcaagttctctaatcaaagagtttatcgttccggttaaccaaactcttgatctcacgttcacgccctctccgaattcattagctttcgttaacggaatcgagattatctccatgcctgaccggttttactcaaagggaggatttgacgacgttgtaagaaacgttggtagggacgttgacttcgagatagacaactccacggctttcgagaccgtttatcgggtaaacgtaggtggaaaagtggtgggcgacgtcggagattcgggaatgttccggcgttggctttccgatgaaggtttcttactcggtattaactcgggagccattccgaatataacaggtgtaaagataaactaaacgg

SEQ ID NO: 32505 - DNA, 739 bp, Arabidopsis thaliana landsberg
catttaccattttccatgcataagaaattaggattatccactctgcatggtgcatgaatcacacactacgacacaacatgatataactctggatcttttgattaatctggaaattcgggcaaaataatcttgtgcacctcctccactgtaagaaacttgtatctaggatccatccaaacgatgatgtgagcatgtggaagacctcttttttgaaattctactgtatacatagatgtttcaacataacaagtatgagttaatgtcacttgtaaatgaaaatacatgaaatatatgatttcaaaatatgaaatcatttagtacctattttggtttttccaaagactccattctttgttagatcatccatcaagttgtcgaatttcattttataaatcaaagtgttcgatagaatgccaaaaccaatgtgaatttgagctatgtatttctagccaacgagagttgatgttagaatgcattgtgaacctaatgaacctaattctaatgcgaatttgactaggaaattacaaatgaaagtttaatagttaagtagtcaaatttagtgattaatgtcttgagagagaattagtctaaacttgtgttcatattcgagaacggttctttatgctgaattccttgcttattatttctattaatcactgagctctaaaataccctatggactaatgctttttatcatataagattaatcgttcatttatttgcattttaatttacataa

SEQ ID NO: 32506 - DNA, 245 bp, Arabidopsis thaliana landsberg
agagcacattggaatgaggatggttatagactttttctggcatgttctatagtggggcttaattacggtgcgaaaaatacttatggaagtgttgtaattgaatccttgttatgcctaaaatatggtcataagtagatggagcttccctacatggacattgacactgatgaatgcttgaatatcattactaaaggaagaaatttattctacagcattgcctagactaacttatgccattatacgag

SEQ ID NO: 32507 - DNA, 2826 bp, Arabidopsis thaliana landsberg
attcgagaatcattgatggaggttcagtgtccctcttaccttcttctctgcccgcttccttctttgtgacaataagggctcttagcagcgtagtctcttttctcccacaaaacattttcattcataaatgttacactcttatttcagtaagactcgtccatcaactctaattttcattttctctatatcgcgcttccgatatcgttttctttcttgattatacattaattattaattccatttccttttgtatagcaacataacagcttataagttgtaggcgttcatctctggatttcatcttttgcttaaacaattatttaagatttttaactgatcactgaaaacacatgtaacaaaacgtcacaaagtatggtgattatctactcacctagttgatgattatgtgtttaatgtgttttttctcatagttttgctcgtgttaatttgtttcgacatttcttctaatgctttatcaagcttggacgagcttgtgtctctatatttttatttatgtatgctcatgtactttaatttctaagcttgttatttgggtttctccgaatataaacaatcctattgtattctctagtttgaatcaaaaagttggtgcaccaaaaaaaagtatatttaaaaacttttaatagttgggaagtagaaaatgttattaagtgaagtgtctttttagttttttcattttctttacataagaaacaatcttttcatcttttaagtctttcttatcttcagttttgagaatattatatgatttcaaatatttcttcaattgttagtggtgatattgaatcatttttatgctcttttttaatatcatgggtttcaagtatttcataagccacgaaacgtatcaattagttatgttatagataaagaacatatcacatatactcgttttttttattttaaggatacgtaagtattacatattttttacttaaacaaataccagtaggtttatttctagaaaatactactaataactaaacttgcatgattagttaatataatatattttctgaaacatgcttgacaatttttttatatctctagcctttaaaactcctaaaatttatatattataatcaataagaattatttaaacattttctttgaaatttccaaggcttattttttcattttttctgaacaattgaatgattagagagactttagagttctccatgattttctttctatatagagaacaaaacaaaacttgtattatggtcaacaaaagagaacccacttttattattaaaaaaaaagggatggaaaaaaaagagttaaaaacaaagagtgatgacgtggcagaacagaaaatctcaaaacacatgaaaaacgtatcagtcaagtcaactccttcgacccaatcaacacgacacactattcactgtagtcatttctcttcactttccgtgacctcttcttttttccatttttctcagcactctctactcgttaagcttttcatcttttttgcttgaaagcaatgttcactggggtcaaaaagatgaagaagatacatgttcctccagaaacaggcaagttcatgttctgtctcttcttcagcttcttatcttgttgccatgtatgtttctctgagttgtcgttgaaccagacaaacacaatgatcgaactctctagtttccttaatatctcggattggaatcttcctggttctgagaggaatccatgttcatggaacggtgttctctgcagcttaccagacaatagctctgtgattagcctgtctctctctaactttgatctctccaattcttccttcttaccacttgtctgcaatctccagactttggagtctcttgatgtctccaacaacagattgagctcaatcccagaagggttcgttacaaattgcgaaagactcattgctctgaagcatctgaacttcagcacgaacaagttttctacttcccctggtttccgcggtttctccaaattggcggttcttgatttctctcacaacgtgttgagtgggaacgttggagactatggttttgatgggttggttcagttgaggagtttgaatcttagcttcaacagattaactggttctgttccggttcatttgaccaaaagtctagagaagcttgaggtttcagataatagtttgagcggtactattcccgaaggcatcaaagattatcaagaactaacgctgatagatctcagtgataatcagcttaacggctctatcccgagttcgttgggaaacctctccaagttagaaagtttacttctctccaacaactatcttagtggactaatcccagaatcactttcaagcatccagacattgcgtcggtttgcagcgaaccgtaaccgattcacgggagaaattccatcagggctcacaaaacacctcgagaacttagatctcagtttcaacagtttagcggggtcgattccaggtgaccttttgtcgcagcttaaactcgtctctgtggatctgtcatctaatcaacttgttggatggataccacaaagcatttcgtctagcctggttaggctaagactaggaagcaataagctaacagggtcagtaccctctgttgcgtttgaatcgctgcagctcctaacgtatctggagatggacaacaacagtttaactggcttcatacctccttcatttggaaatcttgtgagcttgaatctcctgaacttggctatgaacgagttggccgggatcttacctcctgcatttgccaaccccagcaggcttcaagtgataaaacaacagcaaaacaagcttacgggagaaatcccagatacaatcgcattttt

SEQ ID NO: 32508 - DNA, 2100 bp, Arabidopsis thaliana landsberg
tctagagtctagaggatcgtgtagatgccaacgagatggcttaatttaataatattaattttacttctctcctttcactattggttacaaaaaaaataatgatagttttccaaaacatcaaacaaataacaaaactcaaaacatcaaataacttcgaacagagaaaataccagtgataactactgtttcgactaaatattgtcatccaacttgaatcatttaattttaacatcatatgtaaagtagtttaggcgaatcacttactccatgtataacttcatgtaatttaggcaaatcatataacatcaaagatttgatttagtgtttggtcccttggaactaccttataaacaattgaatccaatcctacaaaatcgaaacaacatgttttgaaacccgacccggacgatgaaccggactacattctgggtcaccgggtcatcgggtcaaccgggttggaccacgggttaattagttaaaatctatttaataagtttaatattaatagaaattttagagtattttatataaaaaaaatttagtatttataaatataaaacaaaaataatcatatcatatttaatcaaatataaaattatattatgtttaataaaatagaaaattatttatacccaaatatatagaaaaaatcaaacaataataataaagtggttaaaaatttgaaatccaactaaatgtctaacaccgtaacaaatatattaagagatcatcaatgacagaaataaattaataaaacatcgtgaattcaaacaactaatctcgattgtctctctcaccattcgattcaattttaaggcggtattgtaaagtcttcaccaaaatctaaaacatcaaatgaatttaagaactgaaaaaaacttttaaaaataattgaataaagtctaaaatcccttattttattgtaaaatcaagagaactttttaaaactcacactcggccggttcaaccggttcaccgggtcacgggttaattgcgagtttttgtgggttttttcggttttgaacttgttgggttttagcactaaacccaaaccggaaacgtgttcgggtcacgggttaaccggtcggaccggacggttcgggtcgggcgtgaaaacactggtctaaatagtaaccgaaaaatctggctgagtcaggctgaattgctgactaactgaattttagtgattttcagatggatctagctgaacttttacatttccaaaccgccggaatcaaactgaactttcttttttgtgatttttggtcaaatctgtcaaaatagttaagaaatttaattcaaaaataacgtcaaataattatgaatgttaataatataaaatacatcaaaattatctaatggtttaattaaatcttatactagaataattatctaaaatgaatactaacattaatatattgcttaggaaaattgagttatttttccatctttaatttttgaacaattaaatatgtaaataactaatgaaaaactttgacaaatcattatataaaaaatattgtttcaaaaattaacatgataatagaaaatagcttatcgcaaggaagcatcattaaattcattttttcgtatttgttttctttagtatatggcacataacttggcttatataattaaaagaaaaaatctgaagttttgtagtgcactttgtacttgtttttgtaataccaattttctaatgaaactttttaaactgaaagaaaaatggaaaaaaaatatcagtgtcagtcatcattattggtttgttccgttgatcatttggttcttcacgttcttcggatttgcttccacaattgatgtcttccgaacttgtctaacaataaatacaaaccgtttctatattaagttgaaaaatatagtgaagccaccaaacatgatacataatgcatttaatatttacccaattaatcttaatgttagctagccaaacttattggaatgtatcagttctataagatcttaaaattacgactccagtaattcaaataaaagcttagtacaaagactctttataattcatttatatatggttgaggcttgaagtttaatgcttttcactagtatgcacatgatacgaat

SEQ ID NO: 32509 - DNA, 4313 bp, Arabidopsis thaliana landsberg
tgcttcaatcttggattatgacatgggtgtggagcctggattgcgagacagcatccaagcaaatgttgatttcttacaaggtgtaagggctcaagcgtgggatccaagtacgatgttgagtaacctttcttttatgcagcagaagattcaccagctgcaggatcttgttcatcttcttgttggtcgtggtgggcagcttcaaggtcgtcaagacgagctcgcggctcagcagcagcagcttataacgacggatcttacttccattatcatacagcttatttcaactgcaggtagtcttcttccatctgttaagcataatatgtcaacagctccgggtccattcactgggcagcccggttcagccgtgttcccttatgtaagggaggctaataacgttgcttcacagagtcagaacaataacaactgtggtgctcgagagttcgatttgcctaagccggttcttgttgatgagagggaaggtcatgttgtggaggaacatgagatgaaagatgaagatgatgtggaagaaggagagaaccttcctcccggttcgtatgagatattgcagcttgagaaagaagagattctcgcaccgcatactcacttctgcacgatatgtggcaagggtttcaagagagacgcgaatttgaggatgcatatgagagggcatggagatgagtacaaaacagcagctgctctggcgaaaccgaacaaagaatccgtacccgggtctgagccgatgctgatcaagaggtactcgtgcccattccttggttgcaaacgtaacaaggagcacaaaaagttccagcctttgaaaacgattctatgcgtgaagaatcactataaacgcacccactgcgataaaagcttcacttgcagccggtgccataccaagaaattctctgtcattgcagatcttaaaacccacgagaagcactgcgggaaaaacaagtggctttgttcctgtggtacaacattttcaaggaaagacaagttgtttggtcacatagctctgttccagggacacacgcctgcaatccctcttgaagagacaaaaccatcagccagtacatctactcagagagggagctctgaaggcgggaacaacaaccaaggaatggttggcttcaatcttggttctgcatcaaatgctaaccaagaaaccacacagcctggaatgactgatgggaggatatgttttgaggagtcgttctcaccaatgaactttgatacatgtaattttggagggttccacgagtttccgcgactgatgtttgatgattcagagagttcttttcaaatgcttattgcgaatgcctgtggtttctcgcccaggaatgttggtgagtctgtttcagatactagtctctaaggcattgccatatatatgataagttatgtaagatgttctagtttttagccttttaagcagttcttttgtgtctgtaattttgttttcgccataataataatatcagaatagcagaaagttggattctttttttttcttacttattatggttcattttgatttaaccagccatgtccatagtgataaacaaatttagtaacaaactgcacattttgattcatatctatggaagtatataacaaaatcagatatgaactacaatgtctaaaattactttcaagctcacaaaaactagctatcagctaaaatgcgagagtgtgctttagcttgtcagtatcatccatgcaatgttgagaagaagcttgacaatacttctgaatcattgcttgtatctctctccatcagccattcattttgaatctgtaccctcacatctctatgatacaaagatgattgaagaatcagcaagaatatcttacaagtgatgcataatcaatcaaaatgaaggggtttaaagtgataaagaaagaacctattcaaggcaagaacttgatagtttcttctcaagtagtctgcgtatttcgtaagggcctcttgagcatatggtctccccacggttcttacagctgctgcgcttagtaaactctccagagaaccatgttttctcacaagtttcatcgctgttttccttccaaacgccgggaccatgtgctgaatccccggaactccatcaacttcatcacccattatacatcctatcacaagaaccagccggattgagttggctttgacacttaacaaagaaagttgacagaaagacaagcgtcaagagacatgtttgtagccataagtcgatttaggcacttacgaaagctcaaatcagactgtggatcacaattatattgagcatggtagtgcttcaaagtataaaaggaccatcttctgagatctgccaatggaatgacaatctgaacattttctgagatcaactgcttaaagtctttatcaggcgatgcaataaccgcacgatatcctctttgcacagcttgttccattagcgtagctactacatcgtctgcttcatgcccttctattctaacaacctaacacataaacaagaatccagtaagatcattcattcatccacttctacggctaattcacttaactatatacaagctacagaattgagctagtctattgaacattgagtattaaacagttttacccactggcacattgcattttctaagaacttcatcaacaaactgatgtggcctcttagagtatctcccatgatttggtgatttcctatgagctttatatgaaggcaacaattctctgcgtcgttggttaccttcttctccatcgataacctacaaaaggaactatctttcattgatcgaagaagagaaaaagcttgcggaagaaagaatcaaagaaaaggagagatttttacagctatgacaggatcagtgaggctgacttgagagaagaagagtgaaatccagtgaccaaaagcttgagaactgggtttgtttccttcgtagcaaagtggactaacgtctaagaagaatactgtaacaccccgatttcggggaatatggtggtgcatgcggagaagtttaaaagagctgatttggccatactatgtcaccaaagtgcacttatattttcggtcaaaggtcctgagagaatttcgtagttaagcgtgcttgggctggagtagtttcaggattggtgaccttccaggaagtgattgtcgaaaccatacgggtgagaacaaagcatgagaaataatcatgtggtgatttgtagggtcggtaacaagtctttaaagcatcgtgactgtggcccactgaccgccaaacaagggtggacccaagcgcccaaaaaaaattgtgggcccactggtaggggcggtgagggcgttacaagtggtagtagatccaaacccatacgagtgcggagtcaacagggctcacactgttggggcttacggtcttggtgcgcaacgaggacgctgtgatctgttagtggaggtgaattgtaacatcccgatttcaagaatatggtggcgcatgcggagaggtttaaaggaattgatttggctacctatgtcacaaaaatgcaagaatctttttcggtcaaacatcctgagagaactccaaagttaagcatgcttaggctagataagtttcaggatgggtgacaaactatgcgagtgaggaaaaagcatggaaaaaggtcatgtggttatttgtaaggtgagcaacaagtctttaaaacctctaaatgtggtgtactgactgtcgaacaaaggtggacccataggccagagagaggatgtgaggcccactagtaaggattgtttgggcattacacaaatgaaatcaaaatcaaatattttcttacctaaaaaaaatattcaaattataaaaaaaaaacattgaacagtttaatatattgctaataaattaaatcatttaattatggtacatctgtaagcatttaattttgaagatattttcagcgtatataaatttcacataaattccaaaacacataatacaaaaaaaataggttgcatacatcgataaaaacttttcattgacttgtttttttggttttacttcttcttgttgattcatcttatgcaaggtttaatactatggttacaaaagattagatctacaccatatgcacccaacaagatatcaattcttcattttgttttcaggttcgaaacgcaaattctgaaattgctaaattagattttctggtctcttcaaatttgtgttcaattattagcctcaaaatatttcggatacgatgaaacaatttaaattatccggaggctacacgccggatattgattctaaatatatcttatgcatagaattatattactatgctttcgacaatcttgattctaccctca

SEQ ID NO: 32510 - DNA, 3223 bp, Arabidopsis thaliana landsberg
atggggcgatttgccatctcaaaggatctgactttataccgttgcatcccccgcgactttcgttttccgatttcccccaaattcgatgcaaatctaagaagagagagaaatagaaaggtgtgtgcgcttcaaccgactcagtgtctctctctctctctctctgttgctatttgaggttttttcctttgcctcgggggctctcgctgtccgaattcttttggagggatttattgggtagggtttttccactttttttttgtcttcttctactagcttcgttgtgcattgggtttaattgtttccagtgtagtgactgtcagattcttcgaccaattgcatgcaatctggaggcagtggcggagggcccgctcggaatccggccatgggtccggctggtcggactgcttccacgtcatccgctgcttctccttcttcttcctcttcatctgtgcagcagcagcaacagcaacagcaacagcagcaacagcaacagcagctggcgtctaggcaggtaaaggattctcaagtctctgtttggttcgttatgacttaggagggataaaatgcttgtttgtagtggctaatgtttgtctgttaaacttgcggctattcaattttagtgggacttgactgtttatcaattctgtgtaaaaggaaagtaaccaatatctttaaattgaagttgtgtaatggtagccacttggagaacatgttttgttcatttccacatatatatatatagttgctctgaattgtggattattgttcatttgattgttactaattattatcgtgcttctgatatggcagcagcagcagcagcacagaaactcagatacaaacgaaaatatgtttgcatatcaacctggtggggttcagggaatgatgggcggtggcaactttgcttcgtctccgggctctatgcaaatgcctcagcagtctagaaatttttttgagtctcctcagcaacaacaacaacaacaacaacagggttcttctacccaagagggccagcaaaattttaatccaatgcagcaagcgtatattcagtttgctatgcaggctcagcatcaaaaagcacagcagcaagctaggatgggaatggtgggttcatcaagtgtgggaaaggatcaagatgcacgaatgggaatgttgaatatgcaagacttgaatccgtctagtcagccccaggcctcatcatcgaagccatcgggcgatcagtttgctcgcggtgaaaggcagactgaatcaagttctcagcaaaggaacgaaacaaaatctcatcctcagcagcaggtgggtaccggacaactaatgcctggaaatatgataaggccaatgcaagcaccacaggctcagcagcttgtcaataacatgggaaacaaccaactcgcatttgcacaacagtggcaggcaatgcaggcatgggcgcgtgagcgtaatatcgatctctcacatcctgccaacgccagccaaatggcacacatccttcaggcaagaatggctgctcaacagaaagctggtgaaggcaatgtggcctcacagtcaccatctattccaatctctagccagccggcttcatcttcggttgttccaggtgagaattcaccacatgccaactctgctagtgatatctctgggcagtcaggatcagcgaaggccagacatgcattatctactggctcatttgcctcgacttccagtcccagaatggtcaatcctgctatgaatcccttctccggccaagggagagagaatccaatgtatcctcgacatttagttcagcctacaaatgggatgccctcaggaaatcccctgcagacttctgcaaatgagactcctgttttggatcagaatgcgtctacaaaaaaaagtttaggtcctgctgaacatttgcaaatgcagcagcctaggcaactgaatacaccgactccaaatttagtagcgccatctgatactggtccactcagtaactcgtcccttcagagtggacaggggacccaacaagcacagcagcgatcaggatttaccaaacagcaactccatgttctcaaagcccagatactggcatttaggcgtttgaaggttttcagctctgactttttccttatgtcttcatttttattgtatgttttgctggagatgtatgcctataaataacgtgtctgcaagccaggttgaatgtttttaattgcttttttttgacagaaaggggaaggttctttgcctccggagcttcttcaagctatttctccaccaccgcttgaactacagacgcagaggcaaatatctcctgccatagggaaagttcaggatagatcttcagacaaaactggagaagaccaagcaaggtcgctagagtgtggcaaggagtctcaggctgctgcttcttcaaatggaccaattttttctaaagaggaagataatgttggagatacagaagtagctttgacgacaggccacagccaattatttcaaaacctgggaaaagaagctacttctactgacgtggctacgaaagaggagcaacagactgatgtattccctgttaagtcagaccaaggagcagattctagtactcaaaagaatcctagaagtgattctacagctgataagggaaaggctgttgcatctgatggaagccaatctaaggttcctccacaagcaaactctccccagccgcccaaggatacagcctctgccaggaaatattatggaccgttgtttgattttccctttttcactcgaaaacttgactcttatgggtctgcaacagccaatgccaataacaatctcacattagcatatgatattaaagatctgatttgtgaagaaggtgcagagttccttagtaagaaaagaacagacagtttgaagaagataaatggtctgctagcaaaaaatttagaaaggaaaaggattaggcctgatcttgttttacggcttcaaattgaagagaaaaagcttaggctatctgatcttcagtctcgtgttagagaggaagtagatcgacaacaacaggagataatgtccatgccggataggccgtaccgcaaatttgtgaggttatgcgaacggcaacgcctagaaatgaatagacaagtactggccaatcagaaagctgtcagagagaagcagctgaaaaccatttttcagtggcgtaagaaactccttgaggctcattgggctatacgtgatgcacgcactgctcgtaacaggggag

SEQ ID NO: 32511 - DNA, 1574 bp, Arabidopsis thaliana landsberg
tattagtacccagataagagttttggtaagtatgtaaaaatttgtgcatttccatattcgcccccataacatattagaacaatgtgtttattttgaaccaaataattattcaaccaacttaagacaattaaaacctacactgacgtttttctataaatttaaaattaagcttttctgtacatttgtaatttgtgaataaactatgtaatatttatgaatatagtgatcagactttcgtgaataaatagctagtatcgtaatatacacgcaatgcttcaaaaaaataaactagtcacatggacaatttatcaccacaataaatataaaagtatgtactatatgaaagtagtcgtcacgagtaatgaataaataataaatttgttagttgacaaaccaaagataaagtaatgaatacagaacaaataataaataaaaagaattgaaggagatcatacgtgtaaggaatcacgagagagatgtgaaatgagccgtcggatctcgtccttacgaatatacagaaatgaattgagtctatgagtggagaatatctcaacggcggcgatgcggcggaggttcctccaatgatcgccgtaagatgccgagagtaagtaggtggcgttgtagccgaggtgcttacttatggtgaacttgggacggttcgcgagaacgacgtcgtttttggtgaaacattcttcggctatggagtgtgaggagatgacgtaaacgaggcggtttcccaggcggaggtggaagattggagcatttccaagggacttagagatggagtggaatgttcggtggaccggttgcttgaggaggtggaggtggccgataaccggtaaagggtaagccggagaaggaggaagattaggtttccggttagattttgtgagcaagagtttgatggagatagtgagaaagagaaaggagaggagtaggatttgggtgaggtccattttctttctttttgtgtaaagttgtgtcgtgtgtgggatcgagatggaccagatgggtactttgtggtctttaaaacacgaaaattaattgactgaaaactaaagagacttgaatttttggaaatggttggatagagattttgatctgctttttgaaagagaaggtaataactaatttcaatgagaaagttaggtaaatttccttttttaatatagtaaatatactaaataggatgtagaaggtaaatttccttttttaatctaccctttacatatctaccttctacataggacaaccgaaatatctaaaagacagtacttgccaacttaaaaaaatctattaagaagaccatttatgtccctgttattacgtagcttaattgggggcgatgaatagaaaatatagaatcacaagactcaatgcatttattatcgaatctgtagtgactttatgtgatttgaattttatacgatatgatagttcttttttttttacgattcttcacgttttagtggagtaaaaaaacacaagtacaacaaaatacgggtcaacgactcatcgtgacctattgattttacaacttcattaaaaactatataaaaaatatatcaatcaat

SEQ ID NO: 32512 - DNA, 2087 bp, Arabidopsis thaliana landsberg
  unsure (1)..(2087): unsure at all n locations
aatgggtctggtttatcttgaaaaacatgtcgaagctacgcttcccacatatatgtttcaattcacctcgtaaaacatgccgaagtcactattcactcgcaatgggtccggtttatctcaaaaaatggatcaaagccacgcttcacacagatttgtttcggttcatctcgtaaaacgtgccaaagttattgttcacccacaacgggtctggtttgtcttgaaaaacgtgtcgaagccacgtttcacagagatatgttttggttcgccttgtaaaacgtgccaaagatactgttcacccgcaacgggtccaggttgtctcgcaaaacgtgttgaagctacgcttcatatagataaaacatgtcgaagttactattcactcgcaataggcattgcttgcctcgtaaaatgtgccgaaagcacttaaaccattctctgtcttgtgcctaactaacatatccaaattttaaagataggcctgtcaagctcaagagaactctcgcacaacggactaagggggggggggtgcttattgttggacatggaccatgccccttttatcttagaaggcccgaaacatatttcaacaaggaagaggcctttttaccttcacagggtacgtaggtagtccatcatggatgcaactataccttctaaaaatcctaattctttctatgtttttgagcaaaacccaaatgtatttcataagacgttaaaacctcctttgtaatcgagtcttggatagaatacctagtgaagagaaattactagatttgttttccccttttaaacaaatctatcgtgtgaatccttnnnnnnnnnnnnnnnnncgtctgtgnggaatacaaaaaactcttaacgcgtatcattcatctaagtattcgctgtacgctcaagaagccaaaacaaatagatccgtctacttttggggcgacctcccgtcaaagtccaatgaaccaggtgacgagtaacatactcacggattgcctcatagatcagctttccatgtattctatccatagttcaatccgacatctctgctcaaagttatcgacatttttctgaagtcgatgctgtctgtttctttacagatccgtctgaatagaccagtctgacttggaaccgatttcccgacaagtcacagtgaatctcgcaacgagtaatatgttccacagaattggaccacgcctagttcagatacctcttctgagagttatctccgtttttctatgtcagaggtaatctgttagagtacaatccgtctgaaatagtccagctagcctcggggctgatttcccgacagatcacacagaatctcgtgaagggttaatacatctacggatcgcccagagagtcgtcttttcggagaagttgacctcgccttaatcgaagatatatgctgagagatataaacgtttacctcaagcaagtgcaaccagtcatgagacccaactctataaaaccagtcagcttcgggatcgttttccttgaaaatcctgatgaactaggcagtgatatacctatctacaggtcggcttctttgcacttgacacaatttccctgacaaatccgcagctgtcggaacagccaacttacgaatcaaactccaagcgacctggaaagaaacaagatacaatctacgcgacaacggaaagcttcgagttttatagagacctatctcatctctataggtgaattctttcgatgaatatcgctgattttctactgataagcctctaggtcagagattcagttatgtcaaaacggttgacttggaagagagtttcccggcgagttaaagagagataggagtcaatctacgtgtcgatttgaagccctgaactttatctttccaacgaatctaacctagatccaatcgaagcaatcttccaagcgatattggcgtttctttcaagcgcagattcgtctctatccgacacaccgaattcaggctcaatttcccagtgatctagagatactcaggagacgatctacagatcaatttaaagccctgaggctcctctttttaacaagcccgagctcaaataattagggtctgttttctcggagatactgccgtttatctgcag

SEQ ID NO: 32513 - DNA, 461 bp, Arabidopsis thaliana landsberg
tctcccattatcatgattatgagtgttattaagattattattttttatatttttattgttatgactatttgttatcgtttgttataatgagtaccctgaaattaattgcaataatctttaatctttttagtttctttaatcttgtgggagaaataagagtggccttcaaagcaaattcttggggacatgtgtctatgttaattacttaatgactcactaactaattatttatgtggcgttagtgcaataaatagataaatatttgttgggtagaagaactgagtgggggctaatccataaaggattaatttttggatttcttagggatgtggatgtggtttatggggcaggtgacagtgatatagtatactcctccaatgtaatataataaagattcttaagtaagttatttactttttgtcaattcttaataaaaattgatcaaccacagtttgtttttt

SEQ ID NO: 32514 - DNA, 756 bp, Arabidopsis thaliana landsberg
agatgaaggatcccagccagggtaaccgcgggcttcgaaagtggcgcgcagaccgtcgctggggaatgatgacgcatcgggttcctgctgggtgagtgcggcgccgtcaaattcttctatggcagtgccatcccctttgagggtgaagaaagagtcgtgcttttcagcggtggtgcccgtaaggggctggaaccagtgggtgaaatgtgttacgcccttgctctcggcccaggcgcggatgccgctggcgatctggttggccacattgcgggcaacgcgtttgccgccgcggatactggtggcaaggctcttgtaagcctcatcgctcaggaattcgcgggcgatcttcagggtgaatacattctcattgaaaatccctgtaaccttggttacggaaggggtgggagccccggtttcgctggtgatattaccgatagcgtcaaatcgtaaagacatagctggttaattttagacaggtcaaaatacgcgtaaatttttcaataagtcaataaaaaatcggtaataacctataaaaaatgaataaaatgtagataaaattaaacatagaattattttatattcatttttatgatatgtgatggctttattaaatcactgtaacatctgtctttccgagccgttttaccttcaaaaccaacattatgaaaaaagtattgctggttatggcgatcatcggtaccctgcaggcagtagcacaatggccctgggaatagatagaaggcaacggtcatgtta

SEQ ID NO: 32515 - DNA, 642 bp, Arabidopsis thaliana landsberg
ctctcagtaaaactactacttttaaaaaaaatccggaacgtgtaagaaattacagaacggattttattttggaatggattatatggcggatgtatttgaatcaatatttataaaaaatttaaactattattaatatgctggtttaatacgggttaaaacttcaatttctcaataattgcctcatgcactcgtggtataacgttacttaataacaattataaactataaaatataaatattttataaagttaaaatttgcaagttttgatatatattacctttaaaaaataaatcgtcccacggtataccgcaggttaaaatttagtatattattaaaatagctacggttatttgaatacactataattatgttttcaaaacgaaatcttaactaaattcaatcataaccataacactaaaaccatattttccatatgagcttcttccacaatgatacaaaaattcacaaacatatactacaaaaaaagaatatacataaaactcataattctagtttcaattgaattgttttacaacattatttatcctatcaaaaataagttataaaattatagaattatcattggacgaaacatattgataaaataagaggattttgttccatatttgccaatatatata

SEQ ID NO: 32516 - DNA, 2394 bp, Arabidopsis thaliana landsberg
  unsure (1)..(2394): unsure at all n locations
aaacatctacatcactgcaggtggcagaagtcagggatttaattatttttttcatgacgatggtttcggaagtgaataaagtaagaaatccagtgagcagttagaggatttagaaaagagaaaccatgattttggtgatggtgaagtcgataatgacaccactgaaaagagatttcaagagctcaaggtgctggaatcatcgatagaggagcgaattcttaaagcagaaagaactgtggcatggctgaaagaaaagagagccatagaacagaaaaaaaagcagcagctcgtttgagttaggtgcttttttgggtagataaagaaatgtgaagtctaatgcaagtagaatatcaaagttcagtctcatatagtcatatctatatgatcttttggtttagtatcctttgattttcctgcttaatctcttttgaggactggtttgctttaagtgttttatttaaatcttttgaactcagttatgagctagtagcttcttggtgtgttgcagatcagatttttcttacaagtttgataaatcaatgcatatgtttcttacaggtatgatagatcttttttttaatccagaaaatgagctctcaatctgatcagttagtatcctttgaagacttctttgctttaagtgttcatttaaatcttttgaactcagttatgatcttgcagatcagagttttgcttacagaagatagcttcatccttaagtgtttaatttgtattttccgaatttactaagttatgaatgagctaattaatagcttcttggtatgttgcagatgagaattttcttacatagacagcctgattccatcatgtgaatatctaaccatagtataccagttctcaccattaaatatctaataatctatactaaaaacaacgtacgatcgtattattgcatttaaactgaggttaaaggctaatgggactaatgctgctaaagttgaagcaattctctgtgatcagggagtgaggaactctggttatctagctagcaaaataaaggcgagattggaatctccagtttcgtatagattaatgatcacttgaatgaggtgaaaatataggtatataaatattttagatatccattcaagtgctgtaaacaaaaaaaagatatccattcaagtgagatgagaaaatatttgtgtatcaatatttttcaccacattcaagtgatttattaagagcaaaacaaataagagtaatgtactaagtttcagtccgattctcagataagtttcaacataagaaaccaatcaatttcggtttgtttggtcaattaattccaatttggcaaatgcttatcacctctgtcctctgcaacatagtttctgcgtggcttgactttcaaacattaagccacaagaaaaaacaaaacaaaaaaagcatttaatttttctttcttgctttcattttcttcttgtttctaccgatcgaagatcttcattgaaaagagagaagagctcatggcgtctcccacagagaacagtaatcgatctagtagtagcaaaaaaccccatcttttgaaaccttgtctcacctccattaatgaatctcaagctcatctttgtcagaaacgctcagctccttctcctgacttagaagctctttccacgagtgttactttctggggatggaggtatccacacaacaagttcaactcttgggctagaaaaatgtcagctttacacgaacccatttggagaaaagctgggatttttgaagcaattttagcatccacttacaaaatccttaagaacacagatcttgttatgggtattgctgagaaatggtgtcctgacaccaacaccttcgttttctcttggggtgaagcaaccataacacttgaagatgttatggtgcttttaggtttctctgttttgggttcacctgtttttgctactctggatagctcaggaaaggagataatggcgaaactggggaaagaatggctgaagattaagaaagataaaggaacatttgtaacccaaatagcatggatagagagattcatggacagtggtgatgagcttgagcatttagctttccttgtcttgtggcttagctacttcgtgtttccaacacgctattatcatatctatgaagctatttggccaattgctattcatctttcaaacggtaccaagatggctcttgctcctgctgttcttgcacacttgtatgcagacctaagtctcttgaaaaatcacattacagctttaagcgaatcgcctattaaggtcgaaattgatctgagttctttgtgtaagctggtcaatgtttggatttgggagagattcagggcaccccactcaaaacccaatctgttgttaaaagaaaagcatagattggctctttggaatgncctgaaacaga

SEQ ID NO: 32517 - DNA, 1772 bp, Arabidopsis thaliana landsberg
tatgttaccattaataatgaattcaatatttgagattcgtttatccaatattatagtctaattgtaatcatcgtaaaaaggaaaccaatatcttagcaaaattgtagtaatagtgtcattatccagattttaaatataaagtttttatgataaaaaaacttaaaaaaaaaaagagataagttggaaaatatattctttttatataaataaattgcaaaatatgtagtttttttagaaaaaggagaaatagacaattttttctttcctttctaatacaactttttgtctaatagagattttagtaaaaaaaacttatataaccttttgttatttgttaggtagtaaaatagagacaaaactcaaattaaattctactttttctctttttttttttatttaaatatttttactttgtttgataataattcttcataaaaaattatcacataatcatattaacttttaaattttttatgtgaatctaaaaagtctaattttgctatatttcaaaaatatgttgcatttttttatttaatcccagccgacggtgtatgtgatattgttaaaactggtgtacaaatgttagtgtacgacaataatgtaaaaattaatatataatattattgtaagaagtgatagagtgagtataatagtatacaaaatgatgtacatagatgattgaaaatatggtgtacatgatcgtacacctttaaagatctatgagacagtgtactaaaattggtgtacgagatgacgtacaccactaactgaaatagtgatttatacattccttgtaagtgtacaccaagttttgtacactttgtttaccaatcttgtatgctatcatttaaaagttgtatacaccattctatctaatcgtcataatagttttaatcattttgtaccccatcaagattaacttaattatgtacaccatcatgtacaccattatattaagtaataatatttggtttatacaatcattatatttgtaaaaatattaaaaacaatattacttctatttatgaatatcggtaaacacatttgtacaccaatgaataatgtttagtgtacaaaacgatctttaaaatgtttgtgtattaaattgatgacatataaatactctaaaagttaacgtaattttttttaaaaattatttaagaaaactaaaataaaaattaaaaagataaagacaaataaaataaagtaaaaatggtctctcatattatttttattctctctcaagataaagggtattatagtatttgatatgtattttgttttttagtctattagacatatcctctatctcacaaaaagcaaaaaagtgtctatatctctaatttctaaaaaaactacctactttacaaattatttttgaaaaagtgtctactttgccaataaacccatatttcaaacttgtggatcgtaattatgatcgtcacccatatatgattgagaatatgcctaagctgacgtcagcatatgttgaggttatatccgctgatcttaagagtcttgtcggatcaatcacttctgtcaagtacctaacaatattctcagaggtaatctgtctaaatctatcaactgcaagactttgatctcgcgcgctttttgttaatactttctttattcgtctgcatgctatgtttggtgacgctacatgtatgggatgacattccgtcgaatctccttgctcgaatgctcaaagactctcctaagttacaagaactagtgtacgtctctgacaaagatgtaagttctttcgatca

SEQ ID NO: 32518 - DNA, 1372 bp, Arabidopsis thaliana landsberg
ggatccgtatgttttatttggattagttgtttcagttgtttaagtctattattttcctatttggcttggtatgataatcaattgataattaagaaatgaaaagctagtatggttatgtttggtttcagttgggtttggtttgtttttaaaaatttaaatctatgtttgaaaatcaatatttacaatatgatattaataaaaataaatgtgataaatttttaatgtcagttttttatttttctaatttgattaaatctatttttcttaatataatgttttatttgattccatttatagttttgtttgcttatatgaatttgaatgtgagatattgtacctaaatgagtttatttacttccatctatacatgtattagtgaatatgtcctcacatatatgcaagtgagcatttctagtaaacatatataaaataaaatttcgaatttagtaatttcaccataggggatttgcaatagtaatcattttctactatttttttgcaacaataccctttcttgttcgctattttaaaacacacattttttttaaacaaaatgactaaatcacccctaattgatgagaacaatgaatttagtaattttcccttacataatttattttctccaccaaaaaatgcatttaaaaaatccttgtaaagtttttaaaattttataaagttgttaaaaactcttgtaaatcattttaaaaccacataaaatccttataaagtctttaaatacatatgcaaatactttaaaactcatttaaaagcctttataaatattttgaaatccttgtaaatcattctaaaaccttttacaatggttttaaaagttttacaagagtttataaagaattttaaaagagtttttaaagaattttagaagactttttaaggaattttaaaagtatttacaaagattttaaaaacctttgtaaatccttttaaaactcttttaaagtctttaaaaacattagtaaatcattttttaactttgaaattttttaaaaaatattttaaaacatttgtaagacaatgaaagctctgttttttctgattttttcattttttactatcttttagtttcgaaaatatatatattttttttttcattatatttcttctaattctagaataaaccaaatcaatgggaaatttccctccatctatgtcaaatagtgccacttcaaatacttaatttatttgtgatagatttaagaaaaattatcagatttagtcaatttgctcaaaaaaaaaataatattgcttaacatatattttgttttgcttatttgatggacataaaattacaacatcctattggatatgattctcatggagatattgaacccttttctatgttgctggattt

SEQ ID NO: 32519 - DNA, 654 bp, Arabidopsis thaliana landsberg
gaatctcatcaccaccacattcctttttttcctatcttcctctggttggatatgtgattccatcaattctctctttctttcgtcctagaagctatctttcttatctgtcgtatattttgtgtttctcctctcacgagattttctccatcactcgtcagtgtgacatataagattagatatgattttataaacgcatgtatttcaaggacaaaacatgctattatcattgatttataaattttgtcatgctatccaacctctctctctctctctctctctctctctctctctctctctctctctctctctctctctctctctctcatctcaccatcattcctcactaccatcgaattctacgatcaagtctctagatcaagaaccttacttgcgacttagttgcgactaaaacacgtatttcctaaacaacgagtgttaaaataatcattcgcctaacaaactaatgtgcaaccgatttaagtggtcactatttagtcgcaatgtcgtcgctaagtatagcgactgttatgcgacatctttgccacaacatgacaattgttttgtgaacgttttggtgattgaaatgctactactttgtgattgattagaggtttaattcttgatttagccgtcgattaattcttaataaattga

SEQ ID NO: 32520 - DNA, 1466 bp, Arabidopsis thaliana landsberg
atagtctgcttcaaaggcttctagtctggtcagaaattggacaacaagtagctaaaagaagatttaaagtgtaccatgcagcatcatcattagtgttgcttctatttacaatatacacagcaatgaccaaacacacaaatgatacaaaccaatttagttattaaacaatctcaattcccgcctttctttagttgattggttgcaaagctgactcatgttcaagtgacttagtgaactgcagaaaacacatatcaatctgatttgagatttcataaaagacatggaaattgcagtgagagtgtttaacaacattcttgaagactttttcacctgagagatcttaagctcaagctcgttccactccgaggaaggattgcttcctgaaacgattcctgttcctgcatagatcaatgctccaagaccctgtaaatcaaaatacagttcagcatttttttacaagtagtagcaaaaaccgtaatgatcgattttgctataacaattagtgttaaagtgtgttttttaaagggagaaagagatcaaataagctcaccttttcgactagagctgatctgatcccgactgcaaattcactttcctcgccaccaaaaaattcaataggtccccgatacattcctctatcgaatgattctagaagaagcaaaatgtttgagtcagcataaatcttaatttctacatctatagttactagaagatatgtgaaccaaggtagatattttacctatctccttaatcaaaagccttgcttcttctgctggaagcccacaaacagctggagttggatgcagagcagccaatattttatactatagacagatagaaagaaaaagggttaaagctaattcgaagaaatgaagagcttggaaatgtaaaaactattccaatactattatctcacctcatcatcttccttcgtaagtctccctgccaattgagaatatagatgttgcactcttgcaagcttcctcacagttttttgaggcttgacaacaactctgtcacatataccctgcaaagcagaagaaagcataataagaaaaaatataccaaactattatccaagaaatgaagcattgaagctgcagagcatcaagattgaacttacgtttaacttttctcttatattctctcgtacgatagagaactcgaggtcgtctttcggactgcaacagtttagcaaaaattcagtaaaatgataatggagaactggattctgtaattgttcaaagcacttgaagtaaaaattgacctggttagtaagtcacgctctatctccatatcacgagcactagaagcagctctaggcctagttgcagccaaagcttcactgcagacacctaattgagtcctttggaatagtctctcaggctgtttcacaaagatgtatgtcacaaacatatttcttagaaataaataacaaatgtgcacatatctttatcaacaggact

SEQ ID NO: 32521 - DNA, 3503 bp, Arabidopsis thaliana landsberg
  unsure (1)..(3503): unsure at all n locations
tcaggcccttcccaggggggtctatttatagatatatcgcccattaacaccatagttccttttggatgagtcaatattcaacatgttgattttgccaactgtaaattttccttttcgttgatggttacagatgaatgtgcgaatttatctccattcaaaattactgaatttgtaataataacaaaatcagatattcaaaaatgcttcaagaaatataaaccacagacgagaatagtaaaaatgagatatgtccggtcagagatcaacaagcaagacaagtataaaaaccccttcaaggcttcttcatttcttccatttttaaaagtaaataagatagtaatattaacacttagtttttcttctccttttcattattttcttttattttggaacagaaataaaagaaaataaaagaaaataaaaagatgggttacatttcaatgtccgtggttgcattccttgttgtttatgcttcgccggtggttctagccaccgatacagatccgattccagaaagcagagcccaaatcccgcaatggttcaaagcaaacgttaacccatattcccagagaaagggcacgctagaccccgccctctaagctgctgaaacagcgcgacaaattatcgccgtaattactataatctgatttttgatttggttcggttcatatcgatttgaccgaattaagtaggcgttgttaaaattttgcttatatgaatagtttacaaatgtatgttaactcgagtgaaaaatgaaaatctcattgnnnnnnnnnnnnnnnnnnnnnnnnaaattcaagacattaaacgaagctatcaagagcattccgacaggaaacaagaaccgtgtgatcatcaagttggctcctggtgtatacaatgagaaggtcacaatcgacatagctcgaccattcattacattgcttggtcaacctggtgcggaaacggtcttgacttaccacgggacagccgctcagtacggaaccgttgagagtgcaactcttatcgtctgggctgaatatttccaggcagctcacctcaccattaaagtatgagaaacatatctatatatatattcgttatacgttactacattactttaatgattaatcgctactaatttatttttttgttatactatagaacactgctccaatgccgaaaccaggttcacagggacaagctctagcaatgaggatcaacgctgataaggcagctttctatagttgtagattccatggttttcaagatactctctgtgacgacaagggcaaccatttcttcaaggattgttacatcgaaggaacttatgattttatctttggaagaggagcttccttgtacttggtaaccttaaaattaaatattagacatcttttaacatgatacacacacatatatatatatatatatatatatatagcattttttgatattaatagtacatatatttgtatgtaaactcgatagaatacgcaattgcacgctgttggagatggattaagagtgatcacagctcaaggtagacaaagtgcaaccgaacaaaacggatacacgttcgtgcattgcaaagtcactggaaccggaaccggaatctatttgggcaggtcttggatgagccaccctaaagtcgtctatgctttcacagagatgaccagcgtggtcaacccatctggctggagggagaacctcaaccgcggatatgacaagtacgtaacatttcatatcatctcatttacatatagaactacatttagttatatagatttgattataaactgaatatgatattgtgtgttgtataaatacaggacggtgttctatggagaatacaagtgtttcggaccagggtcacacttaaagaagagagtgccttacacacaagatattgacaaaaacgaagttacgcctttcctcactcttggttacattaagggctccacatggctacttcctcctcctaaatactgaaatttttcttaagacaacttatttgttgtaacaccgttctttaatttataattgaaatgttcccatctttttagtttctttatttttttttttgtattgcttaagatatgaattgatcaatattttttctacatatataaatcttccaattcattcatttctatatataccggatgtttgtggtgtttttgttttcctttatttagaaattcctataggatatatatacaaaatttgtttttgtaaaatatcataattatgttcacacactattgagttaatgatttgtttttgtttttcttatgataaacgttcatggtatatatgtttaaagtaccaacaaaaagaaagagtcaatgtctatccatgatatatatgcttttattaaacattttgattattttaaccaaaaaaaagtagaacacacacattttctagatctcatcattttaatagttctagttgcaaatgttaaacttcaatatttttcgtatatatatgaatcagcttcttctttctttaattttctcggcgaattagtatattttaatccataagagatgcatgcataaattttattgaattaagtgaagacccaatggtcaaaagaaaaaaaaaatatagatatgcaccgacgaagccgccgcgagtagccgcgtcacagccaggtcagcaaaaagtcgccatccaattaaagaagagaaggnnnnnnnnnnnnnnnnnnnnnnntgctgagtctgacttagattcggaatctggttcttacgatttaatgaccatccgattttcaacggctaagattttttagaaccattagtacaatattgtcacatccgcagagaatccacgcccctaaatgagctttacttccatgtttttcgcatctcctcgtgataacattgacgatcaattttttttctttcacgttttgttgatatatataaatacggtttcggaaatgttttaaataaatattgttggtcatattgtatattcggattaaaatcatttttaatttcactaattatggagagatattcctaaaatgccctagtatttaaagaatgcgagtcaattgcactagatgcatgtttttattttgtttctaacgtggaccttatgtaagcaggtctgaagtttatccacaatttgctgtactaattgataacatttgtatatgtattccaaatatgaaatgtcattaaatgtctcataaaagtgataatacaatactgtatttgggaaaaataaatgagtcatacaacatagtaatcaacaaggtaaaaagtcatataacgccgtccccaaaaacagtctgtcccagctccatcctaattgggtatccacgtcccgatcctgtcacaggacaccagtaagaaaacggaaaccgaaaatttcaagaaaccaatatcgttttcttttcctcaattaaagttataaaaaaaaaaaatccctgaaaatatcacatggttttttaaaacaattagtgttaaaatcaaaatttactaccttctccaccgttatttacgaat

SEQ ID NO: 32522 - DNA, 1394 bp, Arabidopsis thaliana landsberg
aggtaaagcaagccttaaggcaacaaatctatgtgataaaacttatacagataggctaagcaagcctgctatgatcaataataaacagaaaagctttaacaaaccaaacctatcagtagcagattcctaattcagctcaaaagaaggattacaaaaaccaatggggaaacttagactcagagaaaccattttccatgtgctacaccacaaacaagagagatcccaaacatttaaccaagctgcaaagcaaaacccatgccagaccaaaactgattatacaaagaagaatcaacaggaaaacacaaaagagcttgtcaatttacccgcacaatatgagttatgtcgcgtagaggtgttcttggataccaagaaggcaacaaaccaccacctcttccacgcctagcggtcactatgggcatattctctcttccctgtggcaatctaaatggagtgtgaccacctctgccattaccaggcctccatgtagtgaaattgcctctcacaaggcccgcccgttccaccaatagacccaatatctggattcaccggagattcaatcaaactaagccgtgaatctggctcgtcaagtaaaataccatgtctccgtcggttggcaaatatagtcgagtaatccacaggcctctcggttcgatctcttgcttctggcattttgataacgtcgctgaaacaaacaacaacatagattcaattagagactgaaacatcaaaactgaatgaagaaaccctagggttttacccagaaatcaaatcgttcatttctccttaaaaatcaaccccaaaatttccagaataatatatcaagaaacggagaacacaaccaaaggttatcacaaacaatcccaaaatgaaatcacaaatcacccgattccaatttcaaatcgagtcacaagaacaccggtaaaccccaccctaacgtctataaacgcaatcaaatagaagaagaaacaccatggatttgtgtttacctttgaatcttcaataaagctattgataaactccaaaactgtgtagagagacaatgagagagagagagtgagagagagaatagagctttcttggggagagtgacgatctgggcaatatttcaaggtcgcctcctgagcgggattataatgaggaaacaaatccgaaggcactggcacgtgcggtagaaggctctctcacacgtgtgcgaaacaaatttcaaattttgcattacaggcgggatcaacgcttaaaaaaaacgtctccttgtctctgaaaatacatttttaccctttgaaaacctaatgcaaattaccgagtaaaagttgtctgtgatcaaagcctacctgagtttttttaccccttaccgatcccaccgttcaacggcacaaatcttaccgctacatatt

SEQ ID NO: 32523 - DNA, 1200 bp, Arabidopsis thaliana landsberg
ttgtcatcgtactattagttcaactattaaataacaattattatatatgtcttaattaaaatattaatatatatatttttttagaaacttttcttacttatacttagaattcttgatgatagaaaaaaaaaaaaaaacattttagtggattcaatatgtcttcggacccattgacacttttgtaattgggccgtatagatattaggccctataactagaagatcctcattctctgattcatagaaaatcaaaatactagtgacatagaattgaaccatagattattttatgaaatataatatatcaggttacattattttgaaagaagaactgaaaccaaagaaataagataaataaattcattcggtgttgatgtgagaatcgattacatccaaattagttttcggagtaaactgaagcaagaaactttttgagacgtctgttatagacacaaggtctctccaaatgtgccaagtgacctgctttttttatactctccattgttgcattttcgcctagttgcctttaaaacaaaatataaacgagactaaatttatgtaattaaagaagaaaaaagtactgtattgaaacttactctttcatgctcttggcaaattcaaggttaaaaatttgatcactttcgccccacagaagatgtattttctgccaaaccaaaaaagaataataatatcaattgatgcgttaagtagtaaattttaattatattttagatttaagttgtataaatatatatagcattcttatagtatggagaaatattattttatatatgaccatacctgttgaaaacgagggattgtcacatctttgttgctgatgaccaaagcttctaacaattctgctctttccttcctattggtaatcatcaccttcacattttgcaaaagaatgtatattacgacagcacgtccaaacttaccccgggcgttcggatattcgggtcaggttcgggtcgggtattttatgtttaaaaatttaagacccgttcgggtaatttaagattttgggtcgggtttgggtttgggtttatttatatattgaaatactaaaattttgtatgtaaatctattaaattacttgaaaattttaaaaatttctaaaacaacactagtaattttgcttgaatatatttaaaaatacacaaaataactaaaatatccaaaaaaatcctaattattc

SEQ ID NO: 32524 - DNA, 1276 bp, Arabidopsis thaliana landsberg
cgtggtcaagatattcttactccaaaattttagagcatgtatgctttccatagtgagaatttccgtcgtatctttcttattcgatgcatgcatcaacactgcaccaataacatatgactctgatattactcgttgggctggaaacattcaccacaatcttatcagtcagttttaaccttaaaaactcgataaatcaagaacacttgaatcggaaagcaaaaaaaaaaaacagaactagaagaaactttcatgtattgttgtttgttttatcaaactcaaatcataatttgaatgtcttttgaatctgaattttgtggaactaaaacgttttagactttgatgcaactagaaaatataacaatgcatgcaaaacacttttacaagtttggtccctccatttgaacaactagaacaaaacttttacagaaactctagaacacatttgattaatactaacaagcgtgggaagtaggaaactaatttgaggcatttgtacataccatattgtaataactccttagtgttgttatttgtctcactgcctgggattgttgttggtgaggaacagtgttgataatggcccattattaatgggtcgcaacttgcaagacatatgggtcttcactattaagactctgcaacattaaatacatttctcgtggggttcatcctaatatgcatattggtgtatgtatgtgtgcctgcatgatttaatgaccagcaaaaaacagtaatggtcaaagtaaataacatgatgggagaaggtgaaaaaagagtttaaacctcggaagagttaatactggtaaaactctgggtctttcttcaacgttctcaattattacaactttacaagtactacaaacattttcgataaagacaacaatacacacacttcttcaagttatgtaacaatccacatttgaaagcaaaccttacaatatgtaacacatcaacgattttcacactataaatataaaactaaacttaccttcaatgtgttaacaaggacaggatccgagttctgatttgaagaaacatctgaagacaataactgtaaacagaagagagtactaagtaaaggagcagtagaaatcacagtagccaatgttcatgacatctaaatattagcaagaaagatgctcttaacgccagttgatttagataaattgaatagtcaactcataatgatacataaactcttacctctctgccaatgaacacgagtgcaacatcaacaggttgcttgagttttttcttccaacactaaacaatggag

SEQ ID NO: 32525 - DNA, 1247 bp, Arabidopsis thaliana landsberg
taatgaactctaaaagcagaaaacaaactcggaagaaaagaaagctcacagtccaatgacgaggttgtcgggagagcaagtgatcatagcccagctacaaggatcaactgaaaactcgtcccaattgttcaaagctccatgaggatcatgcaaattgttccttatacttatcaacgcctcaactgtaaaaaaaaaaacaaacggatttttgttatagagttgagaaaaaagatccaatttttaaactaaagtaacaataaaagaagcaaattttaccttcagggtttctgggctcagaagatagagtgagagtagagaaacagaggaacaagaacgagtaaaggagatgaatttgaatcttcatggtcttctttgttactactaccatggaagattttagttacgagaggttaacaataattttgaagagaagagagacagcattactttattttttttcggggtagtgaccacaaacacacatagaaaaagaagagaaagcaaaagcaaacaaagcaaaaagaagaagaaggagaagagatctctgcttttttattttgaaaacaagaaagaaagaaatctcgggtttagtaaacaagtctttacgttcgtcttcttctcaaacaaacagtctctctcagaggagatgagtttgttgctgagaaaaggtttaagccgaaaaacgtttaaatgagagggagagagaggcaagatagtgacatttgtagagagtgaatcaggggatgctaatacggactgtcggacccgggatggtggatgctggtctactccagtctctctctcactctatttctttgtcttttttgttcttcttaatgccaatttttttgtatatttggaaccatatatgtttttctaatttagtcttaataagtccgattaatagatataaaactaaattagactaaattacatataaattttaaaactaaattagactaagttttaaaacagtacaaaaaatttaatagatataaaacgcaaaaaaaaaaagcggtatataattacgatacttagttaacaactaaacccaatattttttggtaatttttaccggcatgatagatctattatttctattaaaatggattggttaaacggtaagctaaactatgataagagcaaatggtacaaaaattttaccacttacagaacaaaccaaggtaagagcaaaaagtacacaaggggtaaaaaaccattctaatagaagtgtatatataaagatt

SEQ ID NO: 32526 - DNA, 1522 bp, Arabidopsis thaliana landsberg
tagctggaacttttctcatctcacggctataaccattggcaccaccggtgttgaaatgaccattcctaaacgttctgtttcctctcacaccaccagcattacttcctcctcattttcagatccaaagaactcagcccacttctatggcatatcttgcaacaagaccacctaatgaatgagccacaaaagagatcttcttcagcccacttcgatgcttaacaacacccaaaaccttcacaaaatgtcaaacatagaaatcaaagaccaataacaaaaatcaccaaccaaatttgcagattcaagttgcaagtacagaggaaacaacaatgcatctaagtactacctcattagctagcctttcacccattttatcaacaccatcaaatgtcaacgttgcactattactctcgctacctgcttcatacaatttcatcatcaaaatcaaacaaatcataaaattacagagtaatcaaaaccacaatatctatagattaagaatcacgcacggtgaactagtattttatccgggaacatcttccgaacttctccaccgcatatttccaatccgtcgcactaaatcatcatccaacacagaattagcacagtcattaacccagactatagtaatctgtgattctaattgaagctctttgatttagtctacctgccaacgattccggtaaccatgaccaccaaatgatcaggcttctccgcagactccataacatccgcatcgaaaaagtcttctccgccgttgtcgatctccgtcgtcagctctcttttgcttcgattcgccgcaaagcaaccgattccaagacgattcatccactccatttgacagagattcttaggttgagctggaaattgaaggtataatctgaaacggaactggttttgactaggcggaagaaatcgcggtgaagacggaatcaaatcggggattgagatttggaatctggagaaggacgcgatcatgtggaagtaaaaggaacacaataagaaggaagttatcttcctgactagcaaactgatgatgacaagtcgcttaactttcccggcgaagaagtgttacaatttgcgggttttgcggaggcgctaagcaacagtagcggtaacatagaaacacttggtcaaaataagtttttaaaaaaaatattaatagtggattgataataagttaaaaactataagaggttaatggtgttgttattaacaaacaaaaaaactttaattttggaagacttgcaaaaatctacactaaaatgtagagatttatcaactactattagtataggataaatagtaaataaaaattatttcattgcaagtacatctaatctcaatataaaatgtaaagatttatttcattaaaatgtctggatttgttttcttttctttcttaaaagtaaagcacattcaaattaattatttcaagttactcatatgattattcatattgcacatgtgacatgtatgacaaaaaaaagaaccgttttcacattaaaacgtgtaagtactaatt

SEQ ID NO: 32527 - DNA, 546 bp, Arabidopsis thaliana landsberg
cattctagttaaatcaaaactttagagttttgaatttattctgaactatagagatgcttgacatctaagcaaatcatccgagtttgtacatcgatattacatatatatatatgttccaacaggttatttaggggtaacattttcatacgtatgaaagaaattgatgcattcatacatattgcatatatttgaactatttgggtttttgaaactaaataaaaaaaaacatgtggctttcgtaacccatacaatccgttaaatagcttcaaaagaaaaaagaagaccaatgaataagtaaaaagtcttgttggttagaaatgaatgaatgaatgaatttgaatatttggtaattgttttatttcttctgttcgtcatcttctcctctcaccaagatgttaaccgtacgtactttgaatctctcaagcttctcgatgacctcctcaactagactgccccctcggtaacgcgtcgtgtgaatatgagtgtgcctttcaatttggtgatctggaggcatctgtttatgatctatctgcctttgaaattcgt

SEQ ID NO: 32528 - DNA, 3483 bp, Arabidopsis thaliana landsberg
gtgctccttgatacctgttagattcactggatatatcagagctcgcagaggcttcattttctgtgtgcagatcttggcatgaaaaacccaatccaaccccacaggctccttttacaagagtgcttttactgctacacaaaacctgaaagacatgataaattattctttcatctgcatacttacttaaaagtgaaaataaatcatgtaaggagtgagaaagaccaagtaataaaagagttagcactgtagtaatttcccacaattaactcatatgtataagtagtacctcaagaagcccagatatattctgaaatctctgcttgtggtcagctacgtgtagggacgaccaaatcaatccaagagaaataccagccgtccactgacggtgttcatgctcatgctccaacaaccaactcaacagaaattttgatgcacacgctttaatattatgagatgcagctggcacagcctgaaacaccaatcagatttagatatacattgaaaaagtgcactatggatatgaagcacatttctatgaaatcttactgcacatagtgcacccaacgccagtgctatgttttctgcacacctgggaagagcttcttcagccatatgtaccaaactctacatgaacaacacaacagttctcaattaaggtttgaacacttaaaatgaaacattcgaattaacctgcaacagaaaaacactatctcaaaccttcatgatgttgtttgcagctttagaggtcttatccgatgataattctttagtcgttgcatcaatggacaatatattcgctctcatccaacgccgcataaaagctttcagtgattgcaaggaaataagagcaagggaaatatttcttgagagctggagagatttgactactactctaaatgcctcctcgtattgaaaatgaacatcatgaaagctctgcgattaaaaaatatgaaagtcagtatgcaaaagtataggatacctcctagcagaaagttaaaatacttactcttgatgacccaaacttcacatctctggggttataagatagacatagtaatgccgcaccaggtagttctccagtctttatttctttccctgtgagtcaaatggtgctgcatttagtttatatggagtacaaagaaatttacataagtgatgatcttcatattaagcgaaaaggtctatccataataacaaaacgaaacgaactgagtatttcatgatgcaaccgtatactttgacattatcttataagaaacacaagttgcaaagcacagcaagaactgacaagttaagtaagttattaggcaaaaagaagcacaagtaaaaaatgtttaggcatacctcccatctcaaggtttttatttatttattccaacagactcacttgcatttctcactaattgtggcgacaatttaaggagtattttagctgaaagtcaaactatacctgcagggaagatgacctgaggtatcacatcaagcagcttttcaatcttactaccaggaactttcttctctcttacatatctacgccggacgctgaaaggtcagaaagagaagtagttttaatatgctgctgatgggaatctaaaccagaaaaagtttagtagattacaagctctatacctgtgctcgtgaatcatgattttgattgaaaggtcttctaaagcattcagaatttccgcatttgtctccgagaagagtaaatatgtacaattcttgttaagtcagaaaacttgttttccataaatgatacctgaaaaatatggatcgtaattagatacaagtgttgatattaatagtttagaaccaaagatggcttagaacacgcctaaaagaagacgtacaagagaccaagccttacctcatattgacccagggccactatggcagagactcttgcctttgtccattgggaatcatgaggcttctgcatagagctcccaatttcccacaaaatgttcaaaacgttttctgcatcttcaggatatgcttcggcatccatggcaccccactttagaagatggcatacactgcaacatattcaccaaaaaaatgctagttatacatcaaatatgttttcaggcacctcaaaaaacaatgtccatgcaccacttcagacacctcaactgtgcctataaatatgattagggatgttagctctgctaacctataagcaaggagaggatccagtttgatatgttgagcatgtttcttaatgacatcccatgcagtatagaaatctggatagacacgtaaaagttattagataaaaactgagtaacatagaaaggaattaactaacacaagtaagtattaagagagtaccaatgacatcggcttcacacagatgcgaaagactctgaaaaccaagggctctaactggacagttttggctttctatacaggcctatcaaagtatgaatccagtggaaaatttgaaggcattccaaaagttttgaaaaacaggcaaagcaaaaagcgcaaacattactttaaactatacctgaacggacaagattaggtctactcctctatcagggtgtctcttgcatacatcatggatggaagcagccatactaatgcagatatgtctctctgaaatatattctataaatccttgcgggcgtaacacctcctgcatatttaaaaataagcatgagcaaggtgacaatatcaatgtcgaacaaaatttcagtggtaagaatagcttacttgcaaactcgaaaaggcacggtcattgactacccaggtctggcaaagtaatctaatagctgtagcatacaacagactaaaaaataaaccatcatcagagcctagtcatgtcaactccattttatggcagaacagaaatggaaacaaggtctagctcagaaacccaattcaacaagattggtaaatgtagattaaagcatttaacatcacatactaattttttggcttccaaatcaatatataattataaaaacgattaaaaaaatatggtacacaagaaatgatcagaaaaggtgtactgaccctttggcatccttgcgtagcattggagtaatagtctgaactacaagtggaatcatcacctgttgtgcagctagtgatgggagcaaccccagaagttttgactgcacataaaagaaataaaatgggaactagactaaggaaaaaaaatagatagaagagacaagcacttggatttgaagatacataaaatgaatgagagtggtctcaccaatagactctgacaagggacgttagttcgagataacaagttgctgaaatatagaacagctagcaacagcgggacactcatcttagaatcaatgccaccaataatagtcaaagaaccaatagcatcagctcctagtgacgggtgcatcaccatgacaccagcaacagcaccaagtaaaatagccatctcttgtgaaagacaaaacgacgcaaacaacttttttttatcccaaaaccgttcagcgtgttccctaa

SEQ ID NO: 32529 - DNA, 1263 bp, Arabidopsis thaliana landsberg
cattttgtttggagaggcaaaattcaaagtccctcgcggggttaacgacgattcaattccagcaccaatccaagtacctttgatcccaaaaagaacatgataataacattaagcaatcttatcacaaattcaaaatccaaaaaaaactttgggtttttagggttttgaatttggggatttttataaatgggtaagaaaaaaaaaaaaaatgtcagatgtgggatttgaacccacgccctctctcgaagaccagaacttgagtctggcgccttagaccactcggccaacctgacttattgatattgatctgagtttacaactaatagtacacctaaatatgtaatcgtgaccggtaactttttttatttcattattttcacatcatcaatttcatcacaaatacaaaaaaaaaaagcagtatggaaattggtaaaggaaaaaaaaaaaaaggtttaagaagatgaagaattaacttttggctttggctgtaaaaaagattgtctttatgtacaaaagtgtttttggtcacacagtgtctctctttctctctctctattcgtgtaattgatttcctcaaaatctctttgaaggtcgaaggttcttcacatgaaatgaacatggagaacaacacaaccacagtatacctgtttagtctctgatcaggttgattcactgatgagatctcaaacttttgtattaaattaacatcatcgtattccattcaacaccctttggtagtaatcgtattgtcgagttcgccaagcatctaagctgctgctgattagagagagcaccaaagagacgcattgctggttatggcaaaaggaaacagttatgattggaaagataaatccttagaacggtgctgaagttggtagaataaaaggggagtcaagtaatttacctcttcggttaaacttaaatggaacctttttcttagattctgaatggtgcgtggaccacctttgaagcaaggaaaacctgaatcctgattttagaaaaagaaaaaaagccgcaaatgtttcagccaggaaatgattttgttactttatcaactcataatagcgctatcgcttttaagatgcttttgatcagaaagctatcaataagcaaatatcgattcagatcatgatacctgtaacatttcgacgagaagaataatccgttctgcgtgttttcgacatgttaggaatccttgaatgcatagcacataaaacagttgaccattagaggtacttaatacaagcgacaaaaggagaaaaa

SEQ ID NO: 32530 - DNA, 850 bp, Arabidopsis thaliana landsberg
tgcttatgtcgggaaatgaagatgattctgctattgatgctaagaagtctatgtctgctactaaacttgctgagcttgctctcattgatcctaaacgtgctaagaggtaattggttttcgtttttcttctgtgattctctggtttcttaaatcctgtttatagtgtggatggacacggtgactatttgtgtgcttttggtttgaaccttaatgccaccagtcatttagttgcttcagctgttcccacataacttcagctttttaatgagtggagcaagtgtataatttgtttttgtttcatacaataggatatgggcaaacaggcagtccgcagcacgatcaaaagaaaggaagacgagatacatatttgagcttgagagaaaagtacagactttgcaaacagaggctacaactctctcagcccagttgaccctcttacaggttagttttgactcattgtacggttgttctttcttcatgctaaatgaaactaaatctagccttacaacgtttgttcgtgcattgtgattttttatgggtttaaaacttgtgctcttttcttcctgtttgtatagagagacacaaatggcttgactgttgaaaacaatgagctgaaactgcggttacaaacaatggagcagcaggttcacttgcaggatggtgagtctctcttttatcacaaacaatatccctctgtgccaagactgctatagttggttcatatcatcgaattgaattttctctattaacagaacttaaacaagcactaaaggaggaaattcagcatctgaaggtgttgactggccagttgcttcatcagcggtgaactattgggtcgtttggatcaaaa

SEQ ID NO: 32531 - DNA, 572 bp, Arabidopsis thaliana landsberg
gaaaagcccatttgcatcagtttcttgtttacgctgaagaatcagactgggcttccatataatgcccactaagataagtccaataagaatgttatatatcctccctagtacgaaaaaggaaaatccctagttgagaatcatcaatccgattggcggtaatgacgattctggtttcgtgttgtgaccatttccgatcttgagaattaatcgtagacttttagtaaccaagttaaccttagaaattgtttgactggttgctcatatcactaaatttccgcatatagggttttattcagaaatttatggagaaaaattagagtactcatgtcgtgggttctgatttgactctcttgtaccaggaataatatgggtatcattaagggaaatctgaggccttagttagtttgtatgatttttttttgcttgatttaatttcaggaaaatgaatggtttttacttaaaatccaataactgttaaacgaacgattctgatttctccacccaatccaatattagaactcgtgataatcgtacacgcttacaacccaaaataacaacacatggattgttag

SEQ ID NO: 32532 - DNA, 972 bp, Arabidopsis thaliana landsberg
gtaaacataatcagggagagataaaatttgtaaaggcttgtatgttgttagtaaatagtataaggagtttttgccaaaaagtgtaccaaaaatgtatatgtagagtttttaaacaataaaagaccttgtacatttatttattgtcattgattgagtattatatgtctgtttctaaaaatttgaatcacattatatgcagaaaatataatattttattaactatttttattttatatataaagtcaaaataaattagatataagaacaaatataatgaaaaaatattatatatttatatttaatgtcgatagagagattttagaaaattagccttaatcgaatatagttcaataaagaaagatttaattaaagattaaaatttaggaaataattaattcaaatatttaatgcaaattaaaaatttataaatttataggaataaaaatatttagttgagataaaattaataaaaacttatatgttattcgtcaatagtatagagatttttggccaaaaagtataccaaaaatgtatatgtagattagtaaacaaacgaacttaactgtcatcattaggatttctagggaaaacacaataaattcgaaaactcggagattcaggtgaatgttttagctcgtctcctttctcttgtccatcatctttccattcattttcctcatctttactactcgttgtattttcaccattggttttggaacttttactatcggtagatatctcaagaatctctttatcggatatgaaactatcagcagtttcgctatctttaccgatagatcctagccgagatccttcttgtcgtccttcatctgtctccggccttgaaacaccacacccatgttgtaggaaaagccggagcaaagtcaataagacaacataaatgttgaccaaagagaagtagttagaggaagataacgtccattgatcacactagaaaaaaaagagagtcca

SEQ ID NO: 32533 - DNA, 2680 bp, Arabidopsis thaliana landsberg
cgttgtcttgttatattttctccctggaattctctctctttctctgacacatgtctccgtcaagggcatattgttccacgaaacttgtatgtctccatgaatgtggtacaaacgggtagtttttttggtgaatgtggtacaaacgaccaaatttcccttttcttaggcatatttgtttttgaacatctgattttatataatggatttttggaatataacaagatctacaaaaaatatatactcactaaaacaccttcaatgagaatatacgtctccaataatcactaacctaagcatcttttaaggttaaaaaggcctatacaaaaaatggtctcgcgacactgccccaagctctcagcttcataaaatcaaacagagaaaaatgatctctcatcttcaaagacgccacataaccaaaagaaatgaccaactgctttgcttacttttgttaggcatatatttttttacttttttaccaattagttccatttaaaacatactataagagattaagggtaactaacgtaagtttttagatattttatcattatgtattcaactcctaaatggatgtgtgaacagaatgtgtgtcatctttgcagctcctaaatgtcgtgtagtcttcataaggctgaatataaacagcaggaagtcttcaagtacatcaggtggctctttggttaggttaagtttgtcaactagttcgtcagcgggttcttcagaaagtccttcaggaagtctgtcagaaagtccttcagccggttcatcagcaagtctatcaggtggtccgtcggtgagtccatcatctacaatgtcagctcccattcttatatcctcctccaatggttaagaagcacttttagatcttagctatatttataatctaaattttactttttgtgagttaaaaatgagagagagtatctaagaaaaaatgtagtccaatggtatatcttacaaagagagtatcttaggaaaaattcaaacatttatataacaatatcttccaacacaagcaatgatatacaaagatcaaaaagacctattgctaatcaaagaacaaagatgatcttcatgtaagatgaccaaaccaaacctgaaaagcaaagatgctccgcatttaaaatcgcaactctaaattctgaaagactattttaaatcaaacagacttattcaagcaatcacaacatacataaatcatgcaataaaagccatatacaatcacataatataaatcatgacaaatcagaggttcaatgatataagaaagaacaaggttatattgttttaccttgtatgtgccttccattcggtctccatttcaatatttctaacaattgtatccaattctccacctgtataacagatcaaaattatgcaaaaggtcaagccaaaaacagagaaatatatctaattcacgcaacacgtgttcatatcttagatttaagaaaactttttctttttccttttgttcctctctgtatccatttaatatacaacacatattcacatcttagatttaagaaaacatattaattaagagagaaatcttagccaatatttgctgctttaattaaatttaattagtttaatagttaagatttagttaagatacttttttttaaaacgttaggtatgctcttatttaaaaggctttcttcattctttttctttttcaatattattatttttaatagttccatacatcttagaagtctccttcggagatgattttagttgtttaagtatgttcatagatgttgatttttcaacccataattaaaattaagtcatattattatgtatattataatttgaactaaattaacagtaaagacaaccgtccatttcttatgagcgcaagcaacctatcaagcagcttagtaactgtaaatactattgtaattattttaagagaatattacgtgattagacactttttaacaagtttatccataattagacactttaaaattattaggcacttcgaataattaaaattacttgttcacccttaaatcgtcggtttttataactaaacaaatcaaacctttattcactaaaccaattccggtttacgcagcccacgattttgcagttaccatagtgaattcaaaatatttttttccagtaaaaagttcaaatccagtaaaaagccctaaattacattcctccatttaaaatcttgcttcgttttgcgtcggtattttgagaaatgtgggaatcgatttgcctaacgcttgcggccaccgcctccaacaatatcggcaaggttctttagaagaagggcactattatcctccctcctctctccctcaagctcaaggtctctctctctctctcgctaattttcgaattttctcttttgtcctttggattttgattgcatgctatttgattggacggatctctaaatgttaacctaaatttctggaaatcatggattgatatcttgaacaaatgtttcagcttgtgggagcccctcttgttgaaaattgtctatctggatttaatagttctgtatttgcttatggacatgtagtttttattttctaaagtcttcctttcaggcagagttccatttattggattgtttgattgtaacttcttgatttaactgatcatggaattatttctgtcagattggtagtagaaaaacatataccatgtgaggtcctgc

SEQ ID NO: 32534 - DNA, 921 bp, Arabidopsis thaliana landsberg
  unsure (1)..(921): unsure at all n locations
ggtgagaagaagaatgctgctaagatcaatgtaaaggtggatatttctcgtacaatgatctcaatgggaagtttagaacactatcctcacaaaaatccttgagagtcaagtctctcagactgtttttgcctctacgcgaccaactggtgctcaatctgggaaagtataacccaagagtaaaaagtagtgttatgcgattatgatccacaaagagcnnnnnnnnnnnnnnnnnnnnnnnnnnnnnnnnnntaatgttgttgttttttagacacttgtagaggacatgattgaagaggatgatgaaccaccatatgtggagccgccaccctatagccctaagcttccatttccaggccgtgagagacagattcaaagtcagaaagagtatgcacgttttgctaagatcatgtaacaactttacgccagactttctttcttacagtttgttctccatgttccaagctatagaagttaccttaaagatatcttatccaacaagaggggcattaaggaaggggttatgttagtttccaaaggagaagagtatgctcagctggaggaatatcagagacaacagaagcaagctcaactcactaatgtagtaaaaatgttagcagggaaatagatggtcaacacttgtagtgccatccctccaactactgttcctgagaaactcggtgatcgagggagttttgttttaccttgccggattggagagtctttgtttgacagatgtctttgtgatttgggaggtgagttaatttgatgcctctttctgtgtcaaattgcctaggcatcaccaatttcaagccgtcaaggatctctttgattctagcagatcgctctgtacgattttccatgggttcagcggagaatgcgcatactaccgctaaaaattcccacattcccactaattttgtt

SEQ ID NO: 32535 - DNA, 567 bp, Arabidopsis thaliana landsberg
cgcaaagttgcgacggagaacgcaaacgtgaaacgctagatgttttctctcatcattcaatttcttctctattcagaggggaagcagctgtagatatctttaggacagagacgactctttggcttcatgctgagtctgactatgcagtgacctttatacccctgcaaggtatacataattttgtcctaaaccttactaatctaaagagaaaatttgtagacttaacataatcttctgaggatttactacccgtggattttttaattgcaatggcttaacataatttgtattacagttttgtttcaatttacatgcggaaagacattatatagttaacataaaacgagttttagtaaaaccaatattttaaacacaacattttcattctattatcggtaaaacgaaacaaaaaattatgtgtatgtactactgcgtaatggtaatatcaatccgtaactgaaatccatatcttttttaaatgattagaatctatttttcgactctcttgtacaaattcttagctgtgtatattctgctagagtcatcctcatcttggattctagtctc

SEQ ID NO: 32536 - DNA, 2484 bp, Arabidopsis thaliana landsberg
ttaactacgtacaacgaatgagaaagtaatacaaagtattcgtcaagtatatgattagctccacgccctatattagcacgatctagcagtataataatgatagtagagatcccatttatataatatctacatatgtgtcgttggcagctaatagaaatagaacagtagtgcatatatgccaaaaacggatagtgggattgttaggatgatccacaactggtttcaggaggaacttaaaccgaacaatccgccgaatcttaagtatattacactccctgattacgaatcacaggaaaatatattattcgaataattaatatataaaacaaatccagactctttactcaaagaataaagagagactaatgaaaaggacacctatatcttagctagatcgcttatcaaaagaagagacactgtcatcttcatagataagaaaccatcaaataatattaaataattaactaaattgcaatagtttatttatgtttgggactcacattttagggttcgtttgattacctaaattgacctatagtgttgtgactaattcgggtgattagttcatataatctttccattagtggaaaagtattatgaaacctttgggaacgttacaatttaaaaagacaaaatgcttttaagataagaagccaaaaacatattattaaaaaaaacattaaagttataaaattttcctcattagggttcattaaattaaccaaaattgacttattatagcataatccaatttgttgatataaacttactttaaatggaaaaataagacaacgtcgtggtaatgaaattataataaaattggaaaattaaaaaagagctaaaagagtttaattaatattaataaaacgtattaacgataataataccagtgcttactctctatgatctaaagctaaaaacaaagcttaagcttccattattataactctttccctgcaaaacgacatgatgttttcttcttcacgacgaagacgacgaggcgtttacgtttccgccaccatcagctcctccactatcactctcaaatctcccaccaccaccgtcaccgtcgttagctaaaccgcgaactccatcatcgttactgttctcgccgccgataccgttatcgtttctctgcacggtggttgctcctccgccggagaatttgaaggagtttttgttattatgcatccaaactttgagaacgcctttatcaactccgatctcacggcaaaaatcacgaacttcgtcttcgtcacgtttctgaatcttccaaccgattcgatcggcgaattcatgcatcttctctttctgatttgagctaaacttcgtcctgaatcgcttcctcgagccaggcgtggcggagagatggttagccgcggcggcgaagtttagatctgagaacggtgcggttttattattaccggagagagctaaaagcatgtaggaggaagagataggcggcggagaagatgaattaggactacgtggtaacggaggagctaccggaggaggaggatgatgacggtgatgaggctgatactcaattgcggcggttgttgttgaagatggaagaagagacggtggtggaacggcggaggaatcgtcagtttcacggcggtggaagttacggtgacaaccacaagctgcacacttgagagaagttggatcggaaggtgttgaagaaggagacggcataaattcgccgcaaccgtcaagcgcgtgaccaccaatcgccgccgcgtggttcttgagacattctttgtatatgactttgttgttgttgtggtggtggtggtggtggcgtttgatgattccgttactgaaagagattggtttagctggttggatccgggtcggagtttcggattcgggttctggtgattttggagtcatatccattgatctaacttcaagcatctttatgtttttattttcttgaaaaaaatcaagaaaatattagggtttatgttaaggttacaaaaaaaaaaagtttgatattgagaagaagaagatatggataaaaagagattaaatcaacttttgaagatcatgttttttgtaataagtttaagaaaataaactttagaggaagaagatgagttataagatgatagtgaatctgctctggttgatgaatgttgctaagagagaataaaataatttaatagggagagatataaaaatgttaataaatgtgaataataaatatatttaaaataaaaggacagagcttgaagatgtttaacagagaaaggtagggtttgatgatttaactatggttaaatgtatggttaaagtgggacctgtaatagggagtggggaaatatatatagagtaataaatgtcttaaacctaaagacagtccaattataattaatattctcatgcattgtgacacttcttgtttttttttgaagttggcttctttttactttattctaatatttgttccttctgttaaaatatgtttagcattttgta

SEQ ID NO: 32537 - DNA, 1876 bp, Arabidopsis thaliana landsberg
ttgaagaataaaaaggtatgttttaactttttattatttcaatttgtggcaaaactactctagcaacatttgtaacatttaaatgtgtatatatgaatggaaccatgggtatgtatatcatattgagacacaatttaaaaaaaatttacattttgataagattttgcggttttcatccatatcacaaaagcttgtatttgcggttaaattctgcatttgcggttactgaaactaccataaacggactccccatcgatgaatttaccgaacattcctcgacaatccatgcatatacggttagtctattttcccgtaaaactcacatccaaggtcgaaaaccgatagacaggattcttctcttattataatgagtcttacttaatctgcattgtcaaccaattgtccaaaaatacgttctttccatactcggatctcgactcgcggttcccggtcccggcatttctttaaactaatcccgagccacaaaccactacttatcatgtgtcatttattggtttaccgttcaccctaaggaatcatcccaattagcatcaataatccgcggttaagtgattctatataccagctaatgaagggtctaatgagttttgtagctagaaaacggtttggactttttatggcatgtcaattaattaaactaacacagcaaggttagtttgtcgtaacataacacaacttcgacgctagggttttgctccacggcttttgtagataatattattacacggtgtagccaatttcacctactgctaaaatctgagaaatgttcttggtttgttttggatgatgataattgcagctcagctactaacagattgatcacatcaaaggatcatgcttcagtgcagctcaacattggtcatcttgatgctaatggactctacactggtcaattcactacctttgctctctgcggttttgtccgtgctcaggtttgtcaagtttagcttcttgatcataaatcttgttactctagctatagaattggccctggatcattgtgttattagtgttggaaacattgttaatggtttctagaaacgatgtagggtgatgcagacagtggagtcgataggctatggaagaaaaagaaggttgaagccaaacaacagtaaaaccaacaagcttgttttctaggtttttttgaaacttgtaactgtttttttttttttttactttcttgttctgcaaagatagttttggtttgaaagataatggaatgagatgtttagttcctgttgatgttctatgccaaaatagatcaataattgtattgtagctattagcatatacaactataagattggagattagtctacccaaaaagaaatgtatgtgtttcaatgtgatgttagatagatattgatagcaataggataaatattagctaaacaagagaatgaagattggagaaactcaggatgaatcagtaggttattcaagtttagtatgatgatgaaggcatggctttgttggaactatagaagagcatatctttgttttagcttcttaacttgagatttgtagacaagcttgatactttcgaattaatgttgtttgtcccaaagtaacggtctgcaaattctcccaagcctggaatcacacgcgagtcctcattgagagatgaatcgatttccgatgtcacaatctttagcatcgggaatttcttgcaaagcgcgtggatgccttgaggtgcctgcggttttttcttgggttagtaataataatgatgattacagagagaaacatggacaagaggtttgtttggctggtctttagttactgctataagattgagaaagatgatatgtgattctggaactcccttgcttagaagcaagttatagctttaact

SEQ ID NO: 32538 - DNA, 2434 bp, Arabidopsis thaliana landsberg
ttgctaattggttcataaacgcgagagttcgtctatggaaaccgatgatcgaagagatgtataaagaagagtttggtgatgaatctgagttactaatctccaaatcttcccaagaacccaacagcacaaaccaagaagactcctcatcgcagcagcagcagcagcaagagaacaacaacaacagcaacctcgcttattcatctgcagacacaacaaacattgtcttctcatcagaaaccaaaccagatcgtgttctaggcaatgataacgacccacagcaacaacagataaaccggtcatcggattacgacactctgatgaactatcacgggtttggtgttgatgattaccgttacattagcggaagcaaccagcaagaaagtagattctccaattcccatcacttacacgactttgttgtgtgatattatctggttcttcttggtacagaggagatgattcttgaagcgcaagaaatgtgcttttgcatttttatagtattaggcataatacacccattctctatggattatatagtagatgtgtaggttgcttttgtgtatagtagactcttaagccaaatattgatatgtgtgtataataatattcacggtggtataaaggatacttgcaagtgtgaaaaaatctgaacttgagacttttgtggtaaatgtttcacgattctttatagtatactcatctgaacttgagacttttgtggtaaatgtttcacgattctttatagtatactagatgagtacccgcactacatgcgggttatgtattactgtttataaattgttttatataatgtctgttcatataaagtaaagttgaatgcatcgtttttgaaacataaatatgttttgtaattgttttcaaaaagtccaactatattagattctcagtttttttttttaatttacatatccttgttcttttggttatatatttagtttgtgagacggtgaaattttagaaaatttatttgttacattaaaaatataacatgtctttattaaccatgtttctacatatccaatctaattatatttaacttgatgttcttggaaagtttagttaagttcttgtaataatcttatatcttacgtattagttataaggatagctcttcaaacatctttcaaattacttgttttcttaacataaatctcgaaaagcttagatatatttaatctgcatattcatttagtttctttcataataatcgtctaatttttaggcaaaaaatatgtgtagcatgtttggatctcaaaattattgaggatatattgaattaaaaaatttagaaagagtgatggttgaagtttcgacttatgataggttcatatgttgaattaattactaattatgtattactcatttaagaaatctaggtggcaagttctcatgtgctgatgtgtcaagttgtaggagagagttggccaactttcatatatatgatttaatttcttattccatctttggttaataggcttagtttcttgctgaatattggatactaatcttgtatcactatattacatgttttagtcaaatagtaattaagtacgtttacacgtgtattttattactattactagagatcaaatcacaattctaatataaaaacggtaactaactcttaaaacattaacctgtaaaatgtacttacgatggcttgaagacagagttgttacattcttagcataatccattattgtagttgcaagatcaatccataaacaaaaatagaaatcaatatatataacaaaaggaaattagatgaacatgcttaattgattatgaaactaattactactcacgtatagatttctttattgagtactaatgattaaacaaggcaaactacatagagactataagcctataacacatgcccagataacttaatatcactattttacacgaaccggaggaatactctgctcgttcttgaagaaattatcaggatcatacttagctttaacatccatcaatctcttcaaattccccaagaaatacttggatccatagatcttagcttcatccacgtttgtctcaccactcggattgcttccaacatcgatatctctgtaattaaaaaaggcctctctcgggttacttgacacgtacggttcagcaacctcgtaaagctccttcatcatacttaggctaatctctgtggcgtttgcagccaaccatgttgtagagtattgaaccttgaacatgtttcctttacgatgaggaaatgctgtagcggtcgacggaatctggtccatcactccaccataagggttgaattgcatccacacaatatcgttgaacttaaacattgtcttccaaagcttctctaatccttcttttgggattggttttttgacataatctgatttgctcttaaagaatcctggattcgttggcctatctagaa

SEQ ID NO: 32539 - DNA, 3320 bp, Arabidopsis thaliana landsberg
tgtttcagtcgggtccgttgaagatacagccaaaccggtttcagctagttccccagagaaagcaatattggattctagtgaaacttcatctgactctgatgttccatctttgagacaccaccataatgttgttcctgttgatgttgagagtgatccttgttcaaaaccttcttctcttgaacaaggtaacagatctatattattaggggataaagatgaccttaaatctcaatcagggagacaacaagattcgggttgggatcggtttaggaaaagaacaaccaagagatgtgattctcaaagtgtcatcaacagattatccacttctaggcatccttgtgatgaaggcacttcttcttcagcaaactactttccagattcactccttgaattccagaaacacttgaaagatcagagcaacgaagcaattgagcaagaccgagctggacttctgagacagttagaaaagatcaaagaacagcttgttcagtcttgcaatgtggcaactgacaagtctaaagaacaggctcctagttcttcgtccgcctcggggttgaacaaggcgcctccaatgcggtttcacagtacaggaaatcacgctgttggaggtccttcttattaccatcaaccacagtttccttacaacaacaacaacatcaatgaagcccctatgcaccacagtctgatgcatccctcttatggagaccctcataggttcccgatacacggaagaggtcctcatccctacttctcgggacaatatgttggtaataataacaacggtcatgatctctttgacgcatacccgcagcaaaacgggcattttcatcactcatcttgctcttgttaccactgttatgataataaatactggcgaggttcagcaccggtggtccctgatgcaccctataatgctggtttttatcctcatgagagcgttatgggttttgctccaccgcataatcctagaacttatggttctcgtggtctacagcctcatggaagatggcctagtaacttcagtgatgctcaaatggatgctctttctcggattcgtcctcctaaagttgtattatcaggcggatctcgtcatatccgccctttggcaggtggtgcaccgtttataacctgtcaaaactgctttgagcttctacaattgccaaagaaaccagaggctggtacaaagaaacaacagaaagtgcggtgtggagcatgttcctgtttgatagatttatctgttgttaataacaaattcgttctctcgacaaacacagcttcaacgagacaaggagaagcccgtgtagctgctgattacacttctgatgactatgatcttcttggttatgtatttcactcgttggatgatgaaccaagagatcttccgggattgatttcagacaagtctcaagatatgcaacacgttcattctcattccgccagcctttccgagggagagctaagctcagacagtctaaccgctaagccactagctgaagctcacgaaaactttgttgattactcttcgatcaatcatgaccggtctggagcaggcagccgtagctctcgttcagaacacgacaaggtcacactgagcaaggcaacagccatgagacagaactccatgaaagaggtttcacttgcaagtgagatggaagttaacttcaacgactactctcatcgtaacagtggagtatctaaagatcagcagcaaagagctaagaagagcggattcgcgagcattgtgaagaaaagcttcaaagatctgacaaaatctattcagaatgatgaagggaacaaaagcaatgtttcgataaatggacatcctttaaccgaacgtctgctgagaaaagcagagaagcaagccggagtcattcagccaggaaactactggtaagtaactttcgatgcctcttctgttatgacatcttcttcatgactgctaatgtgttttggggacattctaggtatgattacagagctggattctggggagtaatggagggtccaggtcttggaatattaccggtaacaacatttttgatattgcttcttgtcaatatgttcatgaatcttactaaaaaggcggaatcctttttgttgcagccattcatagaagagcttatttacccaatgccagagaactgctcaggtggaacaacgggagtgtatgtgaacggaagagagcttcaccggaaagatttggacttgcttgcgggtagaggacttcctccggacagagatagatcctacattgttgacataacgggtagagtcatagatgaagacaccggtgaagagctcgattgcctcgggaaactagccccaacgtaaacctttttacatcacaacttttgttactttcttcacaagaaatttatgtgtgatccagttggtttgtttgttgatggtgcaggattgagaaattgaagcgtgggtttgggatgagacttccaaagagaactacgtgaaagaagataagaggagagatatgtatttagctgaatatcttttgtttagaaagagagagcttatgtatgtatttagaaattggtattatttgcttccaagtttaatttttagacttcttcaatcaaaatttgctgcaacgaacaattgaaatgaatttgtcatacgtctcaatagaaaacaaacaaaaaaattgagatgaaagattcttaaaccaattctcaagaaacaattcatgatggacattatgatgacattggctcctttaaatggaacagaaatagcagtgattgatgatctaacagacgttgacatcaggctagtctttgtgcggagatagaagcggcctggttatgagaatgttggagccatcaattgctttggttatcatgccatttgtcctcaaatcttgattctgcccactacatgatctacaactccatggctttgaagtagcaatagaatctgctatcggatccaaatgatctcattatccaaaccacaacagtgtcttctttgatggttagtataagtcttgcatcttatttagagtgtttgtgtttggttcgattgatctttgtaactgtgtttatgtaatcactcaagtatgctgtctgggtagtcggaagacagagtattatttattccctccttcagctgcaaaaattctctattttaagattaattagcccaatgtgagtaagcacacgttagctagctgagagagtgtggctttaattagcatatggtttagtgttaacatggctaatctatgcaaaattttatcttctccgtcaacaagaaaggatcgacttttaaacattggatcgacgtttagttaggtatggggcttt

SEQ ID NO: 32540 - DNA, 7241 bp, Arabidopsis thaliana landsberg
tggtctttggaggtcagggaaaggaaaaatcacgttttacctttatcctgaggtagattttacacaggagaaatgtgatactcaggaaaattcagggaaaagaggagacgtattgttccttccacaaaggccttatatggttctgggatctttgcgtcagcaattgctttatcctacctggagtgcaactgtggaggagacgacacctggtggcagtaatattgacggtactcagtttaaatttgtgtctagtaacaaccatttctttcaactccatttaagtttatgcaagcagattatagaacccaaaagcaaatcgactgaagaaaaaatgcgttgattttgttaggttcaccacctctgctgattagagaggacggaaatgaaaagccgacaacagatgatctgatgcggactctagagaaggtttgtcttggacatatagcggatcgctttggtggtcttgattcgatacacgagtggtccagtgttctctcacttggtgagcagcagcgccttgcctttgcacggttattgctgtctcagccaaagctggcgctcctggatgaatccaccagtgcgttggatgaagctaatgaggtacttgttggttctcctctcatctatcatttagaataatatcatgtacatgtagcgttgagccattaaaattcctcttgatgcccaggcgttcctgtaccagcaaatccagtcggctggcattacatatataagcattggccaccgccggactttaacgaaattccataacaagatcttacaaatctcaacggcagacccgaagagcaatgaacgtaactggcgaatagaggacgtggatgcccaagattctttgtacggtagattgaatcaaaaggaggtgccaagtgaaagctgatcaaaacctgattgattacataagagacagaagcagcaggtaaatctgcaaacgggtgtcatgaaacatataagaaacatgtttggtgtccattttgtatataatctaccagacttgacgttgactgaagatgcaagtaaatagagagattgatacagatacgagtgcaacgaagttctgattaaaaataacacgcgagatgagctaaaaattcaaaaccggctgagtatttatcataagcccaataaatctaacgatgggcccatttgagaaagcctgatagagtgagaaaatgtaacacgactgactcgactcagtcgctcaaagtcgaaaaagaaagaaggcgcaaggaggatggtgacgaaagaatccattgaagtgatagctcagagcattggactctccactctttctccggacgtctcagccgctcttgctcccgatgtcgagtatcgcgtccgagaggtcatgcaggtatatcatcaacttcaactttacttttgccctctaatctcctctttaacttgtcgtcgcaatctccaggaagctatcaaatgcatgcgtcatgctcgacgcaccactttaatggctcatgatgtcgattctgctcttcatttcaggaatttggaggtttcctcttcctctcttcttcttttatttcataccgttgaccctgattttgacttttttttgtatagcctacctctggctccaaaagtatgcggttcaagagagctcctgagaacagagatctatacttcttcgatgacaaagatgtcgagctcaagaatgtaagcttcattgattggccatgaatgaagaagatggtgaaatgttgtttattgttattaagcttcccttcatggtctcttgtgcaggttatcgaagctcctctaccaaatgcacctcctgatgcatctgttttctctcattggttggcaattgatggtattcaaccttccattccacagaattctcctctccaaggtatttcttttgtcttcttttgcatcacctactacttctccttctaatccctcttccatgacaatttgtagccatatctgaccttaaacgatcggaatataaggacgatggcttggctgctagacaggtgctttctaaggaccttcaggttattttactcccttctttttttgggtctttacctcgctctttgaatgctatataatccttgcttgctctcgatgcagatttactttgacaaagtcacggagtgggctttgactcaatctggctccaccctctttagacaagcactcgccagcttggaaattgatcctggactccacccattagttccctttttcacttctttcatcgctgaagaggtttgtctttgtaatccaacacttctagtcttgacttttattctaacttgaccacattttcactactttttttgtgcttgcaatttctccagattgtcaaaaacatggataattatccaatcttgttggctttgatgcgtcttgctagaagcctccttcataaccctcatgtacatattgagccatatgtaagttttgtgcgcacactttttttttgtttttttttgtttctcttctcccttctcctccttctgttgacttttaacttgttgtattctgttcagctgcatcagttgatgccgtctattatcacttgccttattgccaagcgcttaggaagaaggtcatctgataatcactgggacttgagaaacttcactgccagcacagttgcttcaacgtgcaaaaggttaatgttacattcttgctttgtgatttcatgcatcttatacaaccatataacttgcaatcacattagtgaactttttacaggtttggacacgtttatcacaatttgttgccacgtgtcacaagatcactgcttcatacctttttggacccaaccaaggcactcccacaacactatggggcaattcaagggatggtagcccttgggcttaatatggtacttcctcttgatgcttcttgattatcataacgaagagtagcactttaggttgtgcgtctagaatttttacataagaaagcataagtttaaaactaatagtagcatgatccgacatcctcgataaagttattaaacctgcaattgaaccttaggatatatatcctttggtcgtccgtaagtattttcttgctttatacctttgtctaggttcgctttcttgttctcccaaacctagggccgtatttgctgcttcttttacctgaaatgggacttgagaagcagaaggaagaagctaagaggcatggggcttggcttgtttatggagcgttgatggtgagtatgctttctagtttgatacagaaattagaaaacttgtttgctttcaatctcgtgttgcaaaacaggcaggagagcatataaactttaactttccataggtggcagctggtcgatgcctatatgaacggcttaaaacatctgagacactgctgtctcctccaactagctctgtctggaagacaaatggaaagctcaccagccccaggcaaagtataaaatctggtctcattctttttttttcttttggcgttctaaacacggagatacgcgttcttaaataatttttttcttcggccaaggtaaacgcaaagcaagcagtgacaacttaactcatcaaccaccactgaagaagatagcagtagggggaattatacaaatgagctccacacaaatgcagatgcgcggaaccacaacagtccctcaacagtcccacacagatgcagatgcacggcaccacaatagtccctcaacaattgctccgaagacttcagctgctgcaggcactgacgtcgacaactatctctttcctctttttgagtattttggtgagagcatgcttatgttcacccccacacatgagctcagtttcttcttgtaatagattattgacatggtaattgtatgtaccacaataaatacatctatataatatttcgaaatgtcttggaaatcgtcaactttatagtgggcattttgcgagaggtaaaatcaaccagtgttaatcttacatagacatatgtgtactctaattatagcttggcctggaccacaaatacacatcttttccatgctactccccatctccatctccatctccactattagttgtgaagaacggagtcagaaagtttttgtccaacgcggtgaatgatgtagtgctgcaaagttttgtcaagtgagtcccaaaaaattgcaaatatcgctttttactcaggaaaacatactaagccattctcttattcttacgttttgtgaaactccttcagcttcatcttgaacctgcttcctgatgatgatgtatcctcgtcagatgaagctccaatgctaaaaggaggagggacatactgatgatcgctctcttcaaagccctaaccacgtatctgggagcgttagaaaaagtacatacacaactttacttcaaagatattagagtagatcgtcgagagtttacttcagacatggagtcatcaagatcgtcacctacaacttccaaagcttccaacattttacctgtcgaacctcctattagtaaaacctgaaatattactgcaatggataagaaacgcagcctatgtattattctccaactctcgctgattcttatgtatactaccactggaaataacatagatgcttttcatggagagaatacgaaagttaccgtgacaacaacaatagttgtggttgcagtaaagatgatttggccgtgaccctctggtagatcatgaagtgattgaagtgcaagtgcaaatgccattgcccctcgaagtcctatcgatgtgccaatatgtgtacaagttttaatagtttgtagatataaaaatgggcatcaggagacaagaacaaaagctattagctcaactcaccactataccaaagggctttttggtgcttcataggtatcttctggttctcctgtctaaataggttgaccaaatatgcacacccaaatacattgacagccctgcgtgagaaaagcattgcagaacatataggtaaatccgaatcgaaaaccatggtgataatgaagcgatcagccaggataaaaaagcatttagtcacctagccacgccaataaacaactgatgtcagtcatgaaacgcagaagcaaaaggtaaagtcaaggatttacaacactgactaacactgcatacaatcactgacgatcagtaaatgaggatacaatagagaaaaggataaacccaacatgggaccagctatgctgctccatggcaatatcaaatcccatgtaaatgaacctagaaaagcattaaacaaatcaatatcaatctaatagaactttaagcgtagaaattgttatccaacaatggatgttattgctctggactcacgtgaaagtttctgctagcgaagatatcaagtgaaaaaaagaagatacgaaactctgtgaagcttctgagagatttgagaaagtgtagcgcttcataacctacagtagcactatattaggcagcctaaatatgtctttccaagatattaacatcaactaagatgtaaaagctacaatgactcggcgattacaattcctgtgaagagtatagaaacaatgccggagagaccaacaccttctgcaagcatgtatcttacagaataaccagaatacattagggggaagaagtgttgtcataaatacgaagagacaggaggagagttgttttgtctacttacgaaaaatacgggaaaagtacaaagagacaacactccaagttctgaagactgaggtagagaaaagagaaaacagagacattacatttacaatatgttcagagagtattaacaatgtaaatacaacagtatagaaagagttaagaaaagatatggcacttacttctcggtgtccaatcctgcatacttaaagaggtgttctgagttaagattttacaatacatttttggccatgtgacatctaataagaaaaatagaggattcgaggaaggatattaaagcttgaagtgtaatccaaccccaacccctgcagaataatattaagactgttagtatgtttaagcaatatatgaagtcgatgaaggaatcggttagaagctattggcagaactatttattctgggagaaaagaaaacgaagaaaataacaggtcttatatatatagaaaaaaatcaggtcttatatatgtagatgtatatgtgactgtgaaggactttaaaagaaaaagattccctgattcaaagggtaactaatacgaccgtttcagttcaagttaattattgcttattttggttctatgaatcttcacaaagaaacctagtcgactagtcttttgttcattgtttagataatagtgcgtctagtttggtaggagggactttgatgagactaatattgttataaaaactgtgatgaaggatcaagaaggaataagagcaaacagacctgcagacattgagccagcaaaagtctcaaaaaacctgatcaccaccatgaaaaaatgttccccagacgaggactggcggtttactaaggacattgttctgcatcgaaagtttttatattgtactttaatactttgcttaaaaggtatctaaaaggaaaagaatcatgtgatatacagacctgtacaatgatattgccatctacgaggcgcaccacatacacgaaaacccatttgatggagttagtgagtgttgtggtttttcgtttgcatatatacttaaaaggaagagcccaatatcgcagcagataataaaaactcacagcatcattcagaactgattctccaaagaccaaagcatacaggttaacatcggtgcccacatcctgccataaaataaatgttcatcacaatgcaaggcatcattttagggaaaatacatgcgaatacttgtatcctgtggaaactgatagtagaaggaaaagcagaagcacctggaatatagagagtacagtgacagggtccgtagctgatataagtgcaccaaacataagacactcaacaaagggaagtttatacatgagatacatagagccgccaagataactgcaaaaaaggcgggaaaaacagataaggtagaagcaaaacaaagaagctaagaaagaagagggtgatgatccctacaccagaccaccagtaacaactgaagcgacaaaagttccgatgatagcaaaggtaacaatggctccaaagttagaaaagaatggtttctgcatccatacaaaaatgatcttagctactgttcaagtcagctcctgcggaagaaagaaagataagcacttacaggttgaagactgaaacctgactgggttcaaacatatgaatgatgtcaag

SEQ ID NO: 32541 - DNA, 1667 bp, Arabidopsis thaliana landsberg
atccaaactttcgagaccacttttatcaactccgatctgccggcaaaaatcacgaacatcgtcttcgtcacgtttttgcatcttccaaccaacacgttcggcgaattcatgcatcttctctttctgaaactggctgaattttgttcggaatcttttacgagatccgtgaagagtatgttggtggtggtggtggtggttgtttccggcggagaagttaagatcggagaaagaagctaagttgttgttgttgttattagtaccggagagagataagagcatgtaagaggaagagattggtggaggagaagctgagttaggactacgtggtggtggaggaggtggtggtggtggtggatgatgacggtggtgaggttgatactctacggcggtggaaggaggaggagggatttgggaagagtcgttgttgttatctggatcacggcggtggaaattacggtggcagccacaagcagcacatttgagagaagttggatcggaggagattgacgacggagacggcatgaattcgccgcaaccgtcgagagcgtgaccacctaaagccgccgcgtggtttttgagacattctttgtaagtaaagaggagaggatggtggtggtggtggtggcgtttgatgatgccgttgctaaaggaaatgggtttcgccggttggatccgggtcggagtttcggattcgggttcgggtgatttaggagttggtgttgttgttgttgttattgtaggagtcatatccatcatagcttaaaacattaatataaccaataatttgaagaaaaaaaagacttagggtttttgggttaagagctttgaaaatatggtatgagtttcagagaatgtgaatagaaaaatgaagaagaagaagaaataaagataagtaaaaaggttctaacttcttaagctgttggaggatttttaatattacatattgtccacttgatttttattggtaatattcgtttagaggaggaaaagaagaaaatgatatgatgactatgacgactgttgctgaagcaaataaagaaataattttttgaaaaaggacaattgtattaaactaaatttatgattttaaatgaaataataaagagacttggatttagggatattttaatcaagggaaccaaggtttgatgctttttatttgcttcagcaacagtcgtgattaggtagatggagtttgtgggatccacaaagacagtgagtgttagattttgcggtgaaaaagcgtaataaaaatgtggctactagtgtcttaaacctaaaggcacaagtcaatactgaaaaagaaaaaataagtcttatggtaacaatggaccggttacatttgttctaagaccagcaatgttgtgaaagatagattctcctttgactacaacaaaaacattaaggtcaaacctttcaaatgtaggaatgagaaagatcacattcttgtaaaagttgggagtgaatttttaggttcccattatggttaagtctgtatcgatgatattcgagggaaaatgtcaattttgctagattttgatgaacaagttgagagcaatgattgaaatttcgtccttcatatactagagattattagaggatccaaaactattatgaaaaatacattagccaatgtaactagggtgatagctactagagattcatat

SEQ ID NO: 32542 - DNA, 986 bp, Arabidopsis thaliana landsberg
gtttttctagtcctgtatacagtataagcgtcaccaagaacgcacctttgaaaatgcgttagggttatatgtatccattctttttttgtcatccatagtttaagaactattaactgtttttctatgttaactattaattgtcacccatactatttaagaatttttttgtaaaattatagtgttgatattatacaataacttaaatgatgagagtggccggttagttatgttttattgatgacaacgtgagactggttactcatccgatttatcagaaacagtataaaagaaatcatccaattcctcttagcagcaaaataagtaagtatccacttcgattagatcgtttctagtctatagcgagtgtgatatataggtgcgtggaataaaagcttaaagagatgaagatgactgaagaggttaaaattaggattttacaattttatttgaggcatagactaatgattggaaacgttttaaaatagaaagtttagtaggatttttataacacgtccatttctagtcaacatagattaatcattgctaattacaaattcaataaaagaagggaaaaaacaaaaagtaaaggcgcacatgcattccaccatacctttgtattcacataatagcttatactataatatatttatacatgcaaactatattttcatattgatgcttagttaagtaaatgagatggcattttttaaaagtcaacattgttcaccgaatttttgagacggcttatttggtacacactcaaaaccatcaaatagtgatacatctacttaaaattttagagttgaatgatatcgtaactcgatccaaaccttgatgtaaccaacacaactcaatctacttcaaagatgatattcttgaaatccaatgtttgaatacagtccattgtccatgtagaagcccctgagcctccgcaactgacatttgtttcggtaatttatgtatacgtacctagcccaagaaccaag

SEQ ID NO: 32543 - DNA, 7397 bp, Arabidopsis thaliana landsberg
  unsure (1)..(7397): unsure at all n locations
ctcctttgcggttttccacaaatttccagaattggcgtcacaacgccacccacgcataatgctcctctcaccttcttcttgccgtttgtcaacgcccacttcctgtatccacacaggtggatcaacagaggcattactggtggtgcgttgttgagatcgccttttaagaccttctttcgctttgtacggcggataatgcctgtaagtgcgaaatctatcatctccatgtctgtgttagacacagtgcctgtagactccctggaataaagaacattgactattgagcgctgaaagtagcgaatcactggactccggatttggttgcttttggaccgtacagagtttagcggcacattgttcccaatagtagcccacaaatccttaagctcttccatgtcaaacttaggcttggttccctttccactagggaagccaaacagtctttccaaactcttgatcgacaactgatagcgctgttgatcaaccgagaacgtcaagaaccctaatcctatactctccaactcatactttgtgagaccgtgatacatctccacttgcattgtggcagaaactcgatcgtttcctccttgtaggcagcgtatgggtaggacatgagtgtcttcagatgacacttcttgaacaggttttgcacgtcctctggtagccccaactgggttaaagtctcatagcaggggtacctcgttccctagaaatctttcagctcaaagagtatgatatactcttcgactggaacctcgtcgggtttgttcagtagctttgtctccttgcgccatgactctggctcatactcaatctcaatgtcctaatcaatcaactcatacctactcgacatcgctctctttcctctagcgatttcagctcttctctgactacgtcgagctatcgagcgttctatttctatcttgaagctttcgtaaacgtgttcttctctctctggtctagtggaccaagactcagcttcatctacattatattcaggatccactgaggattccctactttagtttctcatgacaaaacctgaaattagatggaacacaaagaaaaatgttaatacgatagtcccaacaaaaccaaaacacaaaccaatcgagtataccgatcaagtaaactgatcaagtaaaccgtttttttttttggtttggtgaattgttgatcgagtgattccttgagtgagtgaatggagtgttctttgcgatcgagtgaggttgagaggcgagacttcttgtgggattgattggtgatacgcgatcgagtgttgctagtgaagagtgagacgaggtcgagtgatcttgtgaggtcgagtgaagctagtttcgtggttgtgagatagagtgaaacggcggtcgagtgaatcggttgttgatggtggcgtcttccttcttcttctcttttgattcgggagcaagttgatttgagaatgagatgatggtcgagtgaactaatggagcttgagcggtgaggagcagtggagaagtcgagtgattgtttcggtgagaagagaaaacggtggcagttggtcgagtgactggaacaaagcggtggaaaacgatgaggctatgagggagctgcggtcgagtgttgttggtggcgagattaagtgagaagtggcgatgtgatgaagatggtgatgagagatcgagtgaatgcgcgacgtcgagtgggttgaagaggcgatgtgatgagctttcgtggggaagagagcagtggcgttggaagcgatatagagatgatgagcttgaaggtgatatttgttcagcggtcgagtatatgaagagagatggtgacgtgatcgagtgaaggttgtgaggatgatgatatcgattgaagtcgagtgtttttatgggagagaagctggagtggtcgagttgagagattaagtcgagtagtgaaggtgaggataaggttgcgtagtgatcgagtggagagatgagtgtgaagagattccatgtctcttggtctgctgcatggaggacatgggcatcaatggtgggtcccactatggcttcttgtctttcttctgtgctctctgtttactggaaaaacctcaggaaatcccgcaatcctctgtaaacttgataaactccctataagactctgtagcttctgttggtcgagtaaaatgatgatttaatttttttttagggttttaaacatcactcatactcgaccactatactcgatctctaggccatcagtggagtaaaagttttgaatttttactctaccttcacgttactcctttcttcctgagaaccacaaacacaaccaaaacaaataaaaaataacaagaaagtaagaattatttacaaggatagtcatggtacttcctcccaagtgagcttgtttaaagtctctagcttgactcctcacactcatagagagggtctgcatagtcctctctagtatcatcatcatacccagcgtcctccgtggagaggtctgcagcagaatactcaattccccttttttcaaaataggcttccttctcttctggaggctaatctgtctcttgaaaccatcttgaagtgaattcttttctcgcgatagtgttaatcccgcctttaggttgagctttcttctgcatatgattcagcttactcctaagttcctcaatagtgtgggctagcttctctatagtttcatcttgcttatcagacctctttataagttctttcactctttcagtctcatatccttctcctgagatcgctctatcatttccagaggttcttccatcttctgttgacccttgtggagttctgttgatgttaaagtgcaacttgatgtgctttccaaggttgagacctattttcccttctctgacatctatcactgcttccactgaagctaagaatggtcttcccagtattaagggatccttatgctctacttccatatccagcaccacgaagtctgtaggcacttctactccattaatcatgactggtaggtctttcagcatgccgaagggttttctagaagacctatccgcaaagatcaaagtcaggtcacaaggtttatattgaatgaactctaaccttcttgccacagagagtggcatcaagctgacagaggctccgagatcgcacagacaatcgctgaaggcaaattctccaatggaacatggtagagtgaaagatccaggattttctaacttctcttgaacaatcctcttatcaacagcttgggatggaggggcatcactttcatcatcggaggtgagacacatcgagccccttcagagtataaaatcttacacatctttgggaggaacaagcatcgggtggacttccttcattggcgtcagtgcttttattttgttcagctgcttctctgcaacagacttgtatgtcttcatccacgctttcctgaatgttcacggaagagcacgtgagggtaatgaagtaggtttgaatcgttttaccattctctccattatggccgcttttttttctgaggtggattgaataagatggcgagatccaccagactgattgaattcaacaacagagacctcaatctgagtagaagcctctccttcttgaacatcgctgtccccagtgattaagttaggaacaggtggagttgtcagctctcgatcatggcagatagtgatggcgtgagctgttgcatacgcctttggattctgtattgacttcccaggaagtcctataactttgggaggagaggtagatgcagattgtccttccaagcctccacttttgcattctgatcattgtagctacagtctagcttatggtgcaattgggatatcttcttcgcaatttccatagagctagatgcttgtccttgtagcagctgttgtaccatttgtttcatatcagcgtcaggagcagcaagaccttggtgttgctgaggtgcaaacccacgtggtggttgctgctggtcgttaccctgaaattgctactttggaacaaaactttggttataggggacgaaaggttagctctgaccctgctgttgctgtggaggatacacttgatcctgaggattagcaacgttggtgttgcggtaagagacgttagggtcgttagtctcgaagacgacgtatcctttgtagccaccttgattgctgatgaagctaacttattctaactggtttccctacccatcttggacctgatactgatcgtcaccaacaaggaagtgcacatgcttctgctgactaagaaggatcatgtccagcttgtcattcggtgctttgatctccttcttgtgtttgtcatcagagtcagctgtgcttctgatggtcctatcgcagtcctcgttgtaattaccatctgattgagcaaagttctcaaccaattcccagccttcttcaacatctttgttctggaaattcccattgctggcggtatccagaagcattctnnnnnnnnnnnnnnnnnnnntataaagagtgtcgagcagagagggtttaatgaagccatgataggggcattggttggtataaacccatgaaacgctcccatgcttcacaaaagctttcaccagccttctgtaaaaagccggagatctcatttctgagtcttgcagttctagcgttggagaagaactttgatagaaaagcattcttgcaatcatctcaggttgtgattgagtcatggggcagattcttctcctagatgtgtgctttgtcgcccatggagaatggaaacaaacggagcttaaatccgtcttcactgacaccattgatctttgttaggttgtagagcctatcgaattcatcaaggtggtcgagtggatcctccattggcagaccatggaatttgttcccctgaatcatcgagatgagaccactcttaatctcgaagttgttgttctggatagcaggaggtgcaattcctttcctctgacggtgatcacgtggtgcatctccagcaccaatgttggcaaggccattttgttgattctgttcgtcagccatttcgagtggttgctgaggcacagggttgactgtggttctcctttttctgagttcgcaagctatgcggttgatgttgtcgtagaaaaggaggttctgattgcctgttgatcgagtttgcatacaacagaggtgtacctggatcaagaagacaagaagaaaaacacacagttagtaaccgaaaagaaaattgaaaaagaacttgatctaagcaagtctgactcaaatgtaacaaacaaacacccaattggcaacggcgccaaattgataataggtttttagtcaattatcctaaaacaccaatcatgtcattgtactattttaggttatcaatccaaatgggtgtgatgctaacaatcaagatgtgatcagaagtcactaagtcaagccaagcaataacaggttttggtgtgttctagcagtcctaagtgaacatgcagaaacagaaaatcaaacagaaacagtaaaaacactcgaccaacacagctctttgcagagcactgggtgtggtcgagtgacaggtcgagtaatagacagaaaataaaacaaggatactcgactgccagtctattgccagacaactgggtggtcgaggtacgaggtcgagtaacaagaaagaattgcagaaattaagcgacagataacaggatgcagtaaacaacagtagagtaaacaaagaattcaatcagataaagaattcccaaggatggggtaattgagtagtttcgtttcctcagtttacaggtgattgacatgctcaataaattaaccctagacaacaaattcattaaccaaatctaagtgccaccgcanaagagactctcaagttaacctagtctcagactcaatcaccattgacgagagctaacctaacagacattacgaatcaataagttaaagtcaaaacgctccctgtaaccaataccttggtaaaaagccacgaatctctggaattagtggttcagacatttcatcaaataccttttgttaataaaatgtctgggctcaaattccagttgatgtgaaagcaataagcattaagaacaagtaatccagaagggatgtataaatccaagtcaaccacgtagcatactagggattctaaactactctaacccatccttagaaacctagtcactactcagacatcattgcagaaaacataaacgatgataagaatgaaaacatgatagcaacagagtaatagcgagatgataataggatgaacaacttagtaaacgaaatgaagagcaaatactgaatagattaagagaaatccatattacaaaatgtcaagaacacacaacgtctgcggaaaaaaaccttgtttcgaaaaatgtaaagtacaagctacttataggaaaaaattctgaaaccctaatactcaaaacaacacagtactgggacggatttaagaacgccactcgacccaggtggtcgagtgattggttggagtcttcttctcttacttgcgctcgagtgtcttgttgagtgcggaatggagaagactctgaagctggcagtcgagtatgatgtcgagtggtggaagatggtggtactcgacttggtggtagagtgattggtcgagtgtgcgatgatgaagggactcgaccatgtaatcgagtgggagatcgagtgaaggtgatggtggtactagaccagggggtcgagtggtgatgtgatatgatgggttcatctactcgaccaaggggtcaagtggtggtgagaagtggtgatgccatctactcgacaagggggtcgtgtggtgatccagagtgttgcggtcgagtgatgtgctacggaggcggtgaccgagtacttcagaaagtccagcatggcggtactcggcatcggggtcgagtatatttataagatcaagtccacttcttccaattagctcgtcaacagctccaaatcacatgaaaacaacacatatatgcaacatgcatgcaaaactatcctaaacatgtaaagtgatgacaaatgatgagaaatggtataaaacaatggtgatatgatgctaaagtgatgacaaatgaatgctcaaaacatgtaaaatgcacacttatcaccaaccaccatcaaaaattggttcaggccctcttcatccttggattctctggaaattatagatggctcgcaatcagcaaatctttgaaaatccccacgacaaccctcgcgaaatccttacacaagctatcatgttagcacatgaatggcaatctgctcaacttcagtccaaacaagtagtcacaaaacgttccttgggcccgagcaaagcacctgatctcgacctcattacatgccaaatatgcaaggatgggttgtatcttctcaacccgatctacgggctttaaacgacagatctcttcaattgcgacgcacacccgatcaccgattatggccgaagcccttgctattcgcctcg

SEQ ID NO: 32544 - DNA, 531 bp, Arabidopsis thaliana landsberg
  unsure (1)..(531): unsure at all n locations
aatttgctatactcttacctatacaatttggattgagaagcctagaaaagtcgcggttatttattgattacggtgatacaggaatcatttttacatgtccgcactgcgaattctgcagaaagattcaatctttgtgtgctaaagaaagtaattaaaacctctacttgtgtttttatttgcagggactgtatcctggatacattatattctttgtgcaatcagcattgatgatcgatggttcgaaaggtacgatactagccttcatctttcatttaatgatctgttttgattcagtttcagtaaataagtaatctaaaaacttctccctttgtattaaacagctatttaccggtggcaacaagcgatcagtccgaaaatggcaatgctgagaaatataatggtcttcatcaacttcctttacaccgttttggttctcaactactcagccgtacgtttcatggtaattaccaactcttttctctctcgtcacattgatagaataactcttaacgcctttntttaaaccccttt

SEQ ID NO: 32545 - DNA, 239 bp, Arabidopsis thaliana landsberg
aaaacaaacaaaaaaaaaaacaagcatatgtgacaacacgaattacatttatgattcatgcatggtcatcatcaccatcaggatttattattattaccatcaacatcatcaaggtaacatatccatagacatcatattgacatggtcacgtgggattcatcgattatgagtttcactcatccaaaatagttatcaatttcgtcatacaggtctggacgttcatagaccggtgtcttatt

SEQ ID NO: 32546 - DNA, 1066 bp, Arabidopsis thaliana landsberg
agtttagccgggatgtggccctggcaaacatcatggaattgtaccagtagatgccatcagtgataatccttatctagcgtcatctttcatcgccccactcgctacacatagaataacaatctctttgtgcaagaacacgaatcggttagagtagataaaaaaaatggaaggagagaatttgaataagagataccttcgttcaatgagagcatgcattaagggagttctggtttaaaaacatcgattatgttcccttcttcagctaatttgccgacataaccgtagaattcagtcagtttggaatgattgtctttgatcctagacgattaatcgagaaattgagataagggttttggtaaagagtagatagacaaattcagattaagacccatcctttgatcggtttttgtttgaaccatcggactagataaagtcaaagagaagcaagcctaaagacggtatatatgtagcaccatgatgcagatgctgaagaagataaatgagaacaaaaaaaaaatgagattagggaagaagaagaaggacgcggtgaaccgtagccgctgtaaataagtggagacttgagggtgtttttgtcaattttaaaattagatttatctttaaatggaagaaagaatctttttgtgatgcccgtacacacgcggcgaatcgttacactcacttatatatatttattcttctctttttttatatttttctttaaggatttttttccttttaattcggctattaattatattacaattttcagttttgggaaacttgttatttattttgtttttagtgctcttctcattcaagattctcatattcctgttatcctgtatttaatattttcccaaattagtcttaaaaagaggattctgaagaatctataatattttacaaacactattttctgcatatggagtggttcaggctgtgaaatatcccactaaaatatttattaaagataatataaaaagaatctgttgaaagactaaaaataaaataaagcatctcaattattggataaaaaattaaaaataaggaattaacaaaatcaaac

SEQ ID NO: 32547 - DNA, 3499 bp, Arabidopsis thaliana landsberg
  unsure (1)..(3499): unsure at all n locations
ctccgtcttctgggggtctcattttggctcattactctttcttccagagcacaagaggtgttttcggttccttctgattcatcaggtccctcatcatcattgtgttcatcaaaatcaaggtccatatcagtgttgtcgatcttcacttatgcacaattctcgttgctattaggtaagggactcctatagttttccttctcattttccttttgaagatttgcctttgctatccttgacactcttagaatattcacctgtctgttagcagcaggacgacctccatgcttttgctcagctgctctactaggaagctttgcttgagctttagacccaccaggggtgccctttatcggcgtcnnnnnnnnnnnnnnnnnnnnnntggagttctcattttgctttgaacccccttttggatctttctcccgatactttggaggggtcttatctggtctgtctccatttcgctcggaatggcatggctttgtgtatatgccaatcatattatcaaaagcaggctgagtaggcaactgaactaaatttatcttactcttccaaaatgcatgaccacagagatctgcccattgtattctttgagctgggtctttgataagaagagactcaatgagattgacaaatgaacgactagcatttccagggagtggaggagttggatctgaatgaatagatttcacaagctgggtaaactctcttgccacaaaaggaggtcttcctgtgtaacattcatatagtacacaaccaagtgcccacagatcagaagcaaaagaatggatccctccttcttcatatagctctggagccatataatacggggtaccacgttttccctgatgcatattatcacaagagatatagattcactgtctaacactggaaaagaagacggacaaaagtgtttaccgtggaaggagatttagaaatatcatccagcttccttgacaatccaaaatcacacagctgcaacacacagtgttatgagatcatttaaacattataaactatcatcataaactacacaccagacagaaacatacgtaccttaatatgtccgttttcatcaagtaagatgtttgatggtttcagatcacaatatataatagctgagaaattaaggaaagaatgtccagtaagagaaaacattttctagaagtcgtatcaaaatggtttagataggatcttactgcagggctatgacaagatcataagcaagaccatagatagattcttctggcagtttacagtcctgcagaacaagtgaatttcagaaaacctgtgaccttatatcagcaacaaacgtacaagcgacacctgctgaaatatgtcctgagatcaccccaacgcaatattccagaactaaccacatatgagaagaagtttattatgaaaccacaagaatataataattaaacaactatatatactacgagcagcagaatgttttgtattcttgttatatatgaaaccaccaattattagctagtaaatttttaccaatcatagaacttgagtatgtatgtttggatgatttagcgaatataggatcctgacttgaaaaggaagagcaaagttaccaaaattctcaatatccaagtcacttcaaaaattagagattgtggaaaaatgaagtttggttgacaaatctagagcaaatttatcacaatccaattataaacttcttaaagtcatgaaatctaacataatctcaggtaacacaagtataaatcactaatttggccaagagaagactcatctcctaattacctcatgaaaaaactttctctttctgcgacttgtcgacactcttgcaggccaaatacttgatagtcttcttcttccttcctttatacacattctgcaatacaatttaaacaaaacgttacatcaatggctttgtgaatatatggtattcccttggttaccttaaatcagagattcacctccaaatccaaacccgaaacttaaaaaccctaaattagatcgaagtttctattctatcagattcaaaacccacgaatcagcctcagaatgttcaactgtgtcttcgaaatcgaaaatccccagatgtaggaaaattgtaacaacctgtagaagcaatagagaaagagacttacctggagcgatgttgtcgcattgaatagacttaggcttgttgagaccatgatgagaacaatcttcaattcgagtttcataagcaagagaggcatgtaggctcgatcgaaggtgatttagggtttgggtgagcttggtcgaaaaaatcggaggtggagggaggaggtggctgaggggaaggaggaggtttggggagatggtccagccatagcggcggaggcggtggaggagcagattagagacatcattgatagatggagaagaagatagttgctcctcgagagcttttttttcttcgctcaaagttattgtgtttttttcacaagtattggcacttaactaaatattttgggctaagtagtggtggaataagtgatttagttttccccttagtgaaattatatcttagcgttgtttcaatgctattatacaatatctaaactaaaatttcatttttcataacagttacggaaaatgagctttcgtggtgtgctatcaatgtggatatttgttgtagcgtaaacaccatgtcattaagcagttcttgagccaattggattcctttccttggtatggagatgtgaaaacacactccaatttctctcaaaaccaatcgcactacacgtgagacgaagaatattgcaaagtctctaagtgttggtgttgtgcctccatacgcagaccaccacgtagctggtgatttcttttttcttttgacttattaccattcgaatcccaaagagtccataagcactcttaaactattctagttcgtcgcttaacctatcttgagttgcagcagcaagaaccaacctatcaaatgtgtagatagacctctcccaacctcttcacaatgcactctagactctggattatactgaaatttcggattcaagaagtagccattatgcaaaggctgatggagttgacaatctcagtgcttatcgataatttcaaatgaatctttgtatttgtcttttttaccattgaaggttttaacaatggccactttagccttatccattgcttcatagatgtatctcgtagctggtttcttctctccgtcaaccatccttgtgccagaaattgtcttgcataatgatcctcttcacagtccttgctcctatttccttttgccatttggaatctgcccattcttgagaagtcgcagaattcctcaagttttttctctgcttatgatactgcccaattgtgtgaaagacgtagcaaaccgtgttacagccgatctttgcagatttccatcgcttgtgaatttttctcatcatattcacaagggaagtgtgaccatagatataatcattcttgaagatgcattgtgtgataacagtcttcacttccgaaatctttccta

SEQ ID NO: 32548 - DNA, 1321 bp, Arabidopsis thaliana landsberg
  unsure (1)..(1321): unsure at all n locations
acacttttgctttgccattaaagtaatagtcaaatatgtgcttcacagattaaattggctttttgtgaagggaccatttacctctcactttctctgcttcaaatcctccttttcttagatgcaattcgtccactaggaccgtgcttcttctttcatccatctatctatctatacctttccatacattactcatctatttaatgtcttataaaattaaactgaaaagacatgtgtaaacaaagaaatgaaattctccatgcaaaaaaaacaatctatatttggtatcaaaatggtatagtcctatagatatggcatttatacaagattgtagctcatatccaaaaatttaaaacattacttgnaaaaacagatctcgtagatcaaatatgtaaatgcacacccggtctgcttgaccagctcatgaacggaccggactaggttagcttatatatatatataggttagcttataattgcaatgcattaaatcattaataggcaacagccaacagctctgtattgtacgtacatgaacgatgaagtgaagaagattttaatgggcaaacatatcttgtccctcatataaccaacctcacaagcaaaactttatggtgctaaatgatttttagcagattaaaaacagcaaaaaaataaaataaaaaactatacaacaaatgaagtgaagttaagaacacgagcccaccattgtcttttcatagttaaacttaaacactctagattacacctctatatacagttatacacaatcaatgtcgatacacatgtcttatgaagagaccattttcgaaagctagacttagaccctaatataacgtacacttttatcacaatgttgtagaattttagaaaatgttgcttataaatattagtcttcacttgaacaaaatcattcttcaatcattttagtgggttgaagatatttttattgtctgaaaagctagatgagtttcatttttttaaagcattttgtatggaccacgattcatttaattattataaatggagagagaatcttttcagatattgcattaacgatgttacatgtctagatattatgatgtcatacatgtctcccgacctcttgtcaatttcattttttgtctttatcatttcgtctcttgttggttttaaattttgttagtaatagtagaagtgtagagctagagtactagacatagaatacggttaactccagtttttttgaaaacgtaaacgtaaaaaatttattttaaaactggttcgatatactggtccaagatatccgaccataacccaaattttgtcttttatgatttagaaat

SEQ ID NO: 32549 - DNA, 2631 bp, Arabidopsis thaliana landsberg
aaaattcacgtagagcttttcacttcacggttaagaaaaagtattttcaataaataaatttaattgcaatgaaaaggactagtatattatagtttgtcaaatgtgttattattaataaatatccatcactgatgtattaatataatggtggcagaaattggatgggctccatgagaaaaagaaagcttctgtgagcagctttgtggtgcaacaacctctcttgcactacacaacttcctcttcctttttctggtgaaagactcttaagacgaagatattttttattttctttgaaagaaaatatcattctagttggtcactaattgtattatatattgcatcaaaacaataacaataaaacagatttatcaattttagaagaatgtaaattttaataaattacactgtattgtttttggttatttatttttctgtattgaaaacgacttaacaattgtctttacctattttgtgtgagtgaatttaataatttaatttcaaatacttgacccggatataagattcttttatgttgtctattttacaagaattttgattagtggactaaaaattcgatttttgatgctctttatcatgaaaatatatagtattatttaattctcccaaccatagaggatcaagatcctctctctgatcagtgatcatgttattagtgtacgaaaagtttagggaaattattacatttacctaaagtcaaatgacccactgaatatacaaatcgacatcaaatttcttgtggagaaaaaagtttgctcacaaaccctagttgatttatgttttcatcaatatataatatatatatttagattttgaaaacagtttgattgtccatactccataggtagattagaaaaccattttttgtttgggagatttgcaaaactactcttttgcaacaatatccttttatgttgttcatttttaaaaataccccttctcttgaacaaaatgaccaaattaccctcatctaatagaaacatgtaataggaaactgaacttttcccgccggcgccaaaatttttttttcccgccaaaaaaaaaaaaatctcccgccaaatttttttttcataacaattttttcctcagccaaaagaatgattttaaaaatccttgtaaatattttttggcggcaaatagatttacaagggattttgtaaatattttttggcggcaaatagatttacaagggattttaaaagaattttaaaagatttacaagagattttaaaaaggttttaaaagatttacaagagattttaaaagatttacaagggattttaaaagggttttacaatatttacaagggattttaaagggctttaaaatcctttgtaaatttttcaaaacacttttaaaccctttaaaagtattttgaaattaaaccctttacaagggattttaaaaccttttaaaattacttgtaaattttttaaaactcttttaaaatctcttgtaaatcttttaaaatctcttgtaaattttttgtaaatcttttaaaatcctttgtaaatcttttaaaacctttttaaaatctcttgtaaatcctttaaaacccttttaaaatccgttgtaaatcttttaaaacccttttaaaatctcttgtaaattttttaaaaatcttttaaaaatccattgtaaatcttttaaaaccctttaaaaattctttgtaaatattttaaaactcttttaaaatccctagtaaatctattttccatcaaaaaaattttaaaaaggttttaaatgatttacaagagattttaaaaggttttaaaaaaatttacaagagtttttaaagggttttcttgtaaattctttaaaaaaatcttttaaaaacccttgtacatcttttaaaaccctttaaaaatctcttgtaaatcttataaaacccttttaaaatcccttgtaaatctttcaaaacacttttagttaattgttttgatgataacttcttcttttttctctaacgttgaattattgttatttacagaagttggtgattgacggccacaccactggattctcgtacggactatagattaccgcacatgctttgatgtcgcagagagttgccaactcataaagtttcttcgttatcccttccttcctcatgggcatgcttgtgttagttagtttcgacacttctcttgatctcctatcaagtttactgcagcttgtgtctctatgtttgagttatgtatggttaagcttttcaattttcgaacttgttactcggatttctccgatgaagcctaatcttcatgtatctttctaatttcaatttataaattatgagcacacaaaaaaaaaaccttgagaaaaagttgtggaattgttttgtttttctgcatataatttaccaaataaataattgagcaaaacttgaaaaaaacttgagagaaacttaggaaagtagtcacagcatttagttatatattttttataaaggttttcaatgatgttatttttgttatgtttttaataaattatgtatactttaatattgtaaatcaaaattttcacaattggtttcgttagtatgcgttttgattacaaaaaaaaagaaagattagttaagttttgttaaaaatccccccaatttataataattat

SEQ ID NO: 32550 - DNA, 1668 bp, Arabidopsis thaliana landsberg
  unsure (1)..(1668): unsure at all n locations
aatctgcgagaatacttgaatataacttttttaaaatcatgggaagaaaagaattgttgttgacatagtttgagtcttttgatctcctaggtcttaacatttattaccttataaattatttgaacaatacatatggtgtatagagcagtagaaatacaactttaaaaaatataattttaactttgtatactgatacaagtttaatcaataaaagttcgactattccaaaggttataaaattagtgaaaatctaatagttatattcgcatcatattcactactcaaattttgtttatattaggttcggactggactatctacgtttattctcgttgtgagctatactcattctactattaccatttcgaacccataaacagatcattgtttggttgttttttgctaaaggtccataaatagattctacacaaatctcttaaaattccacttttaatacatttccctacttgttagaaagtattcacaaatcacaacttcatttatattttacgactttaggcttgacgaaagtacaaactgaaaaaataaaaacacgatataccatataagaaacagttgtgggctagtggtaaggaaaaattggggaaagctttgaagaaactaactcaagttcaaattcatcttaaaaacaaaagttatatatatgtgagaaatctggatttgggccaaacangttacattgtagtgggtaatatctaatctggctacccctgatattagtcagaaaatatttcaaactcgaaatagacaatgtggtgacctttcggaaaaaagtttactctgaaacactttaatgcgtttttataccggatcagtcgatgaaatttattaaaaaaaacatatagatataagatatacatgtgtatgtcacaatataaatatatttcgagttatttgaatatggacgttatggcaggaatcgtaaatatttacaagtacaacttttcatcgtaagaattcatacattacacgttaacagagacacatggtcaaagactaattatagatacacgaacttaaaacatatggccactaatctcctatatatagacgcatctcttgcttttaataattctacctcctgcttaaattgtaagaaaatattatcagaaaaataaaggaagatatcaagttttgaaggagaatataaaagagtcatgactactttgtcaaagattctatgtgtgttgatcattcttcttttatgtttctcctttcgctattcacttcatggtttgtgtgtttctctctcctcacagtatcttcttttgcatctaaaagagcaaaatcataaagcctatatagtctctaacttttattttacttttagttgcatgcataattatacatacacatgcatgcatgacaattattgtcttactagaatcactactcaagtgtagataaataataacctaattgtttgttctatggttttagaagatgggaatcaacagtcaagccgtgacttcgtttcaactgctaaggtatatatatataatacaaatctctgttgaaaatcggtaacttgagaaacaacataattgtaaatagtttcacgtcaaaatttcatgtttttcttatgattttatcaatcacgtatattcaattcctaaactcttaaatgtttactatatctcgagttac

SEQ ID NO: 32551 - DNA, 1137 bp, Arabidopsis thaliana landsberg
  unsure (1)..(1137): unsure at all n locations
atcaagtttaaatttatcaagcataatataatatgtagtcagctttgccgccacagttgatgcatggcctattggagaattgtacgtgatataggtgttggagatggtttatcggtctttatcaatacggaatcttaccaagtcatttctaagtgttgcatctatgtataaaccaattattggagacttaaacaaaaagtagtatatatatacatggtttgcacattgtgctatatatatgtttagatatataacagtctttggtcggaggggggtttggtgaggaagacaatgactattattattataaagagaaaagggaatctttctggtttcaacacaaactaatctcccaaaaaaaataaaaaaaactagcaatattagaagacctaacggttaattagtgactttgataatcttggcctctggttctgtccaagagcagacaagtgaatgcaattgtctggntttttttcttttttttttttgctaagagagtaaatatcattagatgaaaattaggtgttacaaagatgaagacctaagagaaagcgccttgtcaaaaaaagaaaaaaccaaggcgacaataaacagaaactgtaggattgcaaatccgttaatagagccagtgctgcataagacttctaaaattctttaggtgtcttcttgccgttatcgagttaatgatttgacggtctatatccttaaagatggcttgaggcggaatcctgatctgattgtgcatcaagttgttcctctgcctccaaacagtatacactaaagcttgggtaagcaaaagtctaagagttcgcggggaagaaagatttctgactctagtccaagccataagcgaatcccagcttgcaaaagaggaagaagacaaacctagccgttgacaaatcagcgaccaaatcacctttgtgaacgggcagagaaggaagatatgatctcttgtctcagtagaggcagacaaaagccgcaaaggactgaaccttgtaagccccaagcagccagtctcgcaagagtaggtagcctatccaagttgctgactccatgttgaaagcatgtctaggtgttgacctttaaacaaatcaggggagccaatctttaacagtgtccttggcgcaaacctccaag

SEQ ID NO: 32552 - DNA, 1097 bp, Arabidopsis thaliana landsberg
ttccattatcaattacaattgaatgaagatttcggaaatgacaaatccacactcttattgttgtttttgctgttccgatcggcatcaatagccatctcgaagggctttgaatcagacgtgaaagtgtaatcattgcctctgtcgcaagagaaactgagtctatcgtaagagaaattgattctgttgtaagagaaactgattctgaagggatcggtgtgaggatttggtcggagatggcgcgatgatagatcggagatggtgcgatgatattataaatggggaagaagaataacggccgctagaattggaacgattatcaatttgggtttttcaaaaagaaaccccaattcaagatttgatatttgggttccatatatactccttagggtttaaatttttttaattaacaacaatttaaattttctggaaacattaaaaagcaatgaagaagaagatccaccaacaggaagaagaagaggaagaggggagggtaaaatcgtccattttcgttctctaaagttctctttttcaaagaatatagataagtacctaaaatcaaagtttttttgaaaaaaatgtcctcctatattgacaataaccccttaaaaatgtgtttgttgctttcatagataacagctttttatttctgagaagaaaaacttgtgttagaatcttggtcaatcgttatggttcatgtccttacttggccaatgaagaatgccctctcaggccatcttaaattgggctttggctctggatgcgatttcttttcaattaacttttggcccaacataactgtttactactactgttattactaattaagtagtagtagctatgaaacttaatatatatgttaaaataaaattaaaaaaaaagtagtaagcacaaaaacgttcactactgttagatgtataaatttaagatgtatataaacttattgcgagacttataataataatataaagtatttgttttgaatctcacgttatgttaccaatcttgatttattagagaattatgaatatctgtaaagaaactggacaaactgatctctcttttactgacgtttgttgttttggaaaaatctcataatt

SEQ ID NO: 32553 - DNA, 1245 bp, Arabidopsis thaliana landsberg
ggacaacgtttgttgggcggctgtccgccgagataaacacattcttcttgagttttatgttttcttcgtacctcatagagtaagtctgagaggaccaacgagcggaagctcttggagacaagagagagctttgggtagtacgatatcgatacgagccaagctgcttaaaacaatatactgcggttgtgataaaaacgaaaacggaggccgaggaggatgctatgacgtctcgtccggtgttcctatattggactacatagcggcggtttacatgtagctaaatggacggtaagaaaatacacgacttgggttctttaataataaaacctatatataaaatagaaataagggatatatatatatatatatataattctcgaaatagaaaaactatttttttaaagtatatttatatatactaatcatgaatatatatatatatatatatatatatatattttttttttttttcttaacttttctttttggtaactatattaggtatatatttgatttattagatcttgacatgtattaaaaacttctaatcaaattaacataaatattaactaataattacaatgtgtgttgaaaatcaaagaaacgattacgactgaaaatgaaagtggactctactctctcgctctactcagagcaataacaaataaaaatagtaagaacaactatatatgattgagtaagattgtgctagtggcatatttttcattctgttccgagcattatgctaatagatgactaggtttgacttttatagatttgtgttactttacaaggcttgttttgttgatgtttccatctctttcaacaatcgctctaaattttaaacatcatataaattacagaagaaacatatttatacttgtaacggtaacttaatttgactttttattaccttgatcaatttccttttcttcgcaaaacataataaaggagacaatttccttttttttcaatggagcgtttgctgataaatactccaactctcgtttcttcttcttcgttgagaaatcaaaaaccaaaataccatctttgatcttcttcttcttcttcttcttcttcttctttctttttttacctgcaatttccctgcgagactgatcactgatgtgctttccttctctcgtgacaacaatcttcaatcaatcgagttcactttttagttcgtgactccctaatttcacacgatcaaagatctcgccaccgaaacgctttcagccaaggatt

SEQ ID NO: 32554 - DNA, 532 bp, Arabidopsis thaliana landsberg
ttttttttttaagagtgttcaatcaaactatactgactatatctgatccaaaccgaatcaaaataatggatctaaaagccgaaccatatattcgtttacgtaattaaaaaatatatttaaacgatcaaatctgaacaagaactgaacgaaaaacaaaagaataaaccaataagaaacctagttttcttaaaatgatagatttgattgaaactagaatatgaacaaaaacaaaaattcgtaacaaactattcataataaattatattatcttttgtaagctatattaataaaataaaacaatatcaaaacttcaaaatttgaagaaaaacttactgaaatttgccttaattaaacaccttcaccttgtgacctccatgttagttattttaaaatataattggactttttgttttgtacattatcaacgagttctgtgcttgaaatgacttgagactatagtacttaaatatctatctactcagagatattgctttcagcatatatttcaacctaaatattatctcgtaatttt

SEQ ID NO: 32555 - DNA, 1630 bp, Arabidopsis thaliana landsberg
  unsure (1)..(1630): unsure at all n locations
agctcagatttcaacactttgagcaataagtttttgttttgggttcttaaggaggatatggatttggattagatttcgtagataagcatgtcacttgtgaaaaagttgaatgcacaagttgtcttcgttgccattggcaaaagaaagaaacgaaacgacagcgtaacagacgcatgttaacatgcacatcacaaggctagagtataactttcttttcagtaatctaatcctctaaagctgctcaaaacttgcaagaaaccaactgtttgcattggtaagttttgacttttaacaacactgctcttagtttgtcttcattgccatcgcaaagagagaaaggagatgatgttatcatgcacatcacaagactagattttgacctgaccttacacactctatttttgcatctctccagttatttaatcctctaaagctgctcaaaacttacatgaaacaatggaaataaactcactcttctcacaacaatgggaaacacaggctagatccactccttcgggttgatgcaagcatccaatagcttccactcttcggtcccctcttccggtttctgcactcacaaacaccattactacattgccatattcaattgaatttagaccaagtttcttcacaaatgaggaaagaacttacatggtcatattcccatcttgctgaaagcggaagagagacgagaatgctctctattcgtcctcctgtcttcagaccaaatgtcgttccccgatcatatacctttccatccatcattacaaatacattagtgaacaaggttcataacgaaagattggagagatgagagtgagaacagagaaaaagactaatgttttggtcatagtaccaagttgaattcgacatatcgccctcgtcgcaactgttgccatgccttgtgctgctctgtaaattccatgtctttccttttctctactataggtatataagctttcaccactgagtttgcgcattctgtaaacaccaattgctaaattagtctaccaagaaactagaccaattaaaataaatcgtttgttgtagattgaggacaatcagtcccttaccagtggcaaatgacagaagcatttcctgatcatagtcattaagatcatcaaaaaatatccctccaagtcctcgtctctcatcacggtgctgcaagcaaaatcaaagatttctaagaaaagttttcaaagccctcacactaacaataggcttctgaacgtctctctaagcagtttctaccctctcagatttgactataacatccctaaacacaactcaaagaataaggccctcagttccagaaaatgcttcaggatctcacaaaacttaccttgatgtaaaagtagtcatcacaccacttcttgaatcggggatagaaggaagggtcaaatttgtcacaggcttgcttttgaatctacaacaacaaagagcagtttatataaaagcaactccatgatcacaaagctcatatctttagaacaaggaataaggctcagtaccgaatggaaatgcttgacatcttcttcaaagatgtaagcaggagtgaaatcagtgccaccaccaaaccaccattgccttggagctccaagaacatctgcgccgntgaaaattaaaaact

SEQ ID NO: 32556 - DNA, 920 bp, Arabidopsis thaliana landsberg
ttgcatacattaaatagctgaaaccaagaatttacattttcaatgagctcatcggagttaaatatacttgtctgttccaaccaactcaattatgtccaattcattctgtcaaagtaagaagacatatacatatacacccactacacattttatcataagcaaaacaacaaggattgttataactttttgcaaacattttaatcctcgatttcctctttctcctacactacatacaagttacaacttccaaatgcaagataagaaataaaaaataatgtaaaagcccatgactttagctaatggaaattaagtacagctcctacacaagaaaggaaacacaaataatccaacgtttatgacttcagaaagataaacatgatcccatatccccactagataactagcatacggagcaacatttcatagaacaccaagtggtaacttcaaggtttatgtaagtggaactaaaaggactaacccttaatgccaagaaacataccttgtatcaacaactggtagcttacggacaagtagcgtgctttcatttgttcccagggttggttccatctatattccttcgcccgcatgtaagtaccttattcttacatagaatagatacttcacgactacaccaaagagacaccgggcaatgtgcttctatctaggacggtagtgcaaatagagccactcaagcatgcgtaactaaaaacagatcttacaccgcagttaaaatgttaactcttaaaaaaaacacgaactctgcatggacagaattaaacacctaacgtgacctgaataaacatgctttgagaacgaaaaaaagaaaccatctgaccaactacaaacaccaaggaccacaacaatgatgacggctttccttgagccattgtatgcatgcacatcacgggtcagaactatct

SEQ ID NO: 32557 - DNA, 1490 bp, Arabidopsis thaliana landsberg
acaaaaattattttaatgcaaattaagaaaaagtagtagtatatatttaaagtattttcttataaatcatatcaattgttaggaacaagggtacaagagaataaaatttagttttttagtatttcacaaaagaatttctaaatttgaaggacatcaatatatatatatatatataatttaaatgtaaattttcatattacattcaaaattaatatcgaatatataatccacgcattgcgtgggcaactttctagtttggtgatatccgaagtctagattactaaataaactataaactttaggatgttgtagattttatttagttcaagtgttataattgtccgagtaattatcctatagggcacggtgaagagcgtagtaatatatatgaacaacagagctcaaaacgacagatctttgcaaacgggccaaaagatacagaagcccaatgcgattcagtcttcaccaaagcccatctccatacaacggctacctgcaacaagcgacaaacacagaggatcagcagagcaatccgtatcatcagacaatacggaagtgacgacgaggaaccgttacgacgctctcagattgtgtgatgatagatatgccacgtgattgtcaatagacagctaagcaaatcaaggatacattaggttaagaatcagaaacaataaaaccaatgtattgttgtaagcacaaaacaagctgaatgaaataaaatcaaagaaagatttttccatctaagcttcatttctttatggtagcagagccatggacaaatccatggaagtatactcatgtccacctctaaacatttcaaattgcgttactgtaactcttacagatcgtaactacttactgtggaaatcacagtttgaatcttttctctctagacaaggtctctttggttttgtcaccggcagcatctcagttccagcaagcaccattccggttcctcacattgaaggtcacacagattcagtcccaaatccagactacgacgcttggaaccgttcagatcaagttgtcaaggcgtggcttctgggttcgctttctgaagatattctcaatgtagttgttggatctaaaacatctcaagaggtatggctaaatcttgctggtcaattcaatcgtatctcagcatctcgtgtttttgagcttcagcgccgtctccatggtttgtcaaaagaaggaaaaaccattgatgaatatctgcgttgcctcaagaccatttgtgaccagcttgcttcagttgggagtcttgttacagagaagatgaaaattttcgcaatggttcatggtctaactcgtgaatatgaaccgctcatcacttcgcttgagaataccttggatacctttcctggaccaacatatgctgaaatcatgcattgtctcaaagtttttgatgataggatgcaaagctacaacacaaaggaagtttctccgcatcttgcttttggtacattcaacaatcgaggtcgaggcagagg

SEQ ID NO: 32558 - DNA, 1565 bp, Arabidopsis thaliana landsberg
gtatattaagttgggggttttgaaaaatatatttaaaagataaaatatataaatattttaatttttaaaaacttagttattaatgaattcataatattcgatacatagatgacatacaaaaaattaaaatatacatgaaaacataaaatttaactattgatttgtgctaaaaaaatttcatatatgttcaaccaaataatgtttcaattattgatgtgcttgtcgattacgaattcgagttcgagtttccaatatattctcgagatttgaatgcatatatgtagaataggcgaaattcacttgtgcacttctagttgattctggttgtaaaaattcagagacatcaaagtaagtgtaaccatctcattcgttttttactatcaaagtattatacatagtataagaattaacggcaaaaaaaaaaattcggatttaatattattcttccaaccaaccaaatcatgttacattaccaccacattttacttaagaggaccttttagcttagagagcctttaaattgcttaattaacatttaaattttaattatttacaatctaagaatctcctaatatctccctaatatccccctttaataatgttcttagagaattatattctacaatgtaaagggtatgagaaaatggttttgaattttcttaacattttaacaatcataaatctttgtctcaatgaaattgcatttatatttaactattattttattatgccatttaaatatatacatcttcttaaaagcttttccggttaatgatgagaaaattcaaaataataatatacattttactcggataaaacaatgatttaacaacaaattatctatcgtttggttaaaaatacatctccccaaaaaatttgatctcctcctcctccttcattcttcttacatcaatcttgtatcggtttctggtttcgcctgaagaacattcttccacaatcccattggcctaataatgcatttctccgatctcagtttctccctccattcatcgctttagaggtaatcacatatatcaaatcttcttcgtttcaattcctctttacagattaacctcgttttctctcacagaagaatctttttttttcctttcatttcaagaaaagattacattttgattcggaatcgaagatgttcaacaaaatcataaaactgggtcagaagaaattcaacaaatcagatcaacatcaccaagataacaacaacaacaacaacaacaatacctccaccaacaccgtcgttcgcggcagccgtaccaccacacccgctccatcctctgtttcaactggagaatctcagacaacagctcaatctcctttacagacaccaaaccacccaatgttcacaagaacaccgatcctcgaagtacttccattgttaaaagacgtgtcttcctcagatcgacctcttctctttatgaagaaagctcacatgtgttcttgccactgcgatttctctgatactttgataatgccccgcgagaaagagatcccaagacagaccctccctgaattggttgatttccttcactcttttttctggtaaa

SEQ ID NO: 32559 - DNA, 2309 bp, Arabidopsis thaliana landsberg
  unsure (1)..(2309): unsure at all n locations
aaacaacaagtagagacctagacaacacgactcttcaaacacattgcaatagattgtggctgcaaagtaacatctaaatatcaaagaccaaagaccaacacaacacgagactaaaacgagaaacaattcagacattttctcaatctaatcaatctcacaaagctcattacccaactaaaccctaagatcaaaacacaacttaaactacttgttctcgcaaacaacaaaataagaccaacacaacaagactctttaaacaacaaaatagattgtggctgcaaagtaacaactataatatcaaagactttcagacttttagaccaacacaacacgaaacacaacaaataaacaattcagacattttctcaatctaatcaatctcacaaagctcattactcaactaaaccgacattgaacacaacatgggatcataaacaagagaagaagaagatcataccatgtcgtattcggtcgaggaatgggagagaggacggtgacgaacttatccctctccggcaacataagcagatcatttagggattgaagtgtgtcctcctggagatccggcgacagaggtggatattcttcgaagttgttgccttgagaggatgggtgactgtgagcccgagactcttgaactggagaaggcggagggtcttgctgagaaggcggagggtcttgttgaggagtctaaggaacctacagagtagtcgcggcttgagtcgctggattgttctgcacttctaaggaggcagtcctttgcacttcaggttgtcgactgccagagtgctggaacaactctagaggcggcagatagttttgaacatgagctgccgttgactgtaaaggaggaatggcggcttctgatgcatgcttctatagctgaggagaccgttctgctgccggcgtgaaatcgtactgagatagaagagaacgaggtcgtcgaccagccgtggatgtggaggctctctgagcaaggttaggactggttcgcttcttttttcctcgcccaaacatgatattaaggagagatctagatgagacagaggttcaaatcgacgaaatcgaagaagaagaagagatttaagagaaaaacgaagaggaaagattgatttggtagggtttcaaagaggaaatcgaagagagagattgaagaagaagaagactgcagatgtttggtagagagattaagaggaaaatcgaagaggaagagagaaatttgctagggtttcgcagaggaaatcgaagaggaagagagaaatcgaagaagaaggctgcggatgtttcgaagagaaagagatggaacttagggttttgacattgaaagggattgggcnnnnnnnnnnnnnnnnnnnaaagttttcgaaatttaaacattagtcgctatattgtcacatattagtcaccaattttgggcctcgaaatttttggcccaataatttttctgtagtcgctaaattgtcacaaattagtcgccatatttggacctcgagttattttggcccaattgaatggttatagtcgctaaattgtcaaaaattagtcgccctatttgggcctcgagttattttggcccaatacaatggttagtcgctaaattgtcacaaattagtcgctttatttaatttttaataattgggtttgggccttgtgtttttttgggccatagatattcaaaaatagtaattatctataataaaaatataaataaacataacatacttaatcaaatatagtttttcaaaataatttaaaaatgtttgcatagcatttcaaaataacttaagtacatatcataattactagaaataactgaagtacatatcataaacacaaaactaatattgttcttcgttttgttgttcttcatcatcagaaggcgataaattacaccaaaattcatcttctggatcggcatctcagacatcgtagtcaatatttattgggctgcaatcttatgtcaaattgtcgagtacaagatcttctattgtagtcattaaaacatcatcatcattttcggtttgcaatagagtctcgtctttgtttgcatattctcctaatatgtttctccttggatttacttttaaaacgttgaccactcccgctttggtttcttcgtgtatggatatcaaacagacttgttctacttgagatgctgtttgtaaatgcaccatgtttggataattacatatttgtatatgatcaagaaaagctaaataaccatatatatatagcgtacgtacctaaaataaatggctcgtatttgttgtattctcctctatgaaagaacgtcgacaacaccactaaag

SEQ ID NO: 32560 - DNA, 4786 bp, Arabidopsis thaliana landsberg
gccaacgattaatagtggaaagagttgttaaaagcatagacttggcttaggtcttcatttagaactatactaattgtcgcattcgcaattatcttggaggaaatgtactcgcatgttgtgaaacgtcttttttttttttggggggggggggggggggtgataaaacacttattcaaacactaaacaattcaactagtctaaaagttgggaattttggtcaaaataaataaataaatacatacatagtagattgctataaatttggttaaaagtacatgtagtaactaaatgattttgacatggccgacacaaaaaaaaaacaatgataatgacaggtggtagcgaagatgaatggtcaagcgaagaagctctgggctaaaaatgaacgatacacagtccattacagggcctaatttcgtatagcgaaggaaggcccaaatgtaaaagagggcccaaaatcagaggggaagaagaaaatgtcgatgagcagcgtagtcaacgaaggtgtagagaggaacaagtgtgtctcctcctccatacttgttgtcaaacacttgaagctccttcttcgccttatccttgagctcttccgccatttccatcattcccttctctgctccaccatcatagctcttcttcttgtcctcggtgatgtcatcgaccacctgatacagcatcccgacggctctcccgtaccttcggagactctggagctcatcctcagtggcaccgcccaataggccaccgcacacggcagagcattcacccatggctccgaatttcttctcctgaacaaaggaaagaggaaagggacctccttcaaggtcgacgtactggcctgcagccataccagtggagccgacagtgcgggcaatctcagtgatgagtctgaggatggtggctcggggaacaaggtcaggaggcgtgtgggagacaatgtgctggaaggcgagtgggaagagggcgtcaccggcgagaatggccatgccagagccgtagacagtgtggttagatggctttcctctgcgcacaggatcgtcgtccatacaggggaagtcgtcgtgtatcaacgaaaccgcgtgcacctgattcattccattattagatacaacacacacatctctcaacaacaacaacaaagactttctatctcttcctcttactcactcatatcaaacactaacggcgaaattgagattacaaggcgagagagagtggaatctatctcaccatttctagggcacaggcggtggggaaagcggcgaggcgatcgccaccgaagagctcgcaggccgccacacacatcacaggaggggcacgcttggcgccttgtgcgagtacagagtatctcatagcctcgtagatccccgcagggtgcttgaccggtatggcctcatccagcttctggttgatctcggtgatcagagtcgtccaatacgtcctcagatcgaagttcaacgaccccggggcagatgaggatgaagatcggattgcagcgggagagagtttcataggaagagtgtggggtttctccggaagagagcagaagctgcttaatgggatcgctgaaccactaaacaacatcgcctatgaggatgatctatccttgttgtgtttgagataatgataatttagtaaaattgggttcagccaaactctcttgataggaagtgccaatatatgattgatttctaagacagacacgtcgctttcaaaatgtcagtcaagttttttaattgaactttgtcagaaattggaaaaatccaaaatcttacaagaacagaagaagaacatcgatttttaattacacagcttttcatctgtaagagaacctcaaaacagagaaagaaacacacagactttctttcctctcattctctcgttcaccttcttccacagagagcggctgatttcagcttctccagttccaagaggagggtggagttcccttcgcaaccctctttcaacacctccattcttttctctgtctccgctgctatcacttcttcttccatggcgttcgcagaccctttcttataccgcaggagatctaacatcatcccctgaaacattatttccacgtttcattatcatcctcagtccccagaatgacattgaacaagagatgagggatttcaagttacctcacgatgccgctttcttgataaatccctgacaagagtcttgacaatcttattccgcagggatactttatccttggcttggttgcaaaagactaaagatgaaaagtgatgcacaaccagcgtataggctactgatccacgcgtcgcagctctgtccaatgccccacaagtccatgacttcaggtaggcctcaaggacggcctcattttcctgcaatatcaattcaccattttatcttagttggatgctcaagatgccattattcaccactatcaacattttattatttttgtaaattacctcaacaggttcgaggtaaccatccgcttctcccaagcacttgtctagactcggcagaagctcgagaacacgggcattggagagcactgtccatgccgaaagccgaacagagtgttccacgcattgatgcaggtaaaccgagacctgccggccatacactacatcaccatatgacaccgcagcatactgctccaccaccatctccagaaaagtagagtagttctcatgaatgtctgacttgaacctcagaagctcagtgtcacggtgatttagtctcgcttcatcaagaaactgcccataaagctcctgcagataattgtacaagttcctagtgttcttgtcttcgatgatgtccattccaacaagcaatacggtagacaaagcgtgaaacttccaaaccaacggtacactcacaacaggagagggaagcgatccaaaaccagacgatgactcaagtcctgcaagaaagaaaactccagcttttgcaacttcaagcaactctgtggattctggtggccctgttgaggttttaccactgtggactgctgagatggcgctgagaaaccagtgtggaggtaggggcattctctggtgagcccactctatggtcgaggagtctgattttttatcctgagttgaactatttgacatttcaccgtcctcatgaatagtctccagaccaactgtgcccttccttaccccactgaccccttcctcggctatcgatcttcccttttgctgtaaccatctatgtctgaagtgagaagcaagcatactgctcatacgatgatagtccccttcgctgcattcccattcaaacgatatgttttttttgtttgacttgatacagcaggccaggtgttctaaagcatgcggtctaaggacatattcaaaggctctttccacgagtaaataatcccttggacctgcaatcaaacacatagctaaagcggagtttactttatccataaagccaacagatccctgatcattctgcgagtcgctcagagagatgttaagaaagagactcagaagaccggcaccagcctgtgccaacagaactctggttgaccaaaacccaccaccgctagctccccaaccaagtccaacgccgggggccaatccgcctcgtttatgtagctcaattgattgcacgatgggccattctgatgaaacagaatctctaaaagagcacgacacagatgttagctcagccagagactctgccagtatcccatttgcaagcacagattcatctccagtggaaatacttacctgatgcggagctttcatcttggatctagcagattctatcagattttggatggacacgatagtccgtgttaacccatgaagacaattcacagaagctaatgctagttcgtcatcttgagatcgttctcttagaaaacacaaatactccataaaagaggaacacctggaagagtcttttccaaacctacttacgtctgcaacagaaaaactaagaagcttgtgcttgataatggcaaggccaatctttggaacaaactccggtagccatggtagaggttcttcctctccctccgcagagattttctcaaggactttggaaattgtacgcatgacacctgaatacaaccacaacagagaagtagttgatacagagacactttcgattcctttctcccacttgagtaattgcggggccaatgttatccaactcagtgctgaatcaatcatagggctaacatagctccagtcccatgtcccagattcattccgtggaatgttttgtgagtacatattaggaagtgtctcggcaaaagcctcaaggaccaggtaggcctcgtttgacacagaagtaaactcgctgatgagatttttctccctgagcttttcgaatgatggacaactcaaccacagacacagagctgggaatagctctgggaagcgagatacgcaacagccactatggatacagaccttccaaaaccggagctgttcaaccatcaaggtagatgaaagcttgcagttctgcttccctagcttcacccatgagtcaagagatgaggtgaactgaaacaaatgccatgtgaccgcattgaaagtcccattcttcacaaattccatgcaagtactttgatcataccgggccaacaccttagtgaaattaaaaagagagaaagaagaacgaaggttacaatagctctgagaattgatagcttaacaaactcgaatcatcaggtttctgtaaaaaaaacatcaaagacgaatgaatattacgaccccaagataattttgtatgagcggaccagtattaccttaagaggcggacagagttgatctgagaggaaagaacg

SEQ ID NO: 32561 - DNA, 2638 bp, Arabidopsis thaliana landsberg
  unsure (1)..(2638): unsure at all n locations
gaacaaatacgaatatcaaaatctaatatttatagacagaaattgagaaagatggaagacagttactcgtactacaacaacagaagggacataatagatttatgtagacattatttacatgcaactctcacgaataagtaaaatagacaatacgcgagcgagcgagcgaccgagacaaaaggtttgggaatgataacacttaagaagtagagtttgatctggtgaaggaggatgatgagttgatgaactgtatgcagtcttctatggcctctgatcgatgactgtcattgtttattgggatgattggtggctgagacctcccagaaaaagaagaaaccttcgacggtggagatcttttcttcttcctcatcaccaccagacgcaaaccttttgcaaatttgcatccaagatgcttgatcaattttgctgctgtgacttctgttttcctcggtaaccttaatccgcagcttgttgtgcatcccggactcttaccataaggtcccttgatagctgtttgcttagccgaagcatctctctgaaccggtctagtgttgaggtnnnnnnnnnnnnnnnnnnnnnnnnnnnnnnnnnnnnnaagattgagagagtgagagaagtttatgggaaacaatatgaggataatgagagatatttaacggactggtgctgagaacagttgtgctgatagttcaggcaaatacgggaaaagacatgaaatgattaatgatgtatattatctataacatcattacgcttaggccatgattaagcactcaagacataaacaaataaacaactaacaaaaaagtgtaacttcaatcttattttagaccctatatataaaaagacttgtagttaaagtggatgtacaaatttataaagagaactatgcccaagagcaaaaagagaagactaggtttagttttttctatttttctttacggtccacagagggaataaaccctttgtttaagtgaagaaaaaggttaagcaaccatttggtatcattcttctttgatgatcactcatgtgtgcacataagttacataacaatctaaaaaagtttctttttgactccaggagaggccaatataatcttacctttatggatgcagattcctttcatgagtctgccgctacaataaaaaggagggatcaaggaaagacaaaaaaacaagtaatggtgggtacaagaatatgagaaagcatataataaaccagggagtgtcaggacataaatagaagatcacacaatctggagaatagagtgattttacatgtgaaaacattccattgagaacagaacaataatacctgcatgattgtcagtgattagatgcaaatagcatgagattgactgatatgtatagcaggttaccaaaatgccaaaagggaaaagaatgcaatagcaaaactgctctgtctcatcgttataacaagagcacaatagacttagcaccaaccgtgtacataccattttacccaaaacgatcagagagaacatcttttctgcactgtgatgagcatgattcaagacacattaatccaaacgctcaatgaatatggagatcactggttccaaacgaaaatcacacattggtatcatcaaacatgaaataagaaccaaagtctttaaccagcctgcaaaaatattcggcagaatcgcaggatataggactgttcatgtctgagacagagcatactaccatacctaatcagagcatggttcaaacaataaatcaacagtaaagtgattcacattagaacattaaccctaagaacccaatagcttgattcaagaaactgaatgaaggaaagaaatgagagatgttttagaaacatgtacaaaggtacagaaggggtaacaccgaatatcagctagaaagaagcaacaaatcaattcacaaacgagacatacatatagacataacatatacttcaccaaattcatattttgtcatcagccatttcctggtgttctaacaccaacaaatctgatgataagtaaagccttagaaacgccgcacacttgtgaaattcagcaactttttgccatcctcaacattcacggcgataatcacggccatagctgtagtttggcctagctccgaaatcactctcagacctctctgcagcagctctctcttcctctaagctcaatccacccatcgtcttctgcaactgcctgtgatcataaggagagtaatcgactggtgccgatggaccattaggcactccgtagctagacaatcgcgagcccataggtggagcttgtggcttgtactcgttaaccagaaaggcatcaacgggtgctgagggcccactaggcggtggaccgtagttagaaaaccgaggaggagctaaaggaggctgcttgtgatcaatcgatgagaaggcatcaacgggagcagatgggccacttgggaggccgtaattggaggcacgatcgtacattgaacgtggtggaggaggcggataataatacccggaatagtagtgatcagtgaatgcgtaaggagacggagacggtgactgtgagaattctctgtagtcacgctgaggagatggagcggtgatcggtgcttgaggaggaggaggaggagggctaggggagtaataatggtttccttgaggggca

SEQ ID NO: 32562 - DNA, 984 bp, Arabidopsis thaliana landsberg
  unsure (1)..(984): unsure at all n locations
ctctgtatttataatcaatctagcaataagtcaataacttactgaaatgacgacactttttctgaaattgtttacttgtgtcttacagaaaaagttgtaatcaactaaagcaatataagtcaataacttactaaaactgagtcttgccacttttctgagattctttacttgattttaagaatttttccccgagcttagtaactagtactgctgttggttgtttctttttctgtctcaacataactttttcaaagcgttgaatttttttgacctctttaaaatccaacaagatgtcttgaaaccagaagtaagtatcttgtgaattccattccgattttgagagccaaagagattgagaaacaagccttgaacccttgtatcttcaacaatgggaaactgtctaaagcctctcaaagaacaacctccttcagcttctcccaagcctctcaccatcccttcaagttcaggtacatctccgttttcaaatgcactttctacttttgtttacatatataataatatcttaatacgtcttataaatgtaaaaagtggagccagtaaaggagaatttgaaagagtttagatttgccgaattgaacaaggcaacaaagagattcagaaaatacatggtcataaaaggtaatgataatgggtttactcgaacattctatgaaggctgcatcaatgagacaacctttgctccatcaagatctggaatcactgtttctgtcatggaatgttatcaagataattcgcagactctacaagactggaaggtaaccaaaatcttacgcaactactatttatatctctttgatcttatttatgtatgttttggttagntacttatgcatctgatgggtacaaaaactattgagttgcaggaagaagtgaagtctcttggacgtatttctcatcccaatttagtcaaacttttaggctattgttgtgaagaaaacacatcattcttagttttcgaatact

SEQ ID NO: 32563 - DNA, 574 bp, Arabidopsis thaliana landsberg
cgctttcatgggctcttcttcgattactgtgtacatcactcaaattttgggtttttgttcctgtttccctctcgatataatcgtaaagtcttgaaattgcgagaaaccctaatttgggggttccttgctgatttgttaatttgtgtgttatcacattttcgtttaaatttgtgaacttgtaaaagtaagagtggagcaagttatcaatggaaatcgatgaagaagagccaatggtgttcttggaccgtacaacaagagcaacacggggtaaacggtaagaattacttgagcttaagcttttacctgatgaatgtgttccacctgaagattgaggttttgtctcactgttattgagaagtatcagaaactctcttgtggaagctctattcatcagttttctgttttttttcaggatgaccaagttgcttgatgaccaagtagaagaagatgaacagttttggaatcaagaagctcttaaagaggtttgctttgttttatatatagcttactctcttaaagagatgttaatgatttgttaaggtagactagaaggcaaaatatataatgggaaaaa

SEQ ID NO: 32564 - DNA, 1978 bp, Arabidopsis thaliana landsberg
cagaggcatcttagtttggaaggttctacaaattctttttcttctctcttttttacccaggaaaatgttgaataaggtttactcaaaaatgatgctttagaattgaaatgttatcactgatttgtgcagcttgataacagaggaactgcacggcgtgggctgaaatttgaatcttggatgaagcataactgtggatatgttgatgcagaagatcaagtaactggggccaaatggctaatcgagcaaggtctggctaaaccagaccacattggagtgtatggttggagttacggtgggtacctttcagctacactcttgacccgataccctgagatctttaactgcgctgtctcgggtgctcctgttacatcttgggatggctatgactcgttctacaccgagaagtacatgggtcttcccacggaggaggagcgctacctaaagagctcggtaatgcaccatgtcgggaacttgaccgataagcagaagctgatgttagtacacggaatgatcgatgagaatgtgcatttcagacacacggctaggcttgtgaacgcgcttgttgaagcgggaaagcggtacgagttgttgatatttcccgatgaacggcatatgcctcggaagaagaaagaccggatatatatggaacagaggatttgggagtttatagagaagaacttatgaagatactttcacagaacctgttgttgcttttgctttttgtcacattctttttcatttctttacatggtatataaattatatatcatgcctattgaattggttaacactttttattttacaatcatacatggttcttctcggttaaggtttctattcaattatcattatgaggcttcatgagtctgcctatttcgtgttagaatttttcggttatgttcggttatcaggatgcaaaccaaagcaacccaaaattaaaccgatttagcggttttatatatcggttcgtatcactgatcccaccaaaacgccggtgattgacggatttcgatttttccaacgacgccacgttggtcatcgccatttgtctaacattgactttaatggtgaaaatctgcattttatgctaaatattccattgaccaaaaaaatgctaactattccatttacaccaattgtaaacaaagaaatttgacaaatgtattaatttgaaaacgatcaatttcaatttttatagaattcactagcaaaaagtgttgttgtttgaatttggtaatttctagattcgtctgataaaagatttgcgtccgttacggaaacggtatctgccctaccttgtggagaagttcacggcgttaaagatctcaattaaacttccgtcaaaagtcagcgaggtcaaactctataaatacatccccacaaatttcgccgctgttcaaagaagacttaccactgtttctctctctctctctctctctctctccctttttttctttcttctggggaacgctaaaattttctctgaaaaaaaattgaagagaggggttttcgaattctcggaaacttggcgagtaagttttatcgaataacaccagttccgatttgattcttcgcttcacggatttttattccgaggtattaccatttttaaattttattttctaggctcgctttcgatttctctgaagaatcgattaattacttcttttcgattgtcgatttctcgtcggtgtttctttcgattatggatgatgatttgtatcggtttggaggatcgggaaatgtgtgtagaaattcgaaatcgatttttgattttggagattttctgtagcgattctctggagatatactcgtttgatgatccgagacttatctttagtgattaaggattgaattattggttttacttcttctttgaatttgtaaaagtgtgagaattagtgtttaaatcttaatttttcataaacctaaattaagattagttatcagataaagtcttaaaaacttccgccagcct

SEQ ID NO: 32565 - DNA, 1235 bp, Arabidopsis thaliana landsberg
tcttattagaattttgctgtttcgtttcctaacatctggaactctctctttgttgatatgtttgctacaaacaaaactgactctgtaaattatataactgaaatatgaaggcaaagaaaccaattctgcatatgcatttatgtcactcctgcctcaaacaatagagagatttgtttttacagaaacagagtaataaataatgaacacagatacaataatctcagtggaaccaaaagaaaactattttacaaaaacctcattcatgtcaagaagctttctctgtaatgttatttacattccctgaattccaccaatacgtcctttgatttccaatcttattaccattattatcattaccgacatctcttctctctgactgaacttcttgttgctcggttgatccagggttctctgtcaaacattgttcccaaaagtcatcgttaacgcctgtttttggagcaggcgcagtaacggtaacgggcggctctgagttcatatcaatcttcgatgatttgggtcgtgtatcgccaatacttagacttgactcagctgcatcatgatccatgcttgatgactgcaaaccgctcttctcgcatgattccgatacaagattctcccaaaacgttagcgaagattctaacttttcgacctgttctatgtgtgaactgcttggaggaagagagttctcttgaaatcttctttttcttctctcatggttttcgaggtttagtgaaagtcctggttttcccaaaacctgtgaaacatatgccactattgatttctgatgttgttccatatgttgtaaccgatctttcaatgtcgttacttgcagctcaaactctttccgttcttgctcttggttctgtaactccgcaagaaggccttctttctcatttttcagtctttctatctgatcctccatgctccgtctttctgattccgtcaaaggattttgcgcttgtagattcactaacgagtggctatgaaccggttttcgtctatgaatgttcttcataaggtaaggtcgacctctaacaaaatcatcattcaagaattcccatttctcaggatctacttttcgaaaaccctacgcaaacaaaaacacaaaaaggttgttaatcttagcgatgcagcaaacaccaatccccaaagagatgagatacaaagacaaaagctttacatatgtattaagctgacggatgaaacttgagagattcttatgcttaagaatctcg

SEQ ID NO: 32566 - DNA, 994 bp, Arabidopsis thaliana landsberg
catggtcttgggagatgacttactatttctattaatgtcgatatatcttttgaaaaaacatgaatggtttaaagtctaccagaaatgtttgttgaccactttctttatcaagctggtattagattttaacccgcagtatatcgcgggacgatttatttgtaaaagtaatatatattaaaacttgcaaattttatttttataaattatttagtaatatttataaaatatttataatttacagtttatgattgttattaagtaacgctataccacgactccatgagacaattgttaaaaaattaaagttttaacccctattaaaacagtgtattaataatattttaaaattttacaaaaattgattcaaatacatccaccatataacccaatttcaaaataaaacccgttctgttatttctttacccgtcccgtgatttttttttaaagtagtaatttttaaaatttaagaattatttattatatataaaagttttgcaaaatatattattctctaatacatttatattttatagtttaattttagatatagtaacattatatataccacataacatttttggttttatataatcttttctaaattaggatgattcgtattgaaagggtggattaattgtattttactttttaattaatgttgattcaaaaactcgtccctctaaatccgtcttgccaaaaagccattttttttagaaaaattctttctaatgccattttcatgatgccctttttcaactttacctttttctttagccattttcatttctaccctctttaaatttttaatgaccattttacccctatttaaaaattgttttaagttaacaaaatgaaatattaatatttttcgcctaaatattaacaaaataaattattaatatttcccgccaaaaatttttttttcatttttttcatatttcccgccaggcgggaatttttttcgaaatttctttccccggaaaattttggcagg

SEQ ID NO: 32567 - DNA, 2797 bp, Arabidopsis thaliana landsberg
ttttaatcgttgatctcggttggtttagtgaaaagttcagcataggcttttatctcttgattttgggcttagttgttaaaggcccatgagttcagattctctatttcaaaccgttcgaaacagagtagacctaaacagagtaacgaaccactctagtgaaggtagcttgttttgctagcaacgaaagctatttttattggtcattgcaatacgttttcataatactaataaagcaattagtggtctagtagcatttttttattggatggtagatgcaaaaagttttctataagaaacccgactagattagccaaattacatgcaacatctttaaaaatgatttcgagaagctgcctaaaaaaagaaaaaaggatttgaaacataacccattttaaaaccaaaacataaaagttgaattggcctatcaataagttgtcaaaatggtaagttttggataggctcatcactcataaatcaattttgtttactctctttattcttagtcaacaacgcgaatttccggatctgattagtattatttccacaaaataaatgaatgtatgatttgtcaatttgaaaataatacatgacatgtgatgtattgtttggattccaagttctcaccattttgaggattattgctttactacaaaacaagtccctagtcacattggtcatttcttcgttagtttaaaattatatataactcaacttgatgattcacataaatcgaagatcaagacttttctagtttaaaaaaaagtggaatcacgttcaaaggtcgttgatagtcacaacttaacaatgacgcattaaaatattcaaaagtctatttaattgatctatgattgacacatagaaatgaagctatataaaagttgtactctctttttgaaccatctcacaaccgaccaaactcaagtcaacatgtatcaaaaatttcagatctccggcaaagtttttaagactttggggctaaagatgaaagttctgatagcagtctcctttggttccttactatttatactatcatactcaaacaactttaacaacaaacttcttgatgctacaaccaaaggtaagaaaattatccatatcttgtgttttattgttaagtcaatgaatcctcattttggttttatgttttcattttgttgtagtagacataaaggaatccgaaacaccgggggatagactaataggagggcttttaaccgcgaatttcgatgaaggttcttgcttgagtaggtatcataaaactttcttgtaccgcaagccttcaccatacaagccgtctgaatatcttgtctcgaagcttagaagctatgagatgcgtcacaaacgttgcggtccagggacaaaagcttacaaggaagcaacaaagcatcttagtcatgatgagaattataatgcaagcaaatcagatggtgaatgccgatacgttgtgtggctcgctgattacgggcttggaaaccgactactcactcttgcttctgtgttcctctacgctctcttgactgatagaatcattcttgttgacaaccgcaaggatattggtgatctcttatgcgagccatttccaggtacttcatggttgcttcctctcgactttccattgatgaaatatgctgatggataccacaagggatactctcgttgttacggaacaatgttggaaaatcattccatcaactcgacttcattcccgccgcatctatatatgcataaccttcatgattcaagggatagtgataagatgttcttctgccaaaaggatcaaagtttgattgacaaagtcccttggttgatatttagagccaatgtttactttgttccatctttatggtttaatccaactttccaaaccgaactaacgaagctgtttccgcagaaagaaaccgtgtttcaccacttgggtcggtatctttttcaccctaaaaatcaagtttgggatatcgtcactaagtactaccatgatcacttatccaaagcagatgagagactcgggattcaaattcgggtttttcgcgatcaaggtggatactaccaacacgtcatggaccaggtcatatcctgcacacaaagagagaaacttttgcctgaattggctacacaagaagaatcaaaagtcaacatatcgaacattccaaaaagtaaagctgttcttgtcacttctttgtctcctgagtactctaagaaactagagaacatgttttcagagcgagcaaatatgacgggagagattattaaagtatatcagccaagtggagaaaggtatcaacaaacagacaagaaggttcacgaccaaaaggcgcttgctgagatgtatcttttgagcttaaccgataacattgttgcaagctcaaggtcaacatttggatatgttgcttatagtcttggaggattaaagccatggttactttatctgccaaatgataacaaagctcctgatccgccgtgtgttcgatccacgtcgatggagccttgtttccttactcctccgactcatggatgtgaacctgacgcctggggaactgaatcggggaaagttgttccttttgttaggtattgtgaggatatatgggggcttaagctttttgatgagttatagatattgtttatcacatttgatttgatttgattgttgaattattgaaacataggataaatgttatatatcttccttttgcattggattctatttaatcattagtaaacctatgtcactgcatagaaagatttagttgtctaaaacgtatacgaggttttgtttggttataatattttataaatatca

SEQ ID NO: 32568 - DNA, 190 bp, Arabidopsis thaliana landsberg
cagaggtgactaatgagtgaactgatgcacaatactagccttaagccgactgtcgggtatgcagacacgatacctgccgtgccacgtgcgttaatgcatcggtcccgactcggagtgaggtggtgcgccatgtgaggtctgttattgtgactgaaaacttgaccctcatctctaggtcgatagcctgtgt

SEQ ID NO: 32569 - DNA, 623 bp, Arabidopsis thaliana landsberg
aaaacaaaggtgccatttcttccaaaaaaaattctaaacataacatcaaagtactttcaccaatctggaggtattcgtcaaccgcatcagccgctaaaccatacgacatcatacaaattgctgttgtagcattctgtagtgatgagaaatcgagttttccgttagcatctcttctttgttcgaagtatggaattttatttgagagtcgatcaacaatatgcatgaacaacgggttattcattctaaaacagcgtcaaaatatatgcagaagaaatgtcaaatctcttttgaagtaatcgttccataactagatgtgtccttgttcacggtctctttcaatatatgctcttttttggtggctagccttggcgacgatcaccataattctctaaagcttgatcgatatattgatgacattgtcatccatcattttgtcgagattataatgcgaagaaccaaccattttggatgaagaccaattttggatgaagtagaatttcttttctttttacttaaagaagattgttttttggattggaacaaagaagagtgaagttgagtggagaaataagagtggtttcgtatgattttatagagaaaattatatagttttcaatataagt

SEQ ID NO: 32570 - DNA, 1117 bp, Arabidopsis thaliana landsberg
gagaagcactgaaccatcccttcttcacaagaagccgggaacagagtatacccacccttcaacccaaaccctcatccatttttatacaaccaaaagaactaaaaaagaaaagaaaaaagaaacagcagataatgtttggatacatctgcagtttctgtgtatccttcagtttcctgtgtttttgtagcattttattatatatatgattatcatgtatagaaatgaaagaaagagagaaaggtttgtgcctaattttttcttatctgttgttttggttttttgtgttcactttccgaccacaaccactgttgctccctccatggctattgtaagagttattaaaagttactttacaccacaaagtgaaatgttaaaccatttattgggttttttggataggtcaaaacgcagcgtgaggtgaggcccatcaatgaccaaaacgctgtcgtcgtatctgcagcgaggagagaatattcggaatcgaaaggcttcatcttcttcttcttcacctatctttttaatacaagctcaggggtttaacttttgaggggtttttttatcccatttccgcaatcatggaagtctttgggaaagctaacaggtacatcaccagccatttcacctttccttcactaacacctcttcttcaacattccccaaaaacctcttcaaatcctcaattcaaccaatttcatctctcaaatccgcttcaattaaagcttcgtcctccaaatttcaaaactctatcacccctctcccaaagtccacacctttccgtctcttcaaatccacatgcatcactctaacaaccgccgcggctctgcttttggcgaatctccatctcaaatcgccggcgattgcagctcccatcgcgcctccgccgtcagttgaaagcaaagaaaacgttaccttggaagaagaagagagagcgcttgatgagcatttgattactcacccttctgatgtcgacgctcttcgttcattgatggaggtaaagatcaaatctcgaaagcttacagaagcagtagaagtgatcgatcgtttgataaaattggaacctgaagaaaaagaatggccagttttgaaagctaacatctttacctacagtggagatcta

SEQ ID NO: 32571 - DNA, 9337 bp, Arabidopsis thaliana landsberg
attggaaccactgtctctaaggtgattttgctaaagagttttttgttgttgtgaattgtgataggtctttggaccacttgtctcggagaaattgaagttcacagctgaagaaattgagatgggtcttatcgagtccaacactacaaatgctcagcttcacattgcacttttgaaggtttttgatttttgttctgttattgaccttgcagctgttaatggtatctaacaagctcaagtttatgtgtttgttgccttataagaaaccttctggatgtgaatttttcaacaggggataccaccggtgaataaaacgcttgacgatgcaaatgcatggatcacggtgttgtgtaagaaactagctccatggtggccatgggtaaggccacactgaactcttttgttagcttatatcttctctgtggttttctttattgactcctgtaatgtcattgttgcagattgctaagggtgaaattcatattactgttaacaaagggtaagtggtgaaataatgtgaatttattcaggttgagttggtattgataacaactttcttctcttctgatgtatgaatagggaggaaatatctgaataccaaggacttgactctattaaccgcctgaagattttgaaggcactttgtgagcttcgagttcaagtaattttcttctcttcatttaagttgttgaagtgtatttttaatgcatgcctctttggttacacatatggaaagaaaaaactatatcattactagttgcatttgttactcatcgtcttgtttccattggtggatggtgtagcaagatgatgcacgttcgtatattcaagaaaataccaaggaaggagactgggattctagtttacgcaagaggaagctaggaggagatggaaagaagacttcttattggtagttacacttacttgtcctatcacttctttctatgttactacatctggtgtgaatgtgatcaacttttatctttttttttttaatttcgttctaggtttgatggtaatgatatccaaggttacagattatatagggaagtcaatggaatctcaaagaagaatgctggctcagatttatcttgtttgagctgggaaactgaagcaaccaatctagatgaatttcagagtgtcgctgtaagattttgattgttgtttatgcttctcctctttaagatgtgtggaactatttttcattcattaagtatgtcctgtaatggcagagagagttatcatcaagcaaagcttcttctttggctgcaactgggcagatgattgagacagaagctatacccgttgttgagaaatatcataaagtatctctcaaattccttctttatgtttatgcacatatctgctatatcatgttttttatggtgtttcaatttttattgcaataacagaagagagaaagggccataaaaaagaaaatgaaggaagagatggtcgttaatgtcaatttctcgcgtcctctccgaactactcgttcttgtcgtaaccacatgcctgctacttacacctttggtatagtcatattttcttgcgtttcttccgcttgtttgatatattatttacctgttggcgtggcttattagtttgcatatcttattatccagacgagtatgacaagatgatcagtgatgccgtggaagaaacagagtaagaacttgacttctttcttaatccaagtcatctatccaccaatatttagcacatatgagatagtatttcatttgggtaaatcaactctcaaataatctgatgaactataatggaaccactgttgatcccttttcaatggcggatatgtgtagactcgttttttaatgtgtaccattggtttgagattaaacatgctaatgctatagctcattcttttctgtctattcatagtaagagatgtaaattgatttactgacagctttgtgtcggtttgatgagaaagctttagcatgagaaaaccccatcattcacttctcttcttgatcagggacaccgatggagatgaggtagaaggaagggatcaacaaagtgcctcattggactcaaacgataagtcaacagaggttgaagcagctgaaatccacaatgacgatgataaagagaatgagataagcaaggaggacgcagagccaaaggaagagtttggtgccaaaaacaggttgagacaaagagttaccaggaactcagccatctgttaatttaatcctcaatgttgttgaagaaatagtaaaaagcttttgaacaacaaaacatcgttttgtctgttggtggaaagaccaagctttttgattagaaggtttaggactttttttggtgtgtggtgatataatatatgatgatgatatactccattcctaacagtgtagatttgactcttattaattattatgtggtatctccccatctttgatgtatggtaaactatattttcagaaaaaaagtttaggtattcgattataagtagtttagaatagatatttcattgtgaaaatatgattgttaagagtcagggtggccgagtggtctaaggcgccagactcaagttctggtcctcgtaagagggcgtgggttcaaatcccacttctgacatttttattattttctttttaagtttatgctcaagaagatatcccccactcaccacaccagtacatcgttttctgtctttttacattatgacttttctacattaaaccgaggcactgagactgtgagacattgagacttcgtttgaagtctcaccaataccaaagttaccaagaaataaaagaagtaaaatattacaaacaaaaaaacacattatatccaattttatgaaactcgaaccacaaaactctcacaaaggatcagtaataaaaagaaaaaactctcacttacaagtaatagttcatgcccactttgatcaaacaaatgtgaggaatattcaacatcacgcctgggctccggcaattcttcctcaagaacgagtacgctacgtttaccaccagctgttttacaaacactgagttccgctttgccttcacgtgaccgtgtccgacaatgtaagccacttcagcgtccttagcattcaccagatcaaacagctcttccttcacctgcggttgcctgaacttggtgtccattggtcggaactgaaacatccttctcatgctcagcctcggaagctcttgctcatactctgctctcagtttaagtagagccggagacttgctgtttgttactgttgtctgtgatctcgagctgcctgcgatgttggcttcggatatagaccgagacagccttgtcccaaacttgtttgaggctttcacaacagcgagccgaccgtcaatcgaacggtcagtgtttgagccaccatagccttcggattctagctggataaactcggcgatgctcatcaccagctcgtcttcaaagtcgtctccgtctttgttcacgtctttgtagccagctcggataatgcatcggtacatcctgtatgtttttggtccaatccggccgataaggtaccgttctttctgcggcacatacgggatagggacagttttgcagcagacaaagacgacaacttggtagaacgccggtaagtttgttagaaagtgcttaaatgtggcaggaacaccgctggcgagctctgtgtagataagacccatcccggggactttgatgatcccgaggctcgggccaaggcttagtattgatttcatagggaccttgttgtgctggtcgcataggtacttctttctgctgccgtaatgccatacgtatgtgatgaaggtgaagaagagggaaaggagcagagtgatccagcctcctttagggattttgactaaggctgatgcaacgaagataagttctatggtcccgaagaagaggatgaagaggacggagaagacgatattacggttccagacaaagttgatgatgagaggcatcaaccaagtagtcacaaaggctagagtcatgcaggcgagccctggagaacaaaggatttgtttaatgataaaagatggaacttatgagtttgatggaaggttaagtccttaccaaaagcaaaagctatgtgtcgagtgtctcggaaacaaatggtgacagcaagggtgaggatcatgacaacccaattgatctcagggatgtaaatctggccaaggacccatcttggtttgtgaacaatcttcacacgcgggaaggattcccattgcatagcattgtttgacaatcgagaacgtggcaaatatgactgcttgactagcgaccattgcagctagcatagccatcatgagaaccggccagaaaaatgggtctgtagaacaagaacaaaacacatgaaaactacacgaacaaagttgagcacatgaatgagttgacatattacttgcagataagaataataaaccagaaactttggatctagacatgtaccatggataaaatcaaccactacaacatcccaacattgaaggtcaggtacatttatttgagaaattgtagtattgttgggacttgtagaggaattatataaaattggagggattgatacaggttgtcagaagtagaggaaagagacgtgaaaaggagattgaccaaactattacctggaatggaagaataaaagcttgaaggtagagcagaaaaattctttgataaaaacgcagcttggcccatgtattgaagcaccagacacgggtaaacaacacaacaaaacgcgaactgcagagaaccatgacatagcaaaatgttattgtttcttcatctttattagccaacaaaagaggctgtcaaatatttataacaataaccagattttaatagtttatcatattttttcctcttccttgggtcaagaataaatccataattccgtcaaaaataaaataaaaaaaatccataatatgaccaattgcttgtggattctttagcaacaaaaaaaacttctagtaactgtacgatgcaattcctaaagaactactataaaaagtctctccacaagtttctgctgcataaaggaaccaaaaaagctgcttcacatacccttatagatgtggctgtaaattggccaagttcagcaaagatagcctccgttcctgaattcagacaaattgcaaagatgagacataatatagcattaaaatttgttgagtctattttcagagcataaatgaccatattacctgtgatgcataatagaatgcctcccagggatagccatccatctattcccgtatctctaaagaatacatagatatagtagggagataaggctttgtatacactggggttccaagtcacaatattgtacacaccagcagttgcaattatcaacaaccacaaaatcattataggtgcaaatagaaaggcaactttatttgtcccacggtgctgcagaacaaaaagtccaaccagtaaagcgcatgctatcatgaccacagtacctatgcaaataacacattgataaagaatataaataacactgacagaatgcgtaagaatatataaactagatatgtaggtatggacaggaaacgttacttactgtgcttcagacttgtcttggccacaaggccatcaatagacgaagagactacaagaagataaacgttagatgctaaaccatggaaaaggaaaaaattggtaacatactatataaccagaaagaagcgaaacgaagtctgcctaatcacctgaaattgctggtgtaaggacaccgatggttattaccatggaagttcctaccaagactaaaacaagcaaagcagtttttgatcttttatttcgttctataaggcttttgaaagcagaactaggcaaatttctacttgcatctccaggaccatagtatgtagagatttcttcatcagcagcttgctgatttggaagcaaagaaaatcttgcgtgtctgcagagcaaagcatacaaagcaaagatccctcctgcaacataaattcaacatttacatcctaaccctaagtctcagaagaaaacaaatagactcaattagcaaccgatgcacataccttcaccattgtcatctgcacttaacacaaaaaccatgtacttgatgagtgaaaggagagtgatggtccaaaatatcaaagaaaacgcgccaaatatcgtatcttctgtttggtgatgtctcaatcctccgtagaatgtacatttatacacatagagaggagaaatactcaaatctccaaacactaagccaaaactctggtatgctaaaaggaggatctggttacacctgtttctcctatcagcctgattcaagagaagacaacaacaaacttataacaccacgctggtcaaaactacacacatatataaacagatattgccgaacattttaacgtttggatagattatcaatgaatggctcataagctatcacaagaagcttaaacttcgagagcttacaaatcaaaacataagctcagagatgcattaaaacgaatcgctaacagtaattttactttcaagagtgatattgagttggatttgaatatcctgattgaaaaatttagaatcagaagctaaattcaatgaatattggcatcattcattttcagaattctctcaccatttctattcacatcatcacagtacaacaattgtaattccgcaggagtagcaataaggaatctaggggtttaagatttccgacgtatcggtcgagagaagggagcgacataccatgattcaagccgccggcgagtaagatgcggcgtagcttggatcttcaacgatcagagattacacgccggagactagttctttggaatcggaatcgaatctagagaaaaacgatcaacgatcatttgttgtttttattatcgagagaagaaaaatttaacaaattcgatccaaagctcgcggtccttcttcttcttccagttttttttttatatatatctcagttgattttttattcgttcttttaattttttttactcattttagttgtccgatttctctgtgagaaaatgtcaccaagattattagatttcgtcatttttcatgtataaaaatcggatttgaaacttctaatccctcctactgcaccttgcttatttttttattgccttgattagatatataatctcaaatttgtttgtaagggttaagattatcattctataattttttaagtgaatttcagcttcaaatcatgcaagaatcaacctgtaattattatatattgaatctctcataagtcattaaccaaacctgcaaatggctttctgatctcaaagtattttttatgttgtgttgataaaaagagattgcaggaaacaaaataattgattgtaacagaaacacaaagtttgagtaaagtgataaccaaaaacaaacaaacaacatcaaaagatctctcacattctgcgtcggtttggcaccaattctggatttcccttcttcatcatcgctacaaattcttcgtagttgatttttccgtcctaaagattcgaatacaaagatgagaagagagtgttaaacttacacgtatacttacagatgtatgaattggacgaaaccagagatttacgtatacttacacgatcggtgtctacttcagcaatgatctctttgatggatttatcatcacccatgttgtatttcttcatggctagctctagctcttccattgttatgtagctaatatcacaaatcaagatcaaagagtgagactttatttatagcttgttaaagaaagaaatagagagctaaagaacaatgttttacccgctgttgtcattgtcaaagaactggaatgcggtgtacaagtgatcctcacgttcgattctgttcatatgcattgtggctgatataaactccaagtaatcaattgatccatctccatccatatcagcctaaaagaaacaaagcatcataagcattattgctttgacatcaaagtagtggattgtgatagacttactgctttcattaactgccttatttcagcttcagagatctttgaaccaagttttgggagaccggttctcaattcctccaaggtgactattccattgttatcagtgtctagagatttgaacatctctttaagaccaatgatttcttcttcagaaaggttctcagcgataacctgaaattgcaaaacgaaaaccaaagattggctttagaacaagaagactacataaactacaatagtgatggtaagactgtttcaatcagtgttttaattaccttcagggccattttttttagtttgttcatcgcccggaattgtttcatcctggataacaccgcattgtcaagcggtttgtctgatgcctccccatcttctctaatccacggatgatctgcgtatgtatcaaaacgttattaaaattggataaaagaaggtgttttcatcaatttattcatcaaaacatgttataaaggggtcttacttagcacttccgcagctgtaagccgatctttagggtcatattttaacattttcctcacaagatctttggcaccatctgatagtgctggccatggatcagctgaaaaatcaagttgcccttgaagaatggcatcaaagatccccgtttcattttctgcacaacagaaagaacgtgactatacattccagtccaacatttaaacagtgaaaccaaattctcttctcaaataagatcaagacaatacctccccagaaaggcggaacaccactgagaaggatgtatagaatcacaccagcactccagatatcagcctctggtccatagttccgttttagaacttctggggcaacatagtatgcacttccaacaagatccttaaacttatcacctgcattaatggatcaacttcattagagggataaattgtctatagaaatcaaatagggaaggatagaggctgttcaaacctggcttgaagaagacagagagaccaaagtctgtagctttcaatggtgagttctcatctttactaagaaagagaaagttttcgggcttcaagtctcggtgcattacacccatagaatgacaactatgcacaaccatcaccatctgcctacacaaatccgcagcagctctctctgagtaaagacctttagaaatgatcctatcgaacaattcccctccttcacacaactccattatcagattcacagagtgtctgtcctcgtaggctcccttcaagtccactatgttcctataatcaactcaccaatttgaaactcaggtaaatataaatatgcaaaaagggaaactttttcaagagtttaacataggaccaacaaacttttcatccacatatgatgcaaaccattcattaatatagaaaacgaatcctatgtctaaatattcggcaagttcca

SEQ ID NO: 32572 - DNA, 4555 bp, Arabidopsis thaliana landsberg
  unsure (1)..(4555): unsure at all n locations
ctcatgtctctgctgaccaaggagttccccgagcttggtctgtagccggagaattgcacggagatgacgtggagacagtcggtgatgtggtgggccaacaacgacaacgccacggtgattaaaccggagatcctgctggatcgaaatccggattcggcgtctttcttgaaaagaaaatcggattacgtggagaaagagatcagcaaagacggtttagatttcttgtgtaagaagttgatggaggctgggaagctagggctagtgttcaatccatacggagggaaaatgagcgaagttgctacgacggcgactccgttcccacacaggaagaggcttttcaaggtccagcattcgatgaactggaaagacccgggcactgatgttgaaagcagtttcatggaaaagacgagaagcttctacagctacatggctcctttcgtgaccaagaaccctagacacacttatatcaattacagggatcttgatattggagttaatacccctggcccaaacagttacagagtagcagaggttttcgggaggatgtatttcggtgaaaattttgatcggttggtgaaagtgaaaactgctgtggatccgcaaaatttcttcagagacgaacagagtatacctaccttgcctggcaagccagctaggcgttagtttgtgtagtcaccttacttggttccctttgatttccttaaccacaatgtaaaatatgtatgctatctgaaaaatgatatttcctttttgtaattatacaattctttttaaaaatggcctaaaacctcaaaatttcagcagaaattgatctgctattgtactcgagttccggtcatatcttacatgataaagagattctatgacaataagaacataagaaaccaagaaagtgcgaaagaagtagttgctgcttctcaaatcttctggctcgatgcgactagtaatacaaatttttttgctcgaaagcaggagaattcaggcaattcagaaaacttgcctgatgtttatgttgatcctcgaagttttgatatactctgcgaaaaaatgtccactctcatgggacaattctgattcaagtgcaccaatatccgcattttcttcacccgtaaagatacggggtatacctgcaacaacaacagatattatagcaaaccaatctgttaattagctgtctcaattagtcaattagagacttcgaaagagtaaccatccaattgaaagtgaagcagattaccgtgaaagcattctctggcttctccagccattagtacaacatctccacttctgagatacatagcatgaggaggatcgtcttttgattttccgcctaagaggaaaatagctttacatcccaagctacgtaagaggacatacagttactctattgtacatcatcatacggtcttacgtttagcaaaaacagaaggcaacgagatatacctcatgcttactatgggtttactccagtcagcttccatatcatcaaggtggcctccaagggtatcacctatagaatgagttaaaaggctttcagagttcaacatcttaaggctttccaaagcaagaaaatacaaaatttaaggtaaactctacctatgccaaaatagtttacaatagccccctctggacgaaattcctctccgtcaggcattgcaatggcggcatgtgtcttagctagttgacagagtgcgtcagggatgttgttatgagggagagaaacatcatagttacgctgaaaaaaagccgaaagaatcagcactcattatagattcattgcaataggttactaaaactcatcaaaagatgttaaagattcaaccttggaccaatcgaactgtaaaccgagagtgctccatcgaagcttcctcaaaagaactgaagctgaaactgatttgcaactacttcgtgttgctttttcaatatctacttcttcatagaacttccacttgttgttggtaagatcatcctgaaccaataccttgttttctttagctgaatcaaacaaatcatcaataggaccgtaaattgcattgtggtttgttctattcggaggctgcggaaaactcgtcaagctctctttaatccatttacattgctcctttaaactcaatgcatcaggtataaagtaaaaacctgtataataatagttcaaaagctgagctcttggattctaatttaacacagatgattgaaagttggggattttaacttaccagggcgattatcgatgcagaacacaggagaagaatcaactttcgaaaccctaattccgtctggcacaacaccgtcattgttgaaattttgtgaaatcaaattgaaatcaagtaactcagacaaatcaattggttttggtagcttcttcctgcgagttccaagtgattgattataagtggaaggattcaaacaaacgcaagtggagagaagataaaaaattggcttactttctagagaacttagaatcctgttcatagtaaagtttgtattttttctctgctcgccggaaagccgtacgatctgcgtcgtcggagacgttcgccgattcgtacatcttcttcttcaccagtcgacgattattctccggctgggggagcaaccaacccgagtttatttttttattttcttttatttgcaataaaaatcactagtctttcctaaattcttttttagacctataatacctttttgtgtataaatagaccaataatttattttgaaaaattgaacatttgaaccctgcatttctagtttttggccattggacataatcagagttggaaagtttacaaaaaaataaaagaaaaatctaaggtgtaacactttcatctaaaaactgataaaattaaatgtcaatggtattaattaattctaaggatgcaaaaacactctcataagctattaaatcaatggtgttaatttgtgaaacttagtcatctaaataatttgctaatttttgtaaaaatatatcatatatgtaagagaaattcattgcttacattatctaagacctacacttgattaatggtcagctttagacctacccttgatcttggtggccaattcatgtatagcaaatgtggacatcaaaatattttttttcataaatagagatgataacaatattggagataattattttgaacctttttcattcaccatttatcaagaaattaattacatataccatagtctataacaaatttccaaatttaccacaaaacttttctcaagaaggttttaaaaaatttaggaactcttttggcccaaatcctttgaaacaattgtgaaaggactccatttactttacaacaaaataaatagggaaatttgcaaaattgattaacaaaataactataattaagaaactaaccaacaaaaaaaacagagatgatattttgtatataaactataatatatactaaagtacccttatctacacaatcaccatctcttctatgctattacaaccattacccttgcaaccgtcatcatcatcgcatccaccattatttccacaaatgtcataccatcatcaccatcaccactgcaatcgtcaccaccataaaaactaccattacgctgtcatctctaccaccatcaccattattgccgccgcaattgacacacgaccactgcaaccaccaacacaaatattactacgacctacaccatacacaccaccaccaccttaatcacttcttcctctcttccattgcttgtttcatctctctcgcctctcatctttttttttctactttaacttaattaaaacagaaccgaactatagttttctattttactttcaattttgtaccattctatttgctagttagaacgaagaaaaatgaaaacaaagactcacaagatcttattgaatattttctggtttgatcaatatctaaaattgaaaattcctaacacaaatttaaacccaaaatcgaatcgatttcaattcgcttaaggaaaggagaaaagagattaaaagtatataaacatgattttgtcagatttctaaaaactgaaacttgagatgatttcatttagtttaattatttttgtttgggttccatatatagtatcttagggtttagttttcttaaatcaatagatgtttttaaattagaatggattgatataaaaaaagttaaattttctggaaattttatgttggattggagagaagagaagaagcancgaagaagatgatgaatgaaaaaaatctgttaaaaaaacattacctttagatcaatatctgattcacaatccattacctttagaacatatgaaatattacctttagatcaatatctgatcaacaaaacgaagaagatgatgagtcatggcaaattggaaaatagaaaaataatgcagggataaacttgtaattagttagagtttttggttacttgctgaattacgtaaattatatggctatattcttaatttttgtccaaatatggctatccagctagttcacccatatatgttatcaatctttcaaaaaaaaaaaaaaaaaaaaaaaagttatcactctttcttcttcgtcttcgttttt

SEQ ID NO: 32573 - DNA, 1369 bp, Arabidopsis thaliana landsberg
tataaaaagctataaatgcagcgttaattaagtccgttacttaaagaggaattagtattttagtactctctgtggtgttaatatgtagggcggtatgtcaagtgcaacgaagacattatgcgggcaagcatacggtgcggacaatatcacacaatggggatatatctacaacgttcatggatcgtggacatggccgtgaccactttgtttctaccgtttattgtacttgcgggtcccattctccgtctattaggccaaaacgtggagatcacaaagaccgttgatgagatatatccttggatgattccgtatgtatatagcttaattttcactatgactatacaaatgtacctccaagcacagatgaggaacgctattgtaggcgttctttcgacattgtccttggctcttgacctcgtggtcacatggtggtgcgtgagtgttatgggtatgggcattggtggtgctctcctcggacttaatgtgggctcttgggcaatggtattagccgagtttgtgtacatttttggtggatggtgtccttttacttggaccggatttagtattgctgcttttgttgacctaattcctatgctcaagctttccatttcttcaggcttcatgatctggtaattaattacctattctttttttgtttttttttcttcttaacaacttcaatattataattccaaggcttgaagtgagatttctattgaaggagtaatattattattttttagcataaagttatgttatgttaaatgttctacttttgttctctaataatcctcttctttacaattttcgttcagcttagagtattggtacatgagcatccttgtcttaatggcggggtatacaaaagatgcgagaatcgcaatctctgctttctcaatatggtaaaagtcaaaaccttcatagctaactgaatttcagttcaaaaggctatattaaaaataaagaaattcaatcatcttgaaaatttgcagccaatacatatatacatgggaactcaacatatgccttggcttcttgggtgcagcatggttagtaacatatatacgtactctcattcacagtattttgattttgatgtatacatatattatttgtttaatactaaagtgaatgtatctctatctatgaatccgaaaatgtagtgtaccagtggcgaatgaattgggaaaaggcgatgcggatgcggtgagattctcgataaaagtggtgcttgtggtattagcggtgatcggtgagatatgtttcgttctttgcctagcgtttggcggacagattttgattttgtctatgatagccaagcagtttctgatgcaacagctgaactttccatcggtcctagcatatctat
